United States Patent Application Publication US 2024/0131193 A1 - sequence listing, part 6

SEQ ID NO: 9348 - DNA, 2061 bp, Homo sapiens
  source 1..2061: mol_type = genomic DNA
atgaccgacgccctgctgcccgccgccccccagcccctggagaaggagaacgacggctacttcagaaagggctgcaaccccctggcccagaccggcagaagcaagctgcagaaccagagagccgccctgaaccagcagatcctgaaggccgtgagaatgagaaccggcgccgagaacctgctgaaggtggccaccaacagcaaggtgagagagcaggtgagactggagctgagcttcgtgaacagcgacctgcagatgctgaaggaggagctggagggcctgaacatcagcgtgggcgtgtaccagaacaccgaggaggccttcaccatccccctgatccccctgggcctgaaggagaccaaggacgtggacttcgccgtggtgctgaaggacttcatcctggagcactacagcgaggacggctacctgtacgaggacgagatcgccgacctgatggacctgagacaggcctgcagaacccccagcagagacgaggccggcgtggagctgctgatgacctacttcatccagctgggcttcgtggagagcagattcttcccccccaccagacagatgggcctgctgttcacctggtacgacagcctgaccggcgtgcccgtgagccagcagaacctgctgctggagaaggccagcgtgctgttcaacaccggcgccctgtacacccagatcggcaccagatgcgacagacagacccaggccggcctggagagcgccatcgacgccttccagagagccgccggcgtgctgaactacctgaaggacaccttcacccacacccccagctacgacatgagccccgccatgctgagcgtgctggtgaagatgatgctggcccaggcccaggagagcgtgttcgagaagatcagcctgcccggcatcagaaacgagttcttcatgctggtgaaggtggcccaggaggccgccaaggtgggcgaggtgtaccagcagctgcacgccgccatgagccaggcccccgtgaaggagaacatcccctacagctgggccagcctggcctgcgtgaaggcccaccactacgccgccctggcccactacttcaccgccatcctgctgatcgaccaccaggtgaagcccggcaccgacctggaccaccaggagaagtgcctgagccagctgtacgaccacatgcccgagggcctgacccccctggccaccctgaagaacgaccagcagagaagacagctgggcaagagccacctgagaagagccatggcccaccacgaggagagcgtgagagaggccagcctgtgcaagaagctgagaagcatcgaggtgctgcagaaggtgctgtgcgccgcccaggagagaagcagactgacctacgcccagcaccaggaggaggacgacctgctgaacctgatcgacgcccccagcgtggtggccaagaccgagcaggaggtggacatcatcctgccccagttcagcaagctgaccgtgaccgacttcttccagaagctgggccccctgagcgtgttcagcgccaacaagagatggaccccccccagaagcatcagattcaccgccgaggagggcgacctgggcttcaccctgagaggcaacgcccccgtgcaggtgcacttcctggacccctactgcagcgccagcgtggccggcgccagagagggcgactacatcgtgagcatccagctggtggactgcaagtggctgaccctgagcgaggtgatgaagctgctgaagagcttcggcgaggacgagatcgagatgaaggtggtgagcctgctggacagcaccagcagcatgcacaacaagagcgccacctacagcgtgggcatgcagaagacctacagcatgatctgcctggccatcgacgacgacgacaagaccgacaagaccaagaagatcagcaagaagctgagcttcctgagctggggcaccaacaagaacagacagaagagcgccagcaccctgtgcctgcccagcgtgggcgccgccagaccccaggtgaagaagaagctgcccagccccttcagcctgctgaacagcgacagcagctggtactag

SEQ ID NO: 9349 - DNA, 1254 bp, Homo sapiens
  source 1..1254: mol_type = genomic DNA
atgcccctgtacgagggcctgggcagcggcggcgagaagaccgccgtggtgatcgacctgggcgaggccttcaccaagtgcggcttcgccggcgagaccggccccagatgcatcatccccagcgtgatcaagagagccggcatgcccaagcccgtgagagtggtgcagtacaacatcaacaccgaggagctgtacagctacctgaaggagttcatccacatcctgtacttcagacacctgctggtgaaccccagagacagaagagtggtgatcatcgagagcgtgctgtgccccagccacttcagagagaccctgaccagagtgctgttcaagtacttcgaggtgcccagcgtgctgctggcccccagccacctgatggccctgctgaccctgggcatcaacagcgccatggtgctggactgcggctacagagagagcctggtgctgcccatctacgagggcatccccgtgctgaactgctggggcgccctgcccctgggcggcaaggccctgcacaaggagctggagacccagctgctggagcagtgcaccgtggacaccagcgtggccaaggagcagagcctgcccagcgtgatgggcagcgtgcccgagggcgtgctggaggacatcaaggccagaacctgcttcgtgagcgacctgaagagaggcctgaagatccaggccgccaagttcaacatcgacggcaacaacgagagacccagccccccccccaacgtggactaccccctggacggcgagaagatcctgcacatcctgggcagcatcagagacagcgtggtggagatcctgttcgagcaggacaacgaggagcagagcgtggccaccctgatcctggacagcctgatccagtgccccatcgacaccagaaagcagctggccgagaacctggtggtgatcggcggcaccagcatgctgcccggcttcctgcacagactgctggccgagatcagatacctggtggagaagcccaagtacaagaaggccctgggcaccaagaccttcagaatccacaccccccccgccaaggccaactgcgtggcctggctgggcggcgccatcttcggcgccctgcaggacatcctgggcagcagaagcgtgagcaaggagtactacaaccagaccggcagaatccccgactggtgcagcctgaacaacccccccctggagatgatgttcgacgtgggcaagacccagccccccctgatgaagagagccttcagcaccgagaagtag

SEQ ID NO: 9350 - DNA, 2643 bp, Homo sapiens
  source 1..2643: mol_type = genomic DNA
atgagccagcccgccggcggcagaagaaagcccagaaccctgggcccccccgtgtgcagcatcagacccttcaagagcagcgagcagtacctggaggccatgaaggaggacctggccgagtggctgagagacctgtacggcctggacatcgacgccgccaacttcctgcaggtgctggagaccggcctggtgctgtgccagcacgccaacgtggtgaccgacgccgccctggccttcctggccgaggcccccgcccaggcccagaagatccccatgcccagagtgggcgtgagctgcaacggcgccgcccagcccggcaccttccaggccagagacaacgtgagcaacttcatccagtggtgcagaaaggagatgggcatccaggaggtgctgatgttcgagaccgaggacctggtgctgagaaagaacgtgaagaacgtggtgctgtgcctgctggagctgggcagaagagcctggagattcggcgtggccgcccccaccctggtgcagctggaggaggagatcgaggaggaggtgagaagagagctggccctgcccccccccgaccccagcccccccgccccccccagaagacagccctgccacttcagaaacctggaccagatggtgcagagcctggtgagccactgcacctgccccgtgcagttcagcatggtgaaggtgagcgagggcaagtacagagtgggcgacagcaacaccctgatcttcatcagaatcctgagaaaccacgtgatggtgagagtgggcggcggctgggacaccctgggccactacctggacaagcacgacccctgcagatgcaccagcctgagccacaagcccggcagcttcctgaagccccccgccccccccgtgcagcacgaggtgagagtgcaggacggccccagccagacccagcccaccatgaccatcagcagaagccagagcccccccccccccgtggactggaagacctacaccagcagcgacagaagactgagaccccccacccccagcagccccagacccagaagagagagaggcgccggcaccggcgccagcagagagatggcccccttcctgagatgccaggagagaagcctgatccccagctggagacagcccaccgccggcgacagcccccccagcccccagagcagcagcacccagaagggcagagacccccagtgcaccagcagcggcaagagagaggagagatacccccccgagctgcccagaggcagaatccccaccagctgggtgcacgaggagaccgacagctggggcaccgacgccggcaaccccaccccccagagactgagagccatcgaggccaccaccaagggcatcagcgccagaggccccagccccctgcccagaagcttcggccccgccgagtgcctgggcctgagactgcccctgagagacgaggccaagggcgccttcttccagttcagagagcccgagagcgtgagaagccccacccccgtgcagggcctgaccaagatccccatcagactgccccccgccagaccccccacccccggcagaagcttccccggcgccaccagcggcagccccagaaccgagctgggcagagaccccatccccctgagagccgtgaccgtggacctggccggcagcacccacggcgactgcagcgtggaggtgagacaggaggaccagcagctggacatccaggtgatggccgaggccagagagagctgggacctgggcctgcaggagcaggagggcagatacacccccctgcccctgggcggcaacaaggagcaggccatctactgcagcctggaggaggagatcctgggcaacatgaagctgctggaggtgagaagcgcctgcccccagggcaccagaagcggcgtgatccccagaagcggcgtgtacatccccagactggccggccagtggcccgagcccggcggcccctacgacaaggccatccaggagctggcccagggcagccccagcctgctgaaggtggacctggaggcctggaaggccgcccccaccggcagccccaagcccgccgtgacccccggccccggcagcctgaagggcaagctgggcgccagacagagcggccccagaaccaaggccagcctgagcgccaagggcacccacatgagaaaggtgcccccccagggcggccaggactgcagcgccagcaccgtgagcgccagccccgaggcccccacccccagccccctggaccccaacagcgacaaggccaaggcctgcctgagcaagggcagaagaaccctgagaaagcccaagagagtgcccagcatctacaagctgaagctgagacccagaatcagacccagaagagaccacagacccgagaagcagcccagcagaatccccagacccctggcctacgtgttcctgggccccgccagacagccccccaaggacagactgctgagagccgtgctgggcagcaagggcggcgaggccagcagagtggacggcgccagcgtgggcgaggaggaggaggagggcaaggaggagaaggagcccgccgcccccctggagagcagcccccagccccccgagggcctgcagccccactggctgaaccaggcccccctgccccccgaggaggagagctgggtgtag

SEQ ID NO: 9351 - DNA, 14262 bp, Homo sapiens
  source 1..14262: mol_type = genomic DNA
atggtgcccgaggagagaagagtgggcctgagcagcgacgagaccagcagcgacagcctgaagagctggcacagcatctgcgtgctggacagcaaggagcagcccctggcctgccagcagaagcagagacagttcgtgaagcccgtgaccgagagcgagcagcccaccgtgctggagctgctgctggccgagctgagaaccctgttcagcgccgtgctgcaggacagcagccccgccgcctggagatacctgcacgccgtgctgggcctgctgcccccctacagagagctgctggtgggccacctggacctgctgcccttcctggagcagctgtactgctgggccccctgggtgcagacccacctgcacctggacctgctgggcgccatcgtgcaggccttcccccccgacagcagcctgctggacagcgccagccacgccgactgctgcccccagaagagaagactgcaccacagacccccctgccccgcctgccccttcgtgcaggcccagtggagcagacagcaggtgaaggaggagctggccacctggctgagacccctgaccctgcccgagctgcagagatgcctgggcatcgtgggcgcccaggtggccctggaggaggccgtgtggctggacggcctgagcctgctgcccctggccctggccgccgacatccccgtgagatacgagagcagcgacaccgacaacgccgaggtggagcccgtgggcagaaaggagaccagaagccagctggactacgaggtgcccagagagaaggccttccagaagagcagcaccggcttcagccccgagaccagcttcctggacagccaggtgatgaccgccctgaagatggagagatacctgaagaagatccacttcctgtacctgaacgtggcccccagcagatacttcagaccctacagcctgatggtggtgccccccgacaaggtgaaccccgagcactacatcttcagccccttcggcatcctgcacgtgcaccccgtggagggcagcgagaccatgaccctgggcacctggcaccaccactgcgtgctgtggcagcagctgcagttcatccccttcttcaagtactgcctgctgagaaagagcttcacctgctggaagaagaacgtgagactgcagggcctgcacagactgcagaagttcctggagaaccacctgctgctggccgtgccccacttcggcgccggcctgctgcacatcagcagactgctgcaggagctgcacagcgtgagctggctgccccaggagctggacagatgctacgagctgctggacctgcagaccgccctggccgaggagaagcacaaggccctgagactgctgcacagatgcctgaacctgtgcaccagcatcctgagactggtgcacgaggacacctaccacatgcagcagtgcctgcaggagagagtgcagaactgcgacagaatcagaaccggccagggcagcatctacctgcagagagtgcagcacaagcagctggagcagaagctgaagcaggccgaggcctggtggctgcagctgggcaagttcgccagactggtggactacatgatctgccagagcctgatcagcgtgctggaggagcagatcaccagcttcgtggccaacatcctgcaggcccccagacagaagcccttcctgagcagccagctggtgttcgacgaccacggccagctgagccacgtgccctgcgtggagaacatgatccagaccctgaccggcggcctgcagagcgtgaagaccagcgccctgcaggtggtgcagagcgccgacctgaagaccagcagcgacagcctgtacagcgaggaggaggacgaggaggaggacagcaaggacgagttcctgatgcccaagttccagggccagcccagcgacgccgtgagcatcttctgcggccccaacgtgggcctggtgtggccctggaagagccaccccatcgccggcatcctggaggtgagaggctgcagactgagaggccagtacttcccccacaactacaagcagctggaggaggacctggacaacaaccccaagatccagcaggccctgaacatccagcaggtgctgctggagggcgtgctgtgcaaggtgcaggagttctgcagagagcaccactggatcaccggcatctacgagttcctgcagagctggggcccccagaagctggaggacatgagaggcggccccatcaagaactacgtgaccctggtgagcagactgaacgtgtggcaggccagagtgagcagcatgcccatcgagctgctgaccaagggcggcctgctgctgctgagctgccacgacgtgcaggccgagatggagagcaagctgaacagcatcagaaaggacatcctggcccacgtgcagaacgagtgctggaacctgagccagcagctgatgaccgagctgaccgacttcatgcacatcttcagaaccatcaacagcgacatccacgccatcgcccagtgcacccagaagctgaacgaggccaacgagcagtacgtggagctggaggagagaatggagtacgtgagagccctgcacgagctgatcagaaaccacttcagcctgttcagcgccgagaacgaggccctggacatcagcgtgagaagacagttcggcgagagccccatccccccctgccccccccccccccagccccacctgctgcactgccccctgctggccccccagctgctggacatgtgggaggccttccagttcgagaagagccaggccagcgagttcctgctgagcaagagacacgccatcatgcccaagctgcagcagctgatggccgccgccctggccgagctggagggcctgctggccaaggccctgagcggccccttcatggaccccacccaggaccagagaagcaccgagcaccagctggtgagcctggagagacagttccagaacaccgtgagcgacctgagcgagctgcaccacgcctacgccatcttcaccgaggacgagacccccgtgcccctgcccatctgcggcaccagacccatcgtgcagcagcagagaatctggcacctgtacagagtgatcagcgagaacatcagcgagtggaagtgcatggccttcgccaagttcagccccgccatggcccaggagaagaccgagggctggctgaccgaggccgccagaatgagcaccaccctggagctgcacagccccgtgctgcagcactgcatgagaatcctgggcgagttcagaagctacctgcccctgctgaccaagctgggcagcctgcacccccagagcctgaactgccagtgcctgctgagagccctgggcctgggcagcctgcagaccatcgagctgctgaccctgggccagctgctgacctaccccctgctggagttcgccgacagaatcaaccaggtgtggcagaacgagaacgagagaatccacgcccaggagaccatcagaagactgcagagatactgggaggccagacagctgagactgctgaacttcatcctgcacgtgccctacgagccccccgccagcgagagaagcaagagacaggtgctgagaagcccccagtgggaggtggtggacaaggacagcggcaccttcatcctgagcgactacagcaacctgcaggacagcatccaggagagcctgcaggtgctgagcaagatcctggccatcgagaagagcggcgacctgaacaagatcgccctggagtgggtggccatcatgcacggcctgggcgccctgctggaggtgtggctgaccttccagcagaagtggatcttcctgaacaaggtgctgcacgagatgaagatccagttccccaacgccgacctgaacagcagattcaaggtgatggacgaccagtacagaaccctgatgagaatcagcgtggccgaccccatggtgctgagcctggtggtgcccagcgccgagagaagcccctacttccagggccagcagctgcagcagctgctgcaggccggcagcgtggagctggagggcatcatcatgagcctggagagcgtgctgtacggcgtgtgcgcccacttccccagactgttcttcctgagcgacagcgagctggtggccctgctggccgccagactggagagctgcgaggcccagctgtgggtgagaagatgcttcccccacgtgcacgccgtgagcttcagaagctgccccaccggcgagaagaacaccgacgactgggagagcagccccaacacccagacccaggtggaggccctggccgtgctgggcgccggcggcgaggaggtgaagctgcagggccccctgcccctgcaccccgacctgcccaagtggctggccagcctggagaagtgcctgagactggccctggtgcacatgctgcagggctgcgtggccgccagactggccagaggccccagcctgggcgaggccctgaagcagctgcccaagcagaacaagctgtacctgcagctgtacgtgcagcactggatcgacctggtgcaggccttcccctggcagtgcgtgctggtggccgaggaggtggtgtggagagccgagatggaggaggccctgctggagtggggcaccctggccatggtgagcatgcacatgagaaagctggaggtgctggtgaacttcatgagagcccagagagccagccagggcggccagagcctgcccagcgtgagacagaccagcctgctgagcgccctgctggtgatggccgtgacccacagagacatcgcccagctgctggagcagcaccaggtgagcgacctgaccgacttccactgggtgagacagctgaagtaccacctgggcagcccccacatcatccccaagagccccctgcagagcctgaagaccatcgccagcagcgagcccagcctgagccccgccgcctgctggatcgacgtgctgggcagaagcttcctgtacaactacgagtacctgggccccagactgggccccctgcccagcctgctgcccgagagacccgccctggtgctgctgctggccctggaggaggtggcctgcggcaccgtgctgggccccaacggcgtgggcaagagagccatcgtgaacagcctggcccaggccctgggcagacagctggtgatgctgccctgcagcccccagatcgaggcccagtgcctgagcaactacctgaacggcgccctgcagggcggcgcctggctgctgctggagaaggtgcaccagctgccccccggcctgctgagcgccctgggccagagactgggcgagctgcaccacctgtacgcccccctgtaccaggaggccagcagaaacaccagcaccatcgaccccacccagccccagctgctgggcagcagcttcttcgagaagcaccacgtgagcgtgagactgggctacggctgcctgctggtgctgagagccctgagcagcgccgtgcccgccaacctgcacctgctgctgagacccgtggccctggccctgcccgacctgagacaggtggccgagctgaccctgctgggcgccggcatgagagacgccttccagatggccaccagactgagcaagttcttcagcctggagagagagctggtgagcggccccctgccctgcagactgcccctgctgaagcagatcctggaggacaccatcagaaccctgaacgtgaccaaggaggagcccaagtgccagaagcccagaagcctggccgccatcgaggaggccgccctgctgagaagccccctgttcagcatcctgaacggcctgcacctgcacaacctgagaggcctgctgtgcgccctgttccccagcgccagccaggtgctggccgagcccatgacctacaagctgatgaagcccctggtggtggaggagctgcagcaggtgggcctggaccccagccccgacatcctgggcagcctggagcagctgagccaggccctgagcagagccagcggcatcctgctgctgggccccgccggcagcggcaagaccacctgctggcacagcctgttcaagatccagaacagactggccgccatggaggacaccagcacccagggctgccagcccgtggagatcacccacctgtaccccagcggcctgagcccccaggagttcctgggctggctggagggcagctgctggcaccacggcatcttccccaaggtgctgagagccgccggccagtgcaacaacatgggccagaagagacagaccgaggagagcatcggcatccagcactggatcatctgcgacggcgccagcaacggcgcctggctggacagcatcacctgcctgctgagcgagctgccccagctgagcctgcccagcggccagcagatcgccagaccccccggcaccttcctgctgatggaggtggccgacaccaccggcatcagccccaccgtggtgggctgctgcgccctggtgtggtgcggcggcgagcagacctggcagtgcatcctgagcgccctgatggccagcctgccctacgagtacagactgcagcacagaaccgtggccgagctgaaccacatggccgaggtgctggtgcccgccaccctgagattcctgacctgccagggcgtgagcagcctgctgcaggtgcacggccagcaggccgtgtgcgccggcgtggccgaggtgaccagcatggccagaatcctgcacagcctgctggacctgcacctgagactgaaggaggagaaggcccccggccccgaggacctgagctacagcgaccccgtggcccagagcttcagaagcagcaagagcagcttcctgaacagaagccaggtggacagcgacgacgtgcccgacaagtgcagagagcacctgctggccgtgagcagcttcctgttcgccctgatctggggcttcggcgcccacctgcccagcagattctggcccatcttcgacaccttcatcagagacagcatcagcagactgagcaactaccccgagcccccccccagcgccctggtgttcgacctgcacgtgagccccgaggacggcaccctggtgcccttcaccggccagtacctgagcagccacatcaagggcaccctgggcaccttccaccccagcatccagaccgagagactgctgtacgtggtggacctgctgctgagcggcggccagcccgtgctgctggccggcgaggccgccaccggcaagagcgccttcgtggaggtgctggtggagccccaccacccctacatctacagccccatccaccccgccttcagcagcagccacctgagactgctgctgagcagaggcatccagggccagacccaggccagcccccagcccggccaccaccaggacagcaagcccagcctgctgttcctgctggaggacctgcacctggccaccagcgaccccgagaagagctgccagcccgtgctggagaccctgagacaggccatggacggcaccgtgtacgcccacagcaccctggagctgcagaccctgcagcccaccgtgaacttcctggccaccgtgaccgtgcccggctactgcgagagacccctgtgccccagactgttcagactgttcaccgtgctggccctggagagcatgacccaggccaccctgctggagagacacgtgcccatcatccaggcctggctggagagattccccagcgtggagagagagagagccctggccagaggcctggtgagagccagcgtggaggcctgggaggccgtgtgcaactgcttcatgcccagccccctgcacccccactaccacttcagcctgcacagcgtgagccacctgctgagcagcctgcagctgctgcccaacagaaccggcagcagaggcttcgtggactaccccaaccaccaggagcacctgagaagagtgagcggcctgagaggcacctgcctgaccgtgatgatggccaccagaaacgtggtgagactgtggctgcacgaggcccagagaaccttctgcgacagactggacagccccagagagagaagctactgcgccaagctgctgctggtggtggcccagagcgtgttctgctgcggccccggcccccagcacctgggcaaggaccaccaggagagcgaggaggaggaggaggaggagagagtgcccgaggtggagagcgagggcgagctggcccagtgggaggacttcagcaacagcaacagcgagaccgaggaggaggaggagccctacggcctgcaggtggccagagtgagcaacagcagagaccccagcctgacccccagcatcggccccgtgagcagaggcatgaaggagagcatcagccacaagatcagacaggagaagggcaccagagccagcaactacagactgcaggtgagaagaagcttcaagacctggtggcagaagaagccccagatggacctgatcagccccctgctgctgcccgtgctgctgctgcacccccaggagaagcccagcgacctggtgttcagccaggagctgatcctgggccccaacagcgagacccccaacctgtacctggagagacagtgggagaagctggaggagcagctggccaccagcgccgcccagctgaagctgagcccccacctggccagatgccacagcatggcccagcacgtggccagactggtgagagtgctggccagacccagacagcacggcctgctgctgagcggcgccctgggcaccggcagacacaccgccatcaccctggccagcagcatctgccaggcccacttcttccacctgcccagcggcagcgaggaggccatcctgcagtgcctgagagacgccagctggcacgccggcatgctgagccagcccgtggccctgctggtgcccagcggcgtggacctgaccaccctgcacagactgctggccctggccaccagcggcagcttccccggccagtacaccgaggccgacctggacagaatcggcgagcacctgcccagagagaacctgggcgtgaagcagaacatcaagaaggagatggtgctgcagagattccaccagcaggtgtgcagccacctgcacctgttcttcctgatcggcgacaagcaggcccacaagcagctgcccagcaccctgttcctgagactgctgcagctggccaccgccagcatcgacagatacgagccctgggaccaggccgccctggccaaggtggcccagcaccacctggagggcgcccagagcgtgcccctggacgacggcagctggaagtaccccgacctgcaggccagcatccccagcgtggccaaggccatggccctgatccacctgagcgccacccactaccacgagcacctgtgccccgccctgcccctggtgacccccaagaccttcctggacttcctggacaccttcctgatgctgcagcagcagaccatcctgaagatcaagaacaaggcccagagagtgcagaacgccctggagaacctgagaatgctgatcaaggagcacggcacccacgccaacctgatcttcgacctggagcagcagctgaaggacagcggcaagagcctgagcatgttccagcagcagctggagcagagcaagctgctgtacaagcagcagctggaggagtgcagacaccaggagaacctgatcgagaacctggccagacagagagacgccctgcaggcccagagagaggccttcctggagcagatgagcaaggccttcctggagcccctgagccagctgcaggtggccgacttcgaggagatcagaagctacagagccccccccgagagcgtggtgagagtgaccgacgccatgtgcgacctgttccaccacgagaccggctgggccagcgccaagcagctgctgtgcaccgaggacttctaccaggagctggtgttcttccccaaggagaagatcaccgacagcgagctgatcaagctgcacctgatcctgaaggcccccggcatggacgacgccgccctgagagccgtgagcagacccgccgccagcctggccgcctggctgtgggccgtgctgcactacggcctggcccactgcagaggcctgcccaccgacctgctgctgcagcaggtggaggccaccctgaccagagagcaggccagactgggctactaccagttccaggcccaggagaccctggagcacaacctggccctggccaagatggtggaggacgcccaggccagccacaactgcgtggccaagaccctgagccaggcccagtgcggccagtaccacaagtggcccatgaaggccgccctgctgacccccatgagagcctggaccacccagctgcagaagctgaagggcagatgcatgaccgtgttcggcgacaccctgctgtgcagcgccgccatcatctacctgggccccttcccccccctgagaagacaggagctgctggacgagtggctggccctgtgcagaggcttccaggaggccctgggccccgacgacgtggcccaggccctgaagagaaagcagaagagcgtgagcatcccccccaagaaccccctgctggccacccacagccccttcagcatcctgagcctgctgagcagcgagagcgagcagtaccagtgggacggcaacctgaagccccaggccaagagcgcccacctggccggcctgctgctgagaagccccacccactacagcagctgcagatggcccctgctgctggaccccagcaacgaggccctgatctggctggaccccctgcccctggaggagaacagaagcttcgcccccgccctgaccgagggcagaggcaagggcctgatgagaaaccagaagagagagagcaagaccgacatgaaggaggaggacgacgagagcgaggagagcaacgaggccgaggaccagaccaaggagcagaaggccgaggagagaaagaacgagcaggagaaggagcaggaggagaacgaggagaaggaggaggagaagaccgagagccagggcagcaagcccgcctacgagacccagctgcccagcctgccctacctgagcgtgctgagcggcgccgaccccgagctgggcagccagctgcaggaggccgccgcctgcggcctgcccgtgctgctgaccaacgtggagctgggcctgggctgcgaggagctgcagtggctgctgcagagagagcagctgagccccccccaggtgcagcccggcttctgcctgtacctgagcaccaccctgagcctgtgcgccatggagaaggtgctgggctgcgagctgctgaagggcctgaacgtgctggacctgggcctgaacatggagatcctggaggagcagatgctgcacgagatcctgtgcagagagtaccccgagctggagaccagatggcaggacctgaagatcagagccctggacacctgcaaggccgtggaggccgccgaggagagactgctgaccatgctgctgttccagaaccccaagagacagaagcccgccaagttcctgagaaacatcgtgagagcccagggcaagctgtgccagctgagagcccactgcgaggagctggagggccagaagctgcaggagatggtgctgtgggccccctacagacccgtggtgtggcacggcatggccatggtgaaggccctgagccagctgcagaacctgctgcccctgttctgcatgagccccgagaactggctggccgtgaccaagcaggccctggacagcatgaagcccagagagatcaaccacggcgaggacctggccagccacctgctgcagctgagagcccacctgaccagacagctgctgggcagcaccgtgaccgccctgggcctgacccaggtgcccctggtgggcgccctgggcgccctggccctgctgcaggccaccggcaaggccagcgagctggagagactggccctgtggcccggcctggccgccagccccagcaccgtgcacagcaagcccgtgagcgacgtggccagacccgcctggctgggccccaaggcctggcacgagtgcgagatgctggagctgctgccccccttcgtgggcctgtgcgccagcctggccggccacagcagcgcctggcaggcctacctgagcctgagcagcaccgtgctgggccccgcccccggccccggccccgagcccctgagcctgctgcagaagctgatcctgtggagagtgctgagacccgagtgcctggccggcgccctggccgacttcaccaccagcctgctgggcagacccctggacgagaacacctacgcccccaccatgcccttcaagcacagccaggccacccagcccatgctgatcctgctgcccccccccggccaccccagcgccaccctgcaccccctgaccgtgatccagaagctggccgccaagtaccagcagggccagaagcagctgcaggtgatcgccctgggcagcgaggcctgggaccccgtgagcgtggtggtgagcaccctgagccaggccatgtacgagggccactggctggtgctggacaactgccacctgatgccccactggcccaaggagctgctgcagctgctgctggagctgctgggcagagccaaggtggtggccgacctggagagcgagcagctgctggaccagcccgagagcagaaacgtgagcaccgtgcacagagacttcagactgtggctgatcgtgcccgccgagagcagcgccagcctgcccgccgtgctgacccagcacagcatgcccgtgttctggaaccagagcctggagctgggccacgtgctgatcgacagcgtggagctggcccagcaggtgctgtacatgcagccccccacccaggccctgcccctgctgctgctgcacggcctgctgctgcacagacagctgtacggcaccagactgcaggcccacagaggcagatggagccaggtgaccctgacccaggtgctgcagacccaggaccagctgtgggccagcctgagcaaccccagagccgccatgcaggagctggccgccagcgtgttctacggcggccccctgggcgacaccgaggacagagaggccctgatcagcctgacccaggcctgcctgagccccagcagcggcagctgggtgcagccccacaccccccagagcctgctggccaccctgatgcccctgcccgagctgagagagctggacgccatggccgagtgcaaggcccagatgcacctgctgcccagcccccccgagcccagactgtgcggcctgagcgagggcccccaggcctggctgctgagaagacagagcagagccctgctgagcgccctgcagagaagcagccccgtgtgggtgcccgagagcagaagaggcgcccagctggccgagagaagactgagacagagactggtgcaggtgaacagaagactggagagcctgcaggacctgctgacccacgtgatcagacaggacgagagcgacgccccctggagcgtgctgggccccaacgccagaagacccctggagggcgtgctggagaccgaggccctggagctgagccagctggtgggcaccctgcagagagacctggactgcctgctgcagcagctgaagggcgcccccccctgccccagcagaagatgcgccgccgtggcccacgccctgtggaccggcagactgcccctgccctggagaccccacgcccccgccggcccccagcccccctggcactggctgagacagctgagcagaagaggccagctgctggtgagatacctgggcgtgggcgccgacgccagcagcgacgtgcccgagagagtgttccacctgagcgccttcagacaccccagaagactgctgctggccctgagaggcgaggccgccctggaccagaacgtgcccagcagcaacttccccggcagcagaggcagcgtgagcagccagctgcagtacaagagactggagatgaacagcaaccccctgcacttcagagtggagaacggccccaaccccaccgtgcccgagagaggcctgctgctgatcggcctgcaggtgctgcacgccgagtgggaccccatcgccggcgccctgcaggacagccccagcagccagcccagccccctgccccccgtgagcatcagcacccaggcccccggcaccagcgacctgcccgcccccgccgacctgaccgtgtacagctgccccgtgtacatgggcggccccctgggcaccgccaagctgcagagcagaaacatcgtgatgcacctgcccctgcccaccaagctgacccccaacacctgcgtgcagagaagagtgcacgtgtgcagcccccccctgagctag

SEQ ID NO: 9352 - DNA, 1179 bp, Homo sapiens
  source 1..1179: mol_type = genomic DNA
atggacctgttcggcgacctgcccgagcccgagagaagccccagacccgccgccggcaaggaggcccagaagggccccctgctgttcgacgacctgccccccgccagcagcaccgacagcggcagcggcggccccctgctgttcgacgacctgccccccgccagcagcggcgacagcggcagcctggccaccagcatcagccagatggtgaagaccgagggcaagggcgccaagagaaagaccagcgaggaggagaagaacggcagcgaggagctggtggagaagaaggtgtgcaaggccagcagcgtgatcttcggcctgaagggctacgtggccgagagaaagggcgagagagaggagatgcaggacgcccacgtgatcctgaacgacatcaccgaggagtgcagaccccccagcagcctgatcaccagagtgagctacttcgccgtgttcgacggccacggcggcatcagagccagcaagttcgccgcccagaacctgcaccagaacctgatcagaaagttccccaagggcgacgtgatcagcgtggagaagaccgtgaagagatgcctgctggacaccttcaagcacaccgacgaggagttcctgaagcaggccagcagccagaagcccgcctggaaggacggcagcaccgccacctgcgtgctggccgtggacaacatcctgtacatcgccaacctgggcgacagcagagccatcctgtgcagatacaacgaggagagccagaagcacgccgccctgagcctgagcaaggagcacaaccccacccagtacgaggagagaatgagaatccagaaggccggcggcaacgtgagagacggcagagtgctgggcgtgctggaggtgagcagaagcatcggcgacggccagtacaagagatgcggcgtgaccagcgtgcccgacatcagaagatgccagctgacccccaacgacagattcatcctgctggcctgcgacggcctgttcaaggtgttcacccccgaggaggccgtgaacttcatcctgagctgcctggaggacgagaagatccagaccagagagggcaagagcgccgccgacgccagatacgaggccgcctgcaacagactggccaacaaggccgtgcagagaggcagcgccgacaacgtgaccgtgatggtggtgagaatcggccactag

SEQ ID NO: 9353 - DNA, 2193 bp, Homo sapiens
  source 1..2193: mol_type = genomic DNA
atgttcggcagaaagagaagcgtgagcttcggcggcttcggctggatcgacaagaccatgctggccagcctgaaggtgaagaagcaggagctggccaacagcagcgacgccaccctgcccgacagacccctgagcccccccctgaccgccccccccaccatgaagagcagcgagttcttcgagatgctggagaagatgcagggcatcaagctggaggagcagaagcccggcccccagaagaacaaggacgactacatcccctaccccagcatcgacgaggtggtggagaagggcggcccctacccccaggtgatcctgccccagttcggcggctactggatcgaggaccccgagaacgtgggcacccccaccagcctgggcagcagcatctgcgaggaggaggaggaggacaacctgagccccaacaccttcggctacaagctggagtgcaagggcgaggccagagcctacagaagacacttcctgggcaaggaccacctgaacttctactgcaccggcagcagcctgggcaacctgatcctgagcgtgaagtgcgaggaggccgagggcatcgagtacctgagagtgatcctgagaagcaagctgaagaccgtgcacgagagaatccccctggccggcctgagcaagctgcccagcgtgccccagatcgccaaggccttctgcgacgacgccgtgggcctgagattcaaccccgtgctgtaccccaaggccagccagatgatcgtgagctacgacgagcacgaggtgaacaacaccttcaagttcggcgtgatctaccagaaggccagacagaccctggaggaggagctgttcggcaacaacgaggagagccccgccttcaaggagttcctggacctgctgggcgacaccatcaccctgcaggacttcaagggcttcagaggcggcctggacgtgacccacggccagaccggcgtggagagcgtgtacaccaccttcagagacagagagatcatgttccacgtgagcaccaagctgcccttcaccgacggcgacgcccagcagctgcagagaaagagacacatcggcaacgacatcgtggccatcatcttccaggaggagaacacccccttcgtgcccgacatgatcgccagcaacttcctgcacgcctacatcgtggtgcaggtggagacccccggcaccgagacccccagctacaaggtgagcgtgaccgccagagaggacgtgcccaccttcggcccccccctgcccagcccccccgtgttccagaagggccccgagttcagagagttcctgctgaccaagctgaccaacgccgagaacgcctgctgcaagagcgacaagttcgccaagctggaggacagaaccagagccgccctgctggacaacctgcacgacgagctgcacgcccacacccaggccatgctgggcctgggccccgaggaggacaagttcgagaacggcggccacggcggcttcctggagagcttcaagagagccatcagagtgagaagccacagcatggagaccatggtgggcggccagaagaagagccacagcggcggcatccccggcagcctgagcggcggcatcagccacaacagcatggaggtgaccaagaccaccttcagcccccccgtggtggccgccaccgtgaagaaccagagcagaagccccatcaagagaagaagcggcctgttccccagactgcacaccggcagcgagggccagggcgacagcagagccagatgcgacagcaccagcagcacccccaagacccccgacggcggccacagcagccaggagatcaagagcgagaccagcagcaaccccagcagccccgagatctgccccaacaaggagaagcccttcatgaagctgaaggagaacggcagagccatcagcagaagcagcagcagcaccagcagcgtgagcagcaccgccggcgagggcgaggccatggaggagggcgacagcggcggcagccagcccagcaccaccagccccttcaagcaggaggtgttcgtgtacagccccagccccagcagcgagagccccagcctgggcgccgccgccacccccatcatcatgagcagaagccccaccgacgccaagagcagaaacagccccagaagcaacctgaagttcagattcgacaagctgagccacgccagcagcggcgccggccactag

SEQ ID NO: 9354 - DNA, 1110 bp, Homo sapiens
  source 1..1110: mol_type = genomic DNA
atgtggagcggcagaaagctgggcagcagcggcggctggttcctgagagtgctgggccccggcggctgcaacaccaaggccgccagacccctgatcagcagcgccgtgtacgtgaagaaccagctgagcggcaccctgcagatcaagcccggcgtgttcaacgagtacagaaccatctggttcaagagctacagaaccatcttcagctgcctgaacagaatcaagagcttcagatacccctgggccagactgtacagcaccagccagaccaccgtggacagcggcgaggtgaagaccttcctggccctggcccacaagtggtgggacgagcagggcgtgtacgcccccctgcacagcatgaacgacctgagagtgcccttcatcagagacaacctgctgaagaccatccccaaccaccagcccggcaagcccctgctgggcatgaagatcctggacgtgggctgcggcggcggcctgctgaccgagcccctgggcagactgggcgccagcgtgatcggcatcgaccccgtggacgagaacatcaagaccgcccagtgccacaagagcttcgaccccgtgctggacaagagaatcgagtacagagtgtgcagcctggaggagatcgtggaggagaccgccgagaccttcgacgccgtggtggccagcgaggtggtggagcacgtgatcgacctggagaccttcctgcagtgctgctgccaggtgctgaagcccggcggcagcctgttcatcaccaccatcaacaagacccagctgagctacgccctgggcatcgtgttcagcgagcagatcgccagcatcgtgcccaagggcacccacacctgggagaagttcgtgagccccgagaccctggagagcatcctggagagcaacggcctgagcgtgcagaccgtggtgggcatgctgtacaaccccttcagcggctactggcactggagcgagaacaccagcctgaactacgccgcctacgccgtgaagagcagagtgcaggagcaccccgccagcgccgagttcgtgctgaagggcgagaccgaggagctgcaggccaacgcctgcaccaaccccgccgtgcacgagaagctgaagaagtag

SEQ ID NO: 9355 - DNA, 1782 bp, Homo sapiens
  source 1..1782: mol_type = genomic DNA
atggagggctgcatgggcgaggagagcttccagatgtgggagctgaacagaagactggaggcctacctggccagagtgaaggccctggaggagcagaacgagctgctgagcgccgagctgggcggcctgagagcccagagcgccgacaccagctggagagcccacgccgacgacgagctggccgccctgagagccctggtggaccagagatggagagagaagcacgccgccgaggtggccagagacaacctggccgaggagctggagggcgtggccggcagatgccagcagctgagactggccagagagagaaccaccgaggaggtggccagaaacagaagagccgtggaggccgagaagtgcgccagagcctggctgagcagccaggtggccgagctggagagagagctggaggccctgagagtggcccacgaggaggagagagtgggcctgaacgcccaggccgcctgcgcccccagatgccccgccccccccagaggcccccccgcccccgcccccgaggtggaggagctggccagaagactgggcgaggcctggagaggcgccgtgagaggctaccaggagagagtggcccacatggagaccagcctgggccaggccagagagagactgggcagagccgtgcagggcgccagagagggcagactggagctgcagcagctgcaggccgagagaggcggcctgctggagagaagagccgccctggagcagagactggagggcagatggcaggagagactgagagccaccgagaagttccagctggccgtggaggccctggagcaggagaagcagggcctgcagagccagatcgcccaggtgctggagggcagacagcagctggcccacctgaagatgagcctgagcctggaggtggccacctacagaaccctgctggaggccgagaacagcagactgcagacccccggcggcggcagcaagaccagcctgagcttccaggaccccaagctggagctgcagttccccagaacccccgagggcagaagactgggcagcctgctgcccgtgctgagccccaccagcctgcccagccccctgcccgccaccctggagacccccgtgcccgccttcctgaagaaccaggagttcctgcaggccagaacccccaccctggccagcacccccatcccccccaccccccaggcccccagccccgccgtggacgccgagatcagagcccaggacgcccccctgagcctgctgcagacccagggcggcagaaagcaggcccccgagcccctgagagccgaggccagagtggccatccccgccagcgtgctgcccggccccgaggagcccggcggccagagacaggaggccagcaccggccagagccccgaggaccacgccagcctggccccccccctgagccccgaccacagcagcctggaggccaaggacggcgagagcggcggcagcagagtgttcagcatctgcagaggcgagggcgagggccagatctggggcctggtggagaaggagaccgccatcgagggcaaggtggtgagcagcctgcagcaggagatctgggaggaggaggacctgaacagaaaggagatccaggacagccaggtgcccctggagaaggagaccctgaagagcctgggcgaggagatccaggagagcctgaagaccctggagaaccagagccacgagaccctggagagagagaaccaggagtgccccagaagcctggaggaggacctggagaccctgaagagcctggagaagaagaagtag

SEQ ID NO: 9356 - DNA, 3456 bp, Homo sapiens
  source 1..3456: mol_type = genomic DNA
atgatggccgccgccctgggcccccccgaggtgatcgcccagctggagaacgccgccaaggtgctgatggccccccccagcatggtgaacaacgagcagagacagcacgccgagcacatcttcctgagcttcagaaagagcaagagccccttcgccgtgtgcaagcacatcctggagaccagcaaggtggactacgtgctgttccaggccgccaccgccatcatggaggccgtggtgagagagtggatcctgctggagaagggcagcatcgagagcctgagaaccttcctgctgacctacgtgctgcagagacccaacctgcagaagtacgtgagagagcagatcctgctggccgtggccgtgatcgtgaagagaggcagcctggacaagagcatcgactgcaagagcatcttccacgaggtgagccagctgatcagcagcggcaaccccaccgtgcagaccctggcctgcagcatcctgaccgccctgctgagcgagttcagcagcagcagcaagaccagcaacatcggcctgagcatggagttccacggcaactgcaagagagtgttccaggaggaggacctgagacagatcttcatgctgaccgtggaggtgctgcaggagttcagcagaagagagaacctgaacgcccagatgagcagcgtgttccagagatacctggccctggccaaccaggtgctgagctggaacttcctgccccccaacctgggcagacactacatcgccatgttcgagagcagccagaacgtgctgctgaagcccaccgagagctggagagagaccctgctggacagcagagtgatggagctgttcttcaccgtgcacagaaagatcagagaggacagcgacatggcccaggacagcctgcagtgcctggcccagctggccagcctgcacggccccatcttccccgacgagggcagccaggtggactacctggcccacttcatcgagggcctgctgaacaccatcaacggcatcgagatcgaggacagcgaggccgtgggcatcagcagcatcatcagcaacctgatcaccgtgttccccagaaacgtgctgaccgccatccccagcgagctgttcagcagcttcgtgaactgcctgacccacctgacctgcagcttcggcagaagcgccgccctggaggaggtgctggacaaggacgacatggtgtacatggaggcctacgacaagctgctggagagctggctgaccctggtgcaggacgacaagcacttccacaagggcttcttcacccagcacgccgtgcaggtgttcaacagctacatccagtgccacctggccgcccccgacggcaccagaaacctgaccgccaacggcgtggccagcagagaggaggaggagatcagcgagctgcaggaggacgacagagaccagttcagcgaccagctggccagcgtgggcatgctgggcagaatcgccgccgagcactgcatccccctgctgaccagcctgctggaggagagagtgaccagactgcacggccagctgcagagacaccagcagcagctgctggccagccccggcagcagcaccgtggacaacaagatgctggacgacctgtacgaggacatccactggctgatcctggtgaccggctacctgctggccgacgacacccagggcgagacccccctgatcccccccgagatcatggagtacagcatcaagcacagcagcgaggtggacatcaacaccaccctgcagatcctgggcagccccggcgagaaggccagcagcatccccggctacaacagaaccgacagcgtgatcagactgctgagcgccatcctgagagtgagcgaggtggagagcagagccatcagagccgacctgacccacctgctgagcccccagatgggcaaggacatcgtgtggttcctgaagagatgggccaagacctacctgctggtggacgagaagctgtacgaccagatcagcctgcccttcagcaccgccttcggcgccgacaccgagggcagccagtggatcatcggctacctgctgcagaaggtgatcagcaacctgagcgtgtggagcagcgagcaggacctggccaacgacaccgtgcagctgctggtgaccctggtggagagaagagagagagccaacctggtgatccagtgcgagaactggtggaacctggccaagcagttcgccagcagaagcccccccctgaacttcctgagcagccccgtgcagagaaccctgatgaaggccctggtgctgggcggcttcgcccacatggacaccgagaccaagcagcagtactggaccgaggtgctgcagcccctgcagcagagattcctgagagtgatcaaccaggagaacttccagcagatgtgccagcaggaggaggtgaagcaggagatcaccgccaccctggaggccctgtgcggcatcgccgaggccacccagatcgacaacgtggccatcctgttcaacttcctgatggacttcctgaccaactgcatcggcctgatggaggtgtacaagaacacccccgagaccgtgaacctgatcatcgaggtgttcgtggaggtggcccacaagcagatctgctacctgggcgagagcaaggccatgaacctgtacgaggcctgcctgaccctgctgcaggtgtacagcaagaacaacctgggcagacagagaatcgacgtgaccgccgaggaggagcagtaccaggacctgctgctgatcatggagctgctgaccaacctgctgagcaaggagttcatcgacttcagcgacaccgacgaggtgttcagaggccacgagcccggccaggccgccaacagaagcgtgagcgccgccgacgtggtgctgtacggcgtgaacctgatcctgcccctgatgagccaggacctgctgaagttccccaccctgtgcaaccagtactacaagctgatcaccttcatctgcgagatcttccccgagaagatcccccagctgcccgaggacctgttcaagagcctgatgtacagcctggagctgggcatgaccagcatgagcagcgaggtgtgccagctgtgcctggaggccctgacccccctggccgagcagtgcgccaaggcccaggagaccgacagccccctgttcctggccaccagacacttcctgaagctggtgttcgacatgctggtgctgcagaagcacaacaccgagatgaccaccgccgccggcgaggccttctacaccctggtgtgcctgcaccaggccgagtacagcgagctggtggagaccctgctgagcagccagcaggaccccgtgatctaccagagactggccgacgccttcaacaagctgaccgccagcagcaccccccccaccctggacagaaagcagaagatggccttcctgaagagcctggaggagttcatggccaacgtgggcggcctgctgtgcgtgaagtag

SEQ ID NO: 9357 - DNA, 1578 bp, Homo sapiens
  source 1..1578: mol_type = genomic DNA
atggccgccggcggcagcggcggcagagccagctgcccccccggcgtgggcgtgggccccggcaccggcggcagccccggccccagcgccaacgccgccgccacccccgcccccggcaacgccgccgccgccgccgccgccgccgccgccgccgccgccgcccccggccccaccccccccgccccccccggccccggcaccgacgcccaggccgccggcgccgagagagccgaggaggccgccggccccggcgccgccgccctgcagagagaggccgcctacaactggcaggccagcaagcccaccgtgcaggagagattcgccttcctgttcaacaacgaggtgctgtgcgacgtgcacttcctggtgggcaagggcctgagcagccagagaatccccgcccacagattcgtgctggccgtgggcagcgccgtgttcgacgccatgttcaacggcggcatggccaccaccagcaccgagatcgagctgcccgacgtggagcccgccgccttcctggccctgctgaagttcctgtacagcgacgaggtgcagatcggccccgagaccgtgatgaccaccctgtacaccgccaagaagtacgccgtgcccgccctggaggcccactgcgtggagttcctgaagaagaacctgagagccgacaacgccttcatgctgctgacccaggccagactgttcgacgagccccagctggccagcctgtgcctggagaacatcgacaagaacaccgccgacgccatcaccgccgagggcttcaccgacatcgacctggacaccctggtggccgtgctggagagagacaccctgggcatcagagaggtgagactgttcaacgccgtggtgagatggagcgaggccgagtgccagagacagcagctgcaggtgacccccgagaacagaagaaaggtgctgggcaaggccctgggcctgatcagattccccctgatgaccatcgaggagttcgccgccggccccgcccagagcggcatcctggtggacagagaggtggtgagcctgttcctgcacttcaccgtgaaccccaagcccagagtggagttcatcgacagacccagatgctgcctgagaggcaaggagtgcagcatcaacagattccagcaggtggagagcagatggggctacagcggcaccagcgacagaatcagattcagcgtgaacaagagaatcttcgtggtgggcttcggcctgtacggcagcatccacggccccaccgactaccaggtgaacatccagatcatccacaccgacagcaacaccgtgctgggccagaacgacaccggcttcagctgcgacggcagcgccagcaccttcagagtgatgttcaaggagcccgtggaggtgctgcccaacgtgaactacaccgcctgcgccaccctgaagggccccgacagccactacggcaccaagggcctgagaaaggtgacccacgagagccccaccaccggcgccaagacctgcttcaccttctgctacgccgccggcaacaacaacggcaccagcgtggaggacggccagatccccgaggtgatcttctacacctag

SEQ ID NO: 9358 - DNA, 525 bp, Homo sapiens
  source 1..525: mol_type = genomic DNA
atggccaccgtggccgagctgaaggccgtgctgaaggacaccctggagaagaagggcgtgctgggccacctgaaggccagaatcagagccgaggtgttcaacgccctggacgacgacagagagcccagacccagcctgagccacgagaacctgctgatcaacgagctgatcagagagtacctggagttcaacaagtacaagtacaccgccagcgtgctgatcgccgagagcggccagcccgtggtgcccctggacagacagttcctgatccacgagctgaacgccttcgaggagagcaaggacaacaccatccccctgctgtacggcatcctggcccacttcctgagaggcaccaaggacggcatccagaacgccttcctgaagggccccagcctgcagcccagcgaccccagcctgggcagacagcccagcagaagaaagcccatggacgaccacctgagaaaggaggagcagaagagcaccaacatcgaggacctgcacgtgagccaggccgtgaacagatag

SEQ ID NO: 9359 - DNA, 1257 bp, Homo sapiens
  source 1..1257: mol_type = genomic DNA
atggccggcagcctgcccccctgcgtggtggactgcggcaccggctacaccaagctgggctacgccggcaacaccgagccccagttcatcatccccagctgcatcgccatcagagagagcgccaaggtggtggaccaggcccagagaagagtgctgagaggcgtggacgacctggacttcttcatcggcgacgaggccatcgacaagcccacctacgccaccaagtggcccatcagacacggcatcatcgaggactgggacctgatggagagattcatggagcaggtggtgttcaagtacctgagagccgagcccgaggaccactacttcctgatgaccgagccccccctgaacacccccgagaacagagagtacctggccgagatcatgttcgagagcttcaacgtgcccggcctgtacatcgccgtgcaggccgtgctggccctggccgccagctggaccagcagacaggtgggcgagagaaccctgaccggcatcgtgatcgacagcggcgacggcgtgacccacgtgatccccgtggccgagggctacgtgatcggcagctgcatcaagcacatccccatcgccggcagagacatcacctacttcatccagcagctgctgagagagagagaggtgggcatcccccccgagcagagcctggagaccgccaaggccatcaaggagaagtactgctacatctgccccgacatcgtgaaggagttcgccaagtacgacgtggaccccagaaagtggatcaagcagtacaccggcatcaacgccatcaaccagaagaagttcgtgatcgacgtgggctacgagagattcctgggccccgagatcttcttccaccccgagttcgccaaccccgacttcatggagagcatcagcgacgtggtggacgaggtgatccagaactgccccatcgacgtgagaagacccctgtacaagaacgtggtgctgagcggcggcagcaccatgttcagagacttcggcagaagactgcagagagacctgaagagagtggtggacgccagactgagactgagcgaggagctgagcggcggcagaatcaagcccaagcccgtggaggtgcaggtggtgacccaccacatgcagagatacgccgtgtggttcggcggcagcatgctggccagcacccccgagttcttccaggtgtgccacaccaagaaggactacgaggagtacggccccagcatctgcagacacaaccccgtgttcggcgtgatgagctag

SEQ ID NO: 9360 - DNA, 1044 bp, Homo sapiens
  source 1..1044: mol_type = genomic DNA
atggccgccgccgagcccgccagcagcggccagcaggcccccgccggccagggccagggccagagaccccccccccagcccccccaggcccaggccccccagccccccccccccccccagctgggcggcgccggcggcggcagcagcagacacgagaagagcctgggcctgctgaccaccaagttcgtgagcctgctgcaggaggccaaggacggcgtgctggacctgaaggccgccgccgacaccctggccgtgagacagaagagaagaatctacgacatcaccaacgtgctggagggcatcgacctgatcgagaagaagagcaagaacagcatccagtggaagggcgtgggcgccggctgcaacaccaaggaggtgatcgacagactgagatacctgaaggccgagatcgaggacctggagctgaaggagagagagctggaccagcagaagctgtggctgcagcagagcatcaagaacgtgatggacgacagcatcaacaacagaaccttcagctacgtgacccacgaggacatctgcaactgcttcaacggcgacaccctgctggccatccaggcccccagcggcacccagctggaggtgcccatccccgagatgggccagaacggccagaagaagtaccagatcaacctgaagagccacagcggccccatccacgtgctgctgatcaacaaggagagcagcagcagcaagcccgtggtgttccccgtgcccccccccgacgacctgacccagcccagcagccagagcctgacccccgtgaccccccagaagagcagcatggccacccagaacctgcccgagcagcacgtgagcgagagaagccaggccctgcagcagaccagcgccaccgacatcagcagcgccggcagcatcagcggcgacatcatcgacgagctgatgagcagcgacgtgttccccctgctgagactgagccccacccccgccgacgactacaacttcaacctggacgacaacgagggcgtgtgcgacctgttcgacgtgcagatcctgaactactag

SEQ ID NO: 9361 - DNA, 636 bp, Homo sapiens
  source 1..636: mol_type = genomic DNA
atgtgccccggcaactggctgtgggccagcatgaccttcatggccagattcagcagaagcagcagcagaagccccgtgagaaccagaggcaccctggaggagatgcccaccgtgcagcaccccttcctgaacgtgttcgagctggagagactgctgtacaccggcaagaccgcctgcaaccacgccgacgaggtgtggcccggcctgtacctgggcgaccaggacatggccaacaacagaagagagctgagaagactgggcatcacccacgtgctgaacgccagccacagcagatggagaggcacccccgaggcctacgagggcctgggcatcagatacctgggcgtggaggcccacgacagccccgccttcgacatgagcatccacttccagaccgccgccgacttcatccacagagccctgagccagcccggcggcaagatcctggtgcactgcgccgtgggcgtgagcagaagcgccaccctggtgctggcctacctgatgctgtaccaccacctgaccctggtggaggccatcaagaaggtgaaggaccacagaggcatcatccccaacagaggcttcctgagacagctgctggccctggacagaagactgagacagggcctggaggcctag

SEQ ID NO: 9362 - DNA, 948 bp, Homo sapiens
  source 1..948: mol_type = genomic DNA
atgcccggcctgagctgcagattctaccagcacaagttccccgaggtggaggacgtggtgatggtgaacgtgagaagcatcgccgagatgggcgcctacgtgagcctgctggagtacaacaacatcgagggcatgatcctgctgagcgagctgagcagaagaagaatcagaagcatcaacaagctgatcagaatcggcagaaacgagtgcgtggtggtgatcagagtggacaaggagaagggctacatcgacctgagcaagagaagagtgagccccgaggaggccatcaagtgcgaggacaagttcaccaagagcaagaccgtgtacagcatcctgagacacgtggccgaggtgctggagtacaccaaggacgagcagctggagagcctgttccagagaaccgcctgggtgttcgacgacaagtacaagagacccggctacggcgcctacgacgccttcaagcacgccgtgagcgaccccagcatcctggacagcctggacctgaacgaggacgagagagaggtgctgatcaacaacatcaacagaagactgaccccccaggccgtgaagatcagagccgacatcgaggtggcctgctacggctacgagggcatcgacgccgtgaaggaggccctgagagccggcctgaactgcagcaccgagaacatgcccatcaagatcaacctgatcgccccccccagatacgtgatgaccaccaccaccctggagagaaccgagggcctgagcgtgctgagccaggccatggccgtgatcaaggagaagatcgaggagaagagaggcgtgttcaacgtgcagatggagcccaaggtggtgaccgacaccgacgagaccgagctggccagacagatggagagactggagagagagaacgccgaggtggacggcgacgacgacgccgaggagatggaggccaaggccgaggactag

SEQ ID NO: 9363 - DNA, 318 bp, Homo sapiens
  source 1..318: mol_type = genomic DNA
atggccggccaggaggaccccgtgcagagagagatccaccaggactgggccaacagagagtacatcgagatcatcaccagcagcatcaagaagatcgccgacttcctgaacagcttcgacatgagctgcagaagcagactggccaccctgaacgagaagctgaccgccctggagagaagaatcgagtacatcgaggccagagtgaccaagggcgagaccctgagaaccgtgccctgctgctgctgggaggtggccctgcacaacaccggccacatgggcaaggcccccgccgccttcagcagcttcctgagcccctag

SEQ ID NO: 9364 - DNA, 1902 bp, Homo sapiens
  source 1..1902: mol_type = genomic DNA
atggccgccgccgccgccgccgccaccaccgccgcctgcagcagcggcagcgccggcaccgacgccgccggcgccagcggcctgcagcagccccccccccagccccagccccagcccgccgccgccgcccccgcccagcccccccccgagccccccagaaagcccagaatggaccccagaagaagacaggccgccctgagcttcctgaccaacatcagcctggacggcagactgcccccccaggacgccgagtggggcggcggcgaggagggcggcgccgccaagcccggcgccggcggcgcctgcggcgccagaaccagattcagcctgctggccgccgccgagagaggcggctgcatcgccctggccgcccccggcacccccgccgccggcctggccgccggcagcggcccctgcctgccccagcccagcagcctgccccccctgatccccggcggccacgccaccgtgagcggccccggcgtggccagaggcttcgccagccccctgggcgccggcagagccagcggcgagcagtggcagccccccagacccgcccccctggccgcctgcgcccagctgcagctgctggacggcagcggcgccgccggccaggaggagctggaggaggacgacgccttcatcagcgtgcaggtgcccgccgccgccttcctgggcagcggcacccccggcagcggcagcggcagcagaggcagactgaacagcttcacccagggcatcctgcccatcgccttcagcagacccaccagccagaactactgcagcctggagcagcccggccagggcggcagcaccagcgccttcgagcagctgcagagaagcagaagaagactgatcagccagagaagcagcctggagaccctggaggacatcgaggagaacgcccccctgagaagatgcagaaccctgagcggcagccccagacccaagaacttcaagaagatccacttcatcaagaacatgagacagcacgacaccagaaacggcagaatcgtgctgatcagcggcagaagaagcttctgcagcatcttcagcgtgctgccctacagagacagcacccaggtgggcgacctgaagctggacggcggcagacagagcaccggcgccgtgagcctgaaggagatcatcggcctggagggcgtggagctgggcgccgacggcaagaccgtgagctacacccagttcctgctgcccaccaacgccttcggcgccagaagaaacaccatcgacagcaccagcagcttcagccagttcagaaacctgagccacagaagcctgagcatcggcagagccagcggcacccagggcagcctggacaccggcagcgacctgggcgacttcatggactacgaccccaacctgctggacgacccccagtggccctgcggcaagcacaagagagtgctgatcttccccagctacatgaccaccgtgatcgactacgtgaagcccagcgacctgaagaaggacatgaacgagaccttcaaggagaagttcccccacatcaagctgaccctgagcaagatcagaagcctgaagagagagatgagaaagctggcccaggaggactgcggcctggaggagcccaccgtggccatggccttcgtgtacttcgagaagctggccctgaagggcaagctgaacaagcagaacagaaagctgtgcgccggcgcctgcgtgctgctggccgccaagatcggcagcgacctgaagaagcacgaggtgaagcacctgatcgacaagctggaggagaagttcagactgaacagaagagagctgatcgccttcgagttccccgtgctggtggccctggagttcgccctgcacctgcccgagcacgaggtgatgccccactacagaagactggtgcagagcagctag

SEQ ID NO: 9365 - DNA, 3423 bp, Homo sapiens
  source 1..3423: mol_type = genomic DNA
atgaccaccgccgtggagagaaagtacatcaacatcagaaagagactggaccagctgggctacagacagaccctgaccgtggagtgcctgcccctggtggagaagctgttcagcgacctggtgcacaccaccgagagcctgagacagagcaagctgagcgccgtgaaggccgagaaggagagcgccaacttcgacttcgtgctggagccctacaagctggagaacgccagactgagcagagagaacaacgagctgtacctggagctgatgaagctgagagagcacagcgaccagcacgtgaaggagctgaagaccagcctgaagaagtgcgccagagagaccgccgacctgaagttcctgaacaaccagtacgcccacaagctgaagctgctggagaaggagagcaaggccaagaacgagagaatccagcagctgcaggagaagaacctgcacgccgtggtgcagacccccggcggcaagaagagaagcatcgccttcagaagacagagaatgcagatcgacgagcccgtgccccccagcgaggtgagcagctaccccgtgccccagcccgacgacccctacatcgccgacctgctgcaggtggccgacaacagaatccaggagctgcagcaggaggtgcaccagctgcaggagaagctggccatgatggagagcggcgtgagagactacagcaagcagatcgagctgagagagagagagatcgagagactgagcgtggccctggacggcggcagaagccccgacgtgctgagcctggagagcagaaacaagaccaacgagaagctgatcgcccacctgaacatccaggtggacttcctgcagcaggccaacaaggacctggagaagagaatcagagagctgatggagaccaaggagaccgtgaccagcgaggtggtgaacctgagcaacaagaacgagaagctgtgccaggagctgaccgagatcgaccagctggcccagcagctggagagacacaaggaggaggtgctggagaccgccgacaaggagctgggcgaggccaagaaggagatcaagagaaagctgagcgagatgcaggacctggaggagaccatggccaagctgcagctggagctgaacctgtgccagaaggagaaggagagactgagcgacgagctgctggtgaagagcgacctggagaccgtggtgcaccagctggagcaggagaagcagagactgagcaagaaggtggagagcttcgccgtgaccgagagacagctgaccctggaggtggagagaatgagactggagcacggcatcaagagaagagacagaagccccagcagactggacaccttcctgaagggcatcgaggaggagagagactactacaagaaggagctggagagactgcagcacatcatccagagaagaagctgcagcaccagctacagcgccagagagaagagcagcatcttcagaacccccgagaagggcgactacaacagcgagatccaccagatcaccagagagagagacgagctgcagagaatgctggagagattcgagaagtacatggaggacatccagagcaacgtgaagctgctgaccgccgagagagacaagctgagcgtgctgtacaacgaggcccaggaggagctgagcgccctgagaaaggagagcacccagaccaccgccccccacaacatcgtgagcctgatggagaaggagaaggagctggccctgagcgacctgagaagaatcatggccgagaaggaggccctgagagagaagctggagcacatcgaggaggtgagcctgttcggcaagagcgagctggagaagaccatcgagcacctgacctgcgtgaaccaccagctggagagcgagaagtacgagctgaagagcaaggtgctgatcatgaaggagaccatcgagagcctggagaacaagctgaaggtgcaggcccagaagttcagccacgtggccggcgacagcagccaccagaagaccgaggtgaacagcctgagaatcgtgaacgagcagctgcagagaagcgtggacgactaccagcacagactgagcatcaagagaggcgagctggagagcgcccaggcccagatcaagatcctggaggagaagatcgacgagctgaacctgaagatgaccagccaggacgaggaggcccacgtgatgaagaagaccatcggcgtgatcgacaaggagaaggacttcctgcaggagaccgtggacgagaagaccgagaagatcgccaacctgcaggagaacctggccaacaaggagaaggccgtggcccagatgaagatcatgatcagcgagtgcgagagcagcgtgaaccagctgaaggagaccctggtgaacagagacagagagatcaacagcctgagaagacagctggacgccgcccacaaggagctggacgaggtgggcagaagcagagagatcgccttcaaggagaacagaagactgcaggacgacctggccaccatggccagagagaaccaggagatcagcctggagctggaggccgccgtgcaggagaaggaggagatgaagagcagagtgcacaagtacatcaccgaggtgagcagatgggagagcctgatggccgccaaggagaaggagaaccaggacctgctggacagattccagatgctgcacaacagagccgaggactgggaggtgaaggcccaccaggccgagggcgagagcagcagcgtgagactggagctgctgagcatcgacaccgagagaagacacctgagagagagagtggagctgctggagaaggagatccaggagcacatcaacgcccaccacgcctacgagagccagatcagcagcatggccaaggccatgagcagactggaggaggagctgagacaccaggaggacgagaaggccaccgtgctgaacgacctgagcagcctgagagagctgtgcatcaagctggacagcggcaaggacatcatgacccagcagctgaacagcaagaacctggagttcgagagagtggtggtggagctggagaacgtgaagagcgagagcgacctgctgaagaagcagctgagcaacgagagacacaccgtgaagaacctggagagcctgctggccaccaacagagacaaggagttccacagccacctgaccagccacgagaaggacaccgagatccagctgctgaaggagaagctgaccctgagcgagagcaagctgaccagccagagcagagagaacaccatgctgagagccaaggtggcccagctgcagaccgactacgacgccctgaagagacagatcagcaccgagagatacgagagagagagagccatccaggagatgagaagacacggcctggccaccccccccctgagcagcaccctgagaagccccagccacagccccgagcacagaaacgtgtag

SEQ ID NO: 9366 - DNA, 1512 bp, Homo sapiens
  source 1..1512: mol_type = genomic DNA
atgcccaacgtggccgagaccgagagaagcaacgacagcggcaacggcgagcacaagagcgagagaaagagccccgaggagaacctgcagggcgccgtgaagagcttctgcaccagcgccagcggcgcccccctgggccccaagggcgacggccactacccctggagctgccccgtgacccacaccagagagaagatctacgccatctgcagcgactacgccttcctgaaccaggccaccagcatctacaagacccccaaccccagcagaagcccctgcctgcccgacagcaccagcctgagcgccggcaacaacagcagcagatacatcggcatccccaccagcaccagcgagatcatctacaacgaggagaacagcctggagaacctgagcaacagcctgggcaagctgcccctggcctgggagatcgacaagagcgagttcgacggcgtgaccaccaacagcaagcacaagagcggcaacgccaagaagcaggtgagcaagagaaagaccagcgacaagaagggcagataccagaaggagtgcccccagcacagccccctggaggacatcaagcagagaaaggtgctggacctgagaagatggtactgcatcagcagaccccagtacaagaccagctgcggcatcagcagcctgatcagctgctggaacttcctgtacagcaccatgggcgccggcaacctgccccccatcacccaggaggaggccctgcacatcctgggcttccagccccccttcgaggacatcagattcggccccttcaccggcaacaccaccctgatgagatggttcagacagatcaacgaccacttccacgtgaagggctgcagctacgtgctgtacaagccccacggcaagaacaagaccgccggcgagaccgccagcggcgccctgagcaagctgaccagaggcctgaaggacgagagcctggcctacatctaccactgccagaaccactacttctgccccatcggcttcgaggccacccccgtgaaggccaacaaggccttcagcagaggccccctgagcccccaggaggtggagtactggatcctgatcggcgagagcagcagaaagcaccccgccatccactgcaagaagtgggccgacatcgtgaccgacctgaacacccagaaccccgagtacctggacatcagacacctggagagaggcctgcagtacagaaagaccaagaaggtgggcggcaacctgcactgcatcatcgccttccagagactgaactggcagagattcggcctgtggaacttccccttcggcaccatcagacaggagagccagccccccacccacgcccagggcatcgccaagagcgagagcgaggacaacatcagcaagaagcagcacggcagactgggcagaagcttcagcgccagcttccaccaggacagcgcctggaagaagatgagcagcatccacgagagaagaaacagcggctaccagggctacagcgactacgacggcaacgactag

SEQ ID NO: 9367 - DNA, 813 bp, Homo sapiens
  source 1..813: mol_type = genomic DNA
atggaggccgaggagctggagcaggagagagagcagctgagactgcagctgtgggaggcctactgccaggtgagatacctgtgcagccacctgagaggcaacgacagcgccgacagcgccgtgagcaccgacagcagcatggacgagagcagcgagaccagcagcgccaaggacgtgcccgccggcagcctgagaaccgccctgaacgagctgaagagactgatccagagcatcgtggacggcatggagcccaccggcagcagaagactggacgacgacagcctggaggagcagatcagacagaccagcgaggacagcagagccctgagagagctgatggagggcgagagaggcaagctgagacagagcctggaggagctgcagagactgcacagccaggtgaccctgctgagcgtggagatgaccgccctgaaggaggagagagacagactgagagtgaccagcgaggacaaggagcccaaggagcagctgcagaaggccatcagagacagagacgaggccatcgccaagaagaacgccgtggagctggagctggccaagtgcagaatggacatgatgagcctgaacagccagctgctggacgccatccagcagaagctgaacctgagccagcagctggaggcctggcaggacgacatgcacagagtgatcgacagacagctgatggacacccacctgaaggagagaagccagcccgccgccgccctgtgcagaggccacagcgccggcagaggcgacgagcccagcatcgccgagggcaagagactgttcagcttcttcagaaagatctag

SEQ ID NO: 9368 - DNA, 2379 bp, Homo sapiens
  source 1..2379: mol_type = genomic DNA
atgctgcccgccggcgagatcggcgccagccccgccgccccctgctgcagcgagagcggcgacgagagaaagaacctggaggagaagagcgacatcaacgtgaccgtgctgatcggcagcaagcaggtgagcgagggcaccgacaacggcgacctgcccagctacgtgagcgccttcatcgagaaggaggtgggcaacgacctgaagagcctgaagaagctggacaagctgatcgagcagagaaccgtgagcaagatgcagctggaggagcaggtgctgaccatcagcagcgagatccccaagagaatcagaagcgccctgaagaacgccgaggagagcaagcagttcctgaaccagttcctggagcaggagacccacctgttcagcgccatcaacagccacctgctgaccgcccagccctggatggacgacctgggcaccatgatcagccagatcgaggagatcgagagacacctggcctacctgaagtggatcagccagatcgaggagctgagcgacaacatccagcagtacctgatgaccaacaacgtgcccgaggccgccagcaccctggtgagcatggccgagctggacatcaagctgcaggagagcagctgcacccacctgctgggcttcatgagagccaccgtgaagttctggcacaagatcctgaaggacaagctgaccagcgacttcgaggagatcctggcccagctgcactggcccttcatcgcccccccccagagccagaccgtgggcctgagcagacccgccagcgcccccgagatctacagctacctggagaccctgttctgccagctgctgaagctgcagaccagcgacgagctgctgaccgagcccaagcagctgcccgagaagtacagcctgcccgccagccccagcgtgatcctgcccatccaggtgatgctgacccccctgcagaagagattcagataccacttcagaggcaacagacagaccaacgtgctgagcaagcccgagtggtacctggcccaggtgctgatgtggatcggcaaccacaccgagttcctggacgagaagatccagcccatcctggacaaggtgggcagcctggtgaacgccagactggagttcagcagaggcctgatgatgctggtgctggagaagctggccaccgacatcccctgcctgctgtacgacgacaacctgttctgccacctggtggacgaggtgctgctgttcgagagagagctgcacagcgtgcacggctaccccggcaccttcgccagctgcatgcacatcctgagcgaggagacctgcttccagagatggctgaccgtggagagaaagttcgccctgcagaagatggacagcatgctgagcagcgaggccgcctgggtgagccagtacaaggacatcaccgacgtggacgagatgaaggtgcccgactgcgccgagaccttcatgaccctgctgctggtgatcaccgacagatacaagaacctgcccaccgccagcagaaagctgcagttcctggagctgcagaaggacctggtggacgacttcagaatcagactgacccaggtgatgaaggaggagaccagagccagcctgggcttcagatactgcgccatcctgaacgccgtgaactacatcagcaccgtgctggccgactgggccgacaacgtgttcttcctgcagctgcagcaggccgccctggaggtgttcgccgagaacaacaccctgagcaagctgcagctgggccagctggccagcatggagagcagcgtgttcgacgacatgatcaacctgctggagagactgaagcacgacatgctgaccagacaggtggaccacgtgttcagagaggtgaaggacgccgccaagctgtacaagaaggagagatggctgagcctgcccagccagagcgagcaggccgtgatgagcctgagcagcagcgcctgccccctgctgctgaccctgagagaccacctgctgcagctggagcagcagctgtgcttcagcctgttcaagatcttctggcagatgctggtggagaagctggacgtgtacatctaccaggagatcatcctggccaaccacttcaacgagggcggcgccgcccagctgcagttcgacatgaccagaaacctgttccccctgttcagccactactgcaagagacccgagaactacttcaagcacatcaaggaggcctgcatcgtgctgaacctgaacgtgggcagcgccctgctgctgaaggacgtgctgcagagcgccagcggccagctgcccgccaccgccgccctgaacgaggtgggcatctacaagctggcccagcaggacgtggagatcctgctgaacctgagaaccaactggcccaacaccggcaagtag

SEQ ID NO: 9369 - DNA, 1068 bp, Homo sapiens
  source 1..1068: mol_type = genomic DNA
gtgagaggcgtgagagccgccaccgccgccgccgtggccgccaccgccgccagcggcctgagcagaagagaggccggcggcagagccggcgccgccgccgccgtggtgagaccccccggcagaaagtgcggcagatgcagaagactggccaacttccccggcagaaagagaagaagaagaagaagaaagggcctgggcgccaccaccggcggctgcggcgaggccgtgagcagcctgcaccccgccccccacagccccagcagcgtgagacccgccggcagaagagccagaagacagagaagaggcgccggcagcgccgagagacccatgagcggcgccggcgaggccctggcccccggccccgtgggcccccagagagtggccgaggccggcggcggccagctgggcagcaccgcccagggcaagtgcgacaaggacaacaccgagaaggacatcacccaggccaccaacagccacttcacccacggcgagatgcaggaccagagcatctggggcaaccccagcgacggcgagctgatcagaacccagccccagagactgccccagctgcagaccagcgcccaggtgcccagcggcgaggagatcggcaagatcaagaacggccacaccggcctgagcaacggcaacggcatccaccacggcgccaagcacggcagcgccgacaacagaaagctgagcgcccccgtgagccagaagatgcacagaaagatccagagcagcctgagcgtgaacagcgacatcagcaagaagagcaaggtgaacgccgtgttcagccagaagaccggcagcagccccgaggactgctgcgtgcactgcatcctggcctgcctgttctgcgagttcctgaccctgtgcaacatcgtgctgggccaggccagctgcggcatctgcaccagcgaggcctgctgctgctgctgcggcgacgagatgggcgacgactgcaactgcccctgcgacatggactgcggcatcatggacgcctgctgcgagagcagcgactgcctggagatctgcatggagtgctgcggcatctgcttccccagctag

SEQ ID NO: 9370 - DNA, 378 bp, Homo sapiens
  source 1..378: mol_type = genomic DNA
atgctgagcagactgctgaaggagcaccaggccaagcagaacgagagaaaggagctgcaggagaagagaagaagagaggccatcaccgccgccacctgcctgaccgaggccctggtggaccacctgaacgtgggcgtggcccaggcctacatgaaccagagaaagctggaccacgaggtgaagaccctgcaggtgcaggccgcccagttcgccaagcagaccggccagtggatcggcatggtggagaacttcaaccaggccctgaaggagatcggcgacgtggagaactgggccagaagcatcgagctggacatgagaaccatcgccaccgccctggagtacgtgtacaagggccagctgcagagcgcccccagctag

SEQ ID NO: 9371 - DNA, 2337 bp, Homo sapiens
  source 1..2337: mol_type = genomic DNA
atgaccaccagacaggccaccaaggaccccctgctgagaggcgtgagccccacccccagcaagatccccgtgagaagccagaagagaacccccttccccaccgtgaccagctgcgccgtggaccaggagaaccaggaccccagaagatgggtgcagaagccccccctgaacatccagagacccctggtggacagcgccggccccagacccaaggccagacaccaggccgagaccagccagagactggtgggcatcagccagcccagaaaccccctggaggagctgagacccagccccagaggccagaacgtgggccccggcccccccgcccagaccgaggcccccggcaccatcgagttcgtggccgaccccgccgccctggccaccatcctgagcggcgagggcgtgaagagctgccacctgggcagacagcccagcctggccaagagagtgctggtgagaggcagccagggcggcaccacccagagagtgcagggcgtgagagccagcgcctacctggcccccagaacccccacccacagactggaccccgccagagccagctgcttcagcagactggagggccccggccccagaggcagaaccctgtgcccccagagactgcaggccctgatcagccccagcggccccagcttccaccccagcaccagacccagcttccaggagctgagaagagagaccgccggcagcagcagaaccagcgtgagccaggccagcggcctgctgctggagacccccgtgcagcccgccttcagcctgcccaagggcgagagagaggtggtgacccacagcgacgagggcggcgtggccagcctgggcctggcccagagagtgcccctgagagagaacagagagatgagccacaccagagacagccacgacagccacctgatgcccagccccgcccccgtggcccagcccctgcccggccacgtggtgccctgccccagccccttcggcagagcccagagagtgcccagccccggcccccccaccctgaccagctacagcgtgctgagaagactgaccgtgcagcccaagaccagattcacccccatgcccagcacccccagagtgcagcaggcccagtggctgagaggcgtgagcccccagagctgcagcgaggaccccgccctgccctgggagcaggtggccgtgagactgttcgaccaggagagctgcatcagaagcctggagggcagcggcaagccccccgtggccacccccagcggcccccacagcaacagaacccccagcctgcaggaggtgaagatccagagaatcggcatcctgcagcagctgctgagacaggaggtggagggcctggtgggcggccagtgcgtgcccctgaacggcggcagcagcctggacatggtggagctgcagcccctgctgaccgagatcagcagaaccctgaacgccaccgagcacaacagcggcaccagccacctgcccggcctgctgaagcacagcggcctgcccaagccctgcctgcccgaggagtgcggcgagccccagccctgcccccccgccgagcccggcccccccgaggccttctgcagaagcgagcccgagatccccgagcccagcctgcaggagcagctggaggtgcccgagccctacccccccgccgagcccagacccctggagagctgctgcagaagcgagcccgagatccccgagagcagcagacaggagcagctggaggtgcccgagccctgcccccccgccgagcccagacccctggagagctactgcagaatcgagcccgagatccccgagagcagcagacaggagcagctggaggtgcccgagccctgcccccccgccgagcccggccccctgcagcccagcacccagggccagagcggcccccccggcccctgccccagagtggagctgggcgccagcgagccctgcaccctggagcacagaagcctggagagcagcctgcccccctgctgcagccagtgggcccccgccaccaccagcctgatcttcagcagccagcaccccctgtgcgccagcccccccatctgcagcctgcagagcctgagaccccccgccggccaggccggcctgagcaacctggcccccagaaccctggccctgagagagagactgaagagctgcctgaccgccatccactgcttccacgaggccagactggacgacgagtgcgccttctacaccagcagagccccccccagcggccccaccagagtgtgcaccaaccccgtggccaccctgctggagtggcaggacgccctgtgcttcatccccgtgggcagcgccgccccccagggcagcccctag

SEQ ID NO: 9372 - DNA, 1803 bp, Homo sapiens
  source 1..1803: mol_type = genomic DNA
atgagctgcagaagctacagagtgagcagcggccacagagtgggcaacttcagcagctgcagcgccatgaccccccagaacctgaacagattcagagccaacagcgtgagctgctggagcggccccggcttcagaggcctgggcagcttcggcagcagaagcgtgatcaccttcggcagctacagccccagaatcgccgccgtgggcagcagacccatccactgcggcgtgagattcggcgccggctgcggcatgggcttcggcgacggcagaggcgtgggcctgggccccagagccgacagctgcgtgggcctgggcttcggcgccggcagcggcatcggctacggcttcggcggccccggcttcggctacagagtgggcggcgtgggcgtgcccgccgcccccagcatcaccgccgtgaccgtgaacaagagcctgctgacccccctgaacctggagatcgaccccaacgcccagagagtgaagaaggacgagaaggagcagatcaagaccctgaacaacaagttcgccagcttcatcgacaaggtgagattcctggagcagcagaacaagctgctggagaccaagtggagcttcctgcaggagcagaagtgcatcagaagcaacctggagcccctgttcgagagctacatcaccaacctgagaagacagctggaggtgctggtgagcgaccaggccagactgcaggccgagagaaaccacctgcaggacgtgctggagggcttcaagaagaagtacgaggaggaggtggtgtgcagagccaacgccgagaacgagttcgtggccctgaagaaggacgtggacgccgccttcatgaacaagagcgacctggaggccaacgtggacaccctgacccaggagatcgacttcctgaagaccctgtacatggaggagatccagctgctgcagagccacatcagcgagaccagcgtgatcgtgaagatggacaacagcagagacctgaacctggacggcatcatcgccgaggtgaaggcccagtacgaggaggtggccagaagaagcagagccgacgccgaggcctggtaccagaccaagtacgaggagatgcaggtgaccgccggccagcactgcgacaacctgagaaacatcagaaacgagatcaacgagctgaccagactgatccagagactgaaggccgagatcgagcacgccaaggcccagagagccaagctggaggccgccgtggccgaggccgagcagcagggcgaggccaccctgagcgacgccaagtgcaagctggccgacctggagtgcgccctgcagcaggccaagcaggacatggccagacagctgtgcgagtaccaggagctgatgaacgccaagctgggcctggacatcgagatcgccacctacagaagactgctggagggcgaggagagcagactgtgcgagggcgtgggccccgtgaacatcagcgtgagcagcagcagaggcggcctggtgtgcggccccgagcccctggtggccggcagcaccctgagcagaggcggcgtgaccttcagcggcagcagcagcgtgtgcgccaccagcggcgtgctggccagctgcggccccagcctgggcggcgccagagtggcccccgccaccggcgacctgctgagcaccggcaccagaagcggcagcatgctgatcagcgaggcctgcgtgcccagcgtgccctgccccctgcccacccagggcggcttcagcagctgcagcggcggcagaagcagcagcgtgagattcgtgagcaccaccaccagctgcagaaccaagtactag

SEQ ID NO: 9373 - DNA, 1542 bp, Homo sapiens
  source 1..1542: mol_type = genomic DNA
atgagctaccacagcttccagcccggcagcagatgcggcagccagagcttcagcagctacagcgccgtgatgcccagaatggtgacccactacgccgtgagcaagggcccctgcagacccggcggcggcagaggcctgagagccctgggctgcctgggcagcagaagcctgtgcaacgtgggcttcggcagacccagagtggccagcagatgcggcggcaccctgcccggcttcggctacagactgggcgccacctgcggccccagcgcctgcatcacccccgtgaccatcaacgagagcctgctggtgcccctggccctggagatcgaccccaccgtgcagagagtgaagagagacgagaaggagcagatcaagtgcctgaacaacagattcgccagcttcatcaacaaggtgagattcctggagcagaagaacaagctgctggagaccaagtggaacttcatgcagcagcagagatgctgccagaccaacatcgagcccatcttcgagggctacatcagcgccctgagaagacagctggactgcgtgagcggcgacagagtgagactggagagcgagctgtgcagcctgcaggccgccctggagggctacaagaagaagtacgaggaggagctgagcctgagaccctgcgtggagaacgagttcgtggccctgaagaaggacgtggacaccgccttcctgatgaaggccgacctggagaccaacgccgaggccctggtgcaggagatcgacttcctgaagagcctgtacgaggaggagatctgcctgctgcagagccagatcagcgagaccagcgtgatcgtgaagatggacaacagcagagagctggacgtggacggcatcatcgccgagatcaaggcccagtacgacgacatcgccagcagaagcaaggccgaggccgaggcctggtaccagtgcagatacgaggagctgagagtgaccgccggcaaccactgcgacaacctgagaaacagaaagaacgagatcctggagatgaacaagctgatccagagactgcagcaggagaccgagaacgtgaaggcccagagatgcaagctggagggcgccatcgccgaggccgagcagcagggcgaggccgccctgaacgacgccaagtgcaagctggccggcctggaggaggccctgcagaaggccaagcaggacatggcctgcctgctgaaggagtaccaggaggtgatgaacagcaagctgggcctggacatcgagatcgccacctacagaagactgctggagggcgaggagcacagactgtgcgagggcatcggccccgtgaacatcagcgtgagcagcagcaagggcgccttcctgtacgagccctgcggcgtgagcacccccgtgctgagcaccggcgtgctgagaagcaacggcggctgcagcatcgtgggcaccggcgagctgtacgtgccctgcgagccccagggcctgctgagctgcggcagcggcagaaagagcagcatgaccctgggcgccggcggcagcagccccagccacaagcactag

SEQ ID NO: 9374 - DNA, 1632 bp, Homo sapiens
  source 1..1632: mol_type = genomic DNA
atgatgcccacccccgtgatcctgctgaaggagggcaccgacagcagccagggcatcccccagctggtgagcaacatcagcgcctgccaggtgatcgccgaggccgtgagaaccaccctgggccccagaggcatggacaagctgatcgtggacggcagaggcaaggccaccatcagcaacgacggcgccaccatcctgaagctgctggacgtggtgcaccccgccgccaagaccctggtggacatcgccaagagccaggacgccgaggtgggcgacggcaccaccagcgtgaccctgctggccgccgagttcctgaagcaggtgaagccctacgtggaggagggcctgcacccccagatcatcatcagagccttcagaaccgccacccagctggccgtgaacaagatcaaggagatcgccgtgaccgtgaagaaggccgacaaggtggagcagagaaagctgctggagaagtgcgccatgaccgccctgagcagcaagctgatcagccagcagaaggccttcttcgccaagatggtggtggacgccgtgatgatgctggacgacctgctgcagctgaagatgatcggcatcaagaaggtgcagggcggcgccctggaggacagccagctggtggccggcgtggccttcaagaagaccttcagctacgccggcttcgagatgcagcccaagaagtaccacaaccccaagatcgccctgctgaacgtggagctggagctgaaggccgagaaggacaacgccgagatcagagtgcacaccgtggaggactaccaggccatcgtggacgccgagtggaacatcctgtacgacaagctggagaagatccaccacagcggcgccaaggtggtgctgagcaagctgcccatcggcgacgtggccacccagtacttcgccgacagagacatgttctgcgccggcagagtgcccgaggaggacctgaagagaaccatgatggcctgcggcggcagcatccagaccagcgtgaacgccctgagcgccgacgtgctgggcagatgccaggtgttcgaggagacccagatcggcggcgagagatacaacttcttcaccggctgccccaaggccaagacctgcaccttcatcctgagaggcggcgccgagcagttcatggaggagaccgagagaagcctgcacgacgccatcatgatcgtgagaagagccatcaagaacgacagcgtggtggccggcggcggcgccatcgagatggagctgagcaagtacctgagagactacagcagaaccatccccggcaagcagcagctgctgatcggcgcctacgccaaggccctggagatcatccccagacagctgtgcgacaacgccggcttcgacgccaccaacatcctgaacaagctgagagccagacacgcccagggcggcacctggtacggcgtggacatcaacaacgaggacatcgccgacaacttcgaggccttcgtgtgggagcccgccatggtgagaatcaacgccctgaccgccgccagcgaggccgcctgcctgatcgtgagcgtggacgagaccatcaagaaccccagaagcaccgtggacgcccccaccgccgccggcagaggcagaggcagaggcagaccccactag

SEQ ID NO: 9375 - DNA, 1479 bp, Homo sapiens
  source 1..1479: mol_type = genomic DNA
atggcccccgtgggcgtggagaagaagctgctgctgggccccaacggccccgccgtggccgccgccggcgacctgaccagcgaggaggaggagggccagagcctgtggagcagcatcctgagcgaggtgagcaccagagccagaagcaagctgcccagcggcaagaacatcctggtgttcggcgaggacggcagcggcaagaccaccctgatgaccaagctgcagggcgccgagcacggcaagaagggcagaggcctggagtacctgtacctgagcgtgcacgacgaggacagagacgaccacaccagatgcaacgtgtggatcctggacggcgacctgtaccacaagggcctgctgaagttcgccgtgagcgccgagagcctgcccgagaccctggtgatcttcgtggccgacatgagcagaccctggaccgtgatggagagcctgcagaagtgggccagcgtgctgagagagcacatcgacaagatgaagatcccccccgagaagatgagagagctggagagaaagttcgtgaaggacttccaggactacatggagcccgaggagggctgccagggcagcccccagagaagaggccccctgaccagcggcagcgacgaggagaacgtggccctgcccctgggcgacaacgtgctgacccacaacctgggcatccccgtgctggtggtgtgcaccaagtgcgacgccgtgagcgtgctggagaaggagcacgactacagagacgagcacctggacttcatccagagccacctgagaagattctgcctgcagtacggcgccgccctgatctacaccagcgtgaaggaggagaagaacctggacctgctgtacaagtacatcgtgcacaagacctacggcttccacttcaccacccccgccctggtggtggagaaggacgccgtgttcatccccgccggctgggacaacgagaagaagatcgccatcctgcacgagaacttcaccaccgtgaagcccgaggacgcctacgaggacttcatcgtgaagccccccgtgagaaagctggtgcacgacaaggagctggccgccgaggacgagcaggtgttcctgatgaagcagcagagcctgctggccaagcagcccgccacccccaccagagccagcgagagccccgccagaggccccagcggcagccccagaacccagggcagaggcggccccgccagcgtgcccagcagcagccccggcaccagcgtgaagaagcccgaccccaacatcaagaacaacgccgccagcgagggcgtgctggccagcttcttcaacagcctgctgagcaagaagaccggcagccccggcagccccggcgccggcggcgtgcagagcaccgccaagaagagcggccagaagaccgtgctgagcaacgtgcaggaggagctggacagaatgaccagaaagcccgacagcatggtgaccaacagcagcaccgagaacgaggcctag

SEQ ID NO: 9376 - DNA, 540 bp, Homo sapiens
  source 1..540: mol_type = genomic DNA
atggacaaggacttcgacaagctgcacgagttcgtggagatcatgaaggagatgcagaaggacatggacgagaagatggacatcctgatcaacacccagaagaactacaagctgcccctgagaagagcccccaaggagcagcaggagctgagactgatgggcaagacccacagagagccccagctgagacccaagaagatggacggcgccagcggcgtgaacggcgccccctgcgccctgcacaagaagaccatggccccccagaagaccaagcagggcagcctggaccccctgcaccactgcggcacctgctgcgagaagtgcctgctgtgcgccctgaagaacaactacaacagagccgcccccctgaaggaggccagacacctgctgaccgccaacagcatcgaccccagcgccgccctggtgctgctgatcgagttcctgctgctgaccctggtgaccggcgccgccgcccccggcctggacgcctgcggccaccagagaaacatgagagacgagatcaacagcgagagaagatag

SEQ ID NO: 9377 - DNA, 3600 bp, Homo sapiens
  source 1..3600: mol_type = genomic DNA
atggccagcgccggcacccagcactacagcatcggcctgagacagaagaacagcttcaagcagagcggccccagcggcaccgtgcccgccaccccccccgagaagcccagcgagggcagagtgtggccccaggcccaccagcaggtgaagcccatctggaagctggagaagaagcaggtggagaccctgagcgccggcctgggccccggcctgctgggcgtgcccccccagcccgcctacttcttctgccccagcaccctgtgcagcagcggcaccaccgccgtgatcgccggccacagcagcagctgctacctgcacagcctgcccgacctgttcaacagcaccctgctgtacagaagaagcagctacagacagaagccctaccagcagctggagagcttctgcctgagaagcagccccagcgagaagagccccttcagcctgccccagaagagcctgcccgtgagcctgaccgccaacaaggccaccagcagcatggtgttcagcatggcccagcccatggccagcagcagcaccgagccctacctgtgcctggccgccgccggcgagaaccccagcggcaagagcctggccagcgccatcagcggcaagatccccagccccctgagcagcagctacaagcccatgctgaacaacaacagcttcatgtggcccaacagcacccccgtgcccctgctgcagaccacccagggcctgaagcccgtgagcccccccaagatccagcccgtgagctggcaccacagcggcggcaccggcgactgcgccccccagcccgtggaccacaaggtgcccaagagcatcggcaccgtgcccgccgacgccagcgcccacatcgccctgagcaccgccagcagccacgacaccagcaccaccagcgtggccagcagctggtacaacagaaacaacctggccatgagagccgagcccctgagctgcgccctggacgacagcagcgacagccaggaccccaccaaggagatcagattcaccgaggccgtgagaaagctgaccgccagaggcttcgagaagatgcccagacagggctgccagctggagcagagcagcttcctgaaccccagcttccagtggaacgtgctgaacagaagcagaagatggaagccccccgccgtgaaccagcagttcccccaggaggacgccggcagcgtgagaagagtgctgcccggcgccagcgacaccctgggcctggacaacaccgtgttctgcaccaagagaatcagcatccacctgctggccagccacgccagcggcctgaaccacaaccccgcctgcgagagcgtgatcgacagcagcgccttcggcgagggcaaggcccccggcccccccttcccccagaccctgggcatcgccaacgtggccaccagactgagcagcatccagctgggccagagcgagaaggagagacccgaggaggccagagagctggacagcagcgacagagacatcagcagcgccaccgacctgcagcccgaccaggccgagaccgaggacaccgaggaggagctggtggacggcctggaggactgctgcagcagagacgagaacgaggaggaggagggcgacagcgagtgcagcagcctgagcgccgtgagccccagcgagagcgtggccatgatcagcagaagctgcatggagatcctgaccaagcccctgagcaaccacgagaaggtggtgagacccgccctgatctacagcctgttccccaacgtgccccccaccatctacttcggcaccagagacgagagagtggagaagctgccctgggagcagagaaagctgctgagatggaagatgagcaccgtgacccccaacatcgtgaagcagaccatcggcagaagccacttcaagatcagcaagagaaacgacgactggctgggctgctggggccaccacatgaagagccccagcttcagaagcatcagagagcaccagaagctgaaccacttccccggcagcttccagatcggcagaaaggacagactgtggagaaacctgagcagaatgcagagcagattcggcaagaaggagttcagcttcttcccccagagcttcatcctgccccaggacgccaagctgctgagaaaggcctgggagagcagcagcagacagaagtggatcgtgaagccccccgccagcgccagaggcatcggcatccaggtgatccacaagtggagccagctgcccaagagaagacccctgctggtgcagagatacctgcacaagccctacctgatcagcggcagcaagttcgacctgagaatctacgtgtacgtgaccagctacgaccccctgagaatctacctgttcagcgacggcctggtgagattcgccagctgcaagtacagccccagcatgaagagcctgggcaacaagttcatgcacctgaccaactacagcgtgaacaagaagaacgccgagtaccaggccaacgccgacgagatggcctgccagggccacaagtgggccctgaaggccctgtggaactacctgagccagaagggcgtgaacagcgacgccatctgggagaagatcaaggacgtggtggtgaagaccatcatcagcagcgagccctacgtgaccagcctgctgaagatgtacgtgagaagaccctacagctgccacgagctgttcggcttcgacatcatgctggacgagaacctgaagccctgggtgctggaggtgaacatcagccccagcctgcacagcagcagccccctggacatcagcatcaagggccagatgatcagagacctgctgaacctggccggcttcgtgctgcccaacgccgaggacatcatcagcagccccagcagctgcagcagcagcaccaccagcctgcccaccagccccggcgacaagtgcagaatggcccccgagcacgtgaccgcccagaagatgaagaaggcctactacctgacccagaagatccccgaccaggacttctacgccagcgtgctggacgtgctgacccccgacgacgtgagaatcctggtggagatggaggacgagttcagcagaagaggccagttcgagagaatcttccccagccacatcagcagcagatacctgagattcttcgagcagcccagatacttcaacatcctgaccacccagtgggagcagaagtaccacggcaacaagctgaagggcgtggacctgctgagaagctggtgctacaagggcttccacatgggcgtggtgagcgacagcgcccccgtgtggagcctgcccaccagcctgctgaccatcagcaaggacgacgtgatcctgaacgccttcagcaagagcgagaccagcaagctgggcaagcagagcagctgcgaggtgagcctgctgctgagcgaggacggcaccacccccaagagcaagaagacccaggccggcctgagcccctacccccagaagcccagcagcagcaaggacagcgaggacaccagcaaggagcccagcctgagcacccagaccctgcccgtgatcaagtgcagcggccagaccagcagactgagcgccagcagcaccttccagagcatcagcgacagcctgctggccgtgagcccctag

SEQ ID NO: 9378 - DNA, 2772 bp, Homo sapiens
  source 1..2772: mol_type = genomic DNA
atgctgagaagaggcagccaggccctgagaagattcagcaccggcagagtgtacttcaagaacaagctgaagctggccctgatcggccagagcctgttcggccaggaggtgtacagccacctgagaaaggagggccacagagtggtgggcgtgttcaccgtgcccgacaaggacggcaaggccgaccccctggccctggccgccgagaaggacggcacccccgtgttcaagctgcccaagtggagagtgaagggcaagaccatcaaggaggtggccgaggcctacagaagcgtgggcgccgagctgaacgtgctgcccttctgcacccagttcatccccatggacatcatcgacagccccaagcacggcagcatcatctaccaccccagcatcctgcccagacacagaggcgccagcgccatcaactggaccctgatcatgggcgacaagaaggccggcttcagcgtgttctgggccgacgacggcctggacaccggccccatcctgctgcagagaagctgcgacgtggagcccaacgacaccgtggacgccctgtacaacagattcctgttccccgagggcatcaaggccatggtggaggccgtgcagctgatcgccgacggcaaggcccccagaatcccccagcccgaggagggcgccacctacgagggcatccagaagaaggagaacgccgagatcagctgggaccagagcgccgaggtgctgcacaactggatcagaggccacgacaaggtgcccggcgcctggaccgagatcaacggccagatggtgaccttctacggcagcaccctgctgaacagcagcgtgccccccggcgagcccctggagatcaagggcgccaagaagcccggcctggtgaccaagaacggcctggtgctgttcggcaacgacggcaaggccctgaccgtgagaaacctgcagttcgaggacggcaagatgatccccgccagccagtacttcagcaccggcgagaccagcgtggtggagctgaccgccgaggaggtgaaggtggccgagaccatcaaggtgatctgggccggcatcctgagcaacgtgcccatcatcgaggacagcaccgacttcttcaagagcggcgccagcagcatggacgtggccagactggtggaggagatcagacagaagtgcggcggcctgcagctgcagaacgaggacgtgtacatggccaccaagttcgagggcttcatccagaaggtggtgagaaagctgagaggcgaggaccaggaggtggagctggtggtggactacatcagcaaggaggtgaacgagatcatggtgaagatgccctaccagtgcttcatcaacggccagttcaccgacgccgacgacggcaagacctacgacaccatcaaccccaccgacggcagcaccatctgcaaggtgagctacgccagcctggccgacgtggacaaggccgtggccgccgccaaggacgccttcgagaacggcgagtggggcagaatgaacgccagagagagaggcagactgatgtacagactggccgacctgctggaggagaaccaggaggagctggccaccatcgaggccctggacagcggcgccgtgtacaccctggccctgaagacccacatcggcatgagcgtgcagaccttcagatacttcgccggctggtgcgacaagatccagggcagcaccatccccatcaaccaggccagacccaacagaaacctgaccttcaccaagaaggagcccctgggcgtgtgcgccatcatcatcccctggaactaccccctgatgatgctggcctggaagagcgccgcctgcctggccgccggcaacaccctggtgctgaagcccgcccaggtgacccccctgaccgccctgaagttcgccgagctgagcgtgaaggccggcttccccaagggcgtgatcaacatcatccccggcagcggcggcatcgccggccagagactgagcgagcaccccgacatcagaaagctgggcttcaccggcagcacccccatcggcaagcagatcatgaagagctgcgccgtgagcaacctgaagaaggtgagcctggagctgggcggcaagagccccctgatcatcttcaacgactgcgagctggacaaggccgtgagaatgggcatgggcgccgtgttcttcaacaagggcgagaactgcatcgccgccggcagactgttcgtggaggagagcatccacgacgagttcgtgaccagagtggtggaggagatcaagaagatgaagatcggcgaccccctggacagaagcaccgaccacggcccccagaaccacaaggcccacctggagaagctgctgcagtactgcgagaccggcgtgaaggagggcgccaccctggtgtacggcggcagacaggtgcagagacccggcttcttcatggagcccaccgtgttcaccgacgtggaggactacatgtacctggccaaggaggagagcttcggccccatcatggtgatcagcaagttccagaacggcgacatcgacggcgtgctgcagagagccaacagcaccgagtacggcctggccagcggcgtgttcaccagagacatcaacaaggccatgtacgtgagcgagaagctggaggccggcaccgtgttcatcaacacctacaacaagaccgacgtggccgcccccttcggcggcgtgaagcagagcggcttcggcaaggacctgggcgaggaggccctgaacgagtacctgaagaccaagaccgtgaccctggagtactag

SEQ ID NO: 9379 - DNA, 1323 bp, Homo sapiens
  source 1..1323: mol_type = genomic DNA
atggagggcgtgctgtacaagtggaccaactacctgagcggctggcagcccagatggttcctgctgtgcggcggcatcctgagctactacgacagccccgaggacgcctggaagggctgcaagggcagcatccagatggccgtgtgcgagatccaggtgcacagcgtggacaacaccagaatggacctgatcatccccggcgagcagtacttctacctgaaggccagaagcgtggccgagagacagagatggctggtggccctgggcagcgccaaggcctgcctgaccgacagcagaacccagaaggagaaggagttcgccgagaacaccgagaacctgaagaccaagatgagcgagctgagactgtactgcgacctgctggtgcagcaggtggacaagaccaaggaggtgaccaccaccggcgtgagcaacagcgaggagggcatcgacgtgggcaccctgctgaagagcacctgcaacaccttcctgaagaccctggaggagtgcatgcagatcgccaacgccgccttcaccagcgagctgctgtacagaaccccccccggcagcccccagctggccatgctgaagagcagcaagatgaagcaccccatcatccccatccacaacagcctggagagacagatggagctgagcacctgcgagaacggcagcctgaacatggagatcaacggcgaggaggagatcctgatgaagaacaagaacagcctgtacctgaagagcgccgagatcgactgcagcatcagcagcgaggagaacaccgacgacaacatcaccgtgcagggcgagatcagaaaggaggacggcatggagaacctgaagaaccacgacaacaacctgacccagagcggcagcgacagcagctgcagccccgagtgcctgtgggaggagggcaaggaggtgatccccaccttcttcagcaccatgaacaccagcttcagcgacatcgagctgctggaggacagcggcatccccaccgaggccttcctggccagctgctacgccgtggtgcccgtgctggacaagctgggccccaccgtgttcgcccccgtgaagatggacctggtgggcaacatcaagaaggtgaaccagaagtacatcaccaacaaggaggagttcaccaccctgcagaagatcgtgctgcacgaggtggaggccgacgtggcccaggtgagaaacagcgccaccgaggccctgctgtggctgaagagaggcctgaagttcctgaagggcttcctgaccgaggtgaagaacggcgagaaggacatccagaccgccctgagaaaccccaccgagaacacctag

SEQ ID NO: 9380 - DNA, 1272 bp, Homo sapiens
  source 1..1272: mol_type = genomic DNA
atggccatctgccagttcttcctgcagggcagatgcagattcggcgacagatgctggaacgagcaccccggcgccagaggcgccggcggcggcagacagcagccccagcagcagcccagcggcaacaacagaagaggctggaacaccaccagccagagatacagcaacgtgatccagcccagcagcttcagcaagagcaccccctggggcggcagcagagaccaggagaagccctacttcagcagcttcgacagcggcgccagcaccaacagaaaggagggcttcggcctgagcgagaaccccttcgccagcctgagccccgacgagcagaaggacgagaagaagctgctggagggcatcgtgaaggacatggaggtgtgggagagcagcggccagtggatgttcagcgtgtacagccccgtgaagaagaagcccaacatcagcggcttcaccgacatcagccccgaggagctgagactggagtaccacaacttcctgaccagcaacaacctgcagagctacctgaacagcgtgcagagactgatcaaccagtggagaaacagagtgaacgagctgaagagcctgaacatcagcaccaaggtggccctgctgagcgacgtgaaggacggcgtgaaccaggccgcccccgccttcggcttcggcagcagccaggccgccaccttcatgagccccggcttccccgtgaacaacagcagcagcgacaacgcccagaacttcagcttcaagaccaacagcggcttcgccgccgccagcagcggcagccccgccggcttcggcagcagccccgccttcggcgccgccgccagcaccagcagcggcatcagcaccagcgcccccgccttcggcttcggcaagcccgaggtgaccagcgccgccagcttcagcttcaagagccccgccgccagcagcttcggcagccccggcttcagcggcctgcccgccagcctggccaccggccccgtgagagcccccgtggcccccgccttcggcggcggcagcagcgtggccggcttcggcagccccggcagccacagccacaccgccttcagcaagcccagcagcgacaccttcggcaacagcagcatcagcaccagcctgagcgccagcagcagcatcatcgccaccgacaacgtgctgttcacccccagagacaagctgaccgtggaggagctggagcagttccagagcaagaagttcaccctgggcaagatccccctgaagcccccccccctggagctgctgaacgtgtag

SEQ ID NO: 9381 - DNA, 1323 bp, Homo sapiens
  source 1..1323: mol_type = genomic DNA
atgatggccgacgaggaggaggaggtgaagcccatcctgcagaagctgcaggagctggtggaccagctgtacagcttcagagactgctacttcgagacccacagcgtggaggacgccggcagaaagcagcaggacgtgcagaaggagatggagaagaccctgcagcagatggaggaggtggtgggcagcgtgcagggcaaggcccaggtgctgatgctgaccggcaaggccctgaacgtgacccccgactacagccccaaggccgaggagctgctgagcaaggccgtgaagctggagcccgagctggtggaggcctggaaccagctgggcgaggtgtactggaagaagggcgacgtggccgccgcccacacctgcttcagcggcgccctgacccactgcagaaacaaggtgagcctgcagaacctgagcatggtgctgagacagctgagaaccgacaccgaggacgagcacagccaccacgtgatggacagcgtgagacaggccaagctggccgtgcagatggacgtgcacgacggcagaagctggtacatcctgggcaacagctacctgagcctgtacttcagcaccggccagaaccccaagatcagccagcaggccctgagcgcctacgcccaggccgagaaggtggacagaaaggccagcagcaaccccgacctgcacctgaacagagccaccctgcacaagtacgaggagagctacggcgaggccctggagggcttcagcagagccgccgccctggaccccgcctggcccgagcccagacagagagagcagcagctgctggagttcctggacagactgaccagcctgctggagagcaagggcaaggtgaagaccaagaagctgcagagcatgctgggcagcctgagacccgcccacctgggcccctgcagcgacggccactaccagagcgccagcggccagaaggtgaccctggagctgaagcccctgagcaccctgcagcccggcgtgaacagcggcgccgtgatcctgggcaaggtggtgttcagcctgaccaccgaggagaaggtgcccttcaccttcggcctggtggacagcgacggcccctgctacgccgtgatggtgtacaacatcgtgcagagctggggcgtgctgatcggcgacagcgtggccatccccgagcccaacctgagactgcacagaatccagcacaagggcaaggactacagcttcagcagcgtgagagtggagacccccctgctgctggtggtgaacggcaagccccagggcagcagcagccaggccgtggccaccgtggccagcagaccccagtgcgagtag

SEQ ID NO: 9382 - DNA, 1341 bp, Homo sapiens
  source 1..1341: mol_type = genomic DNA
atggaggagaccatcaaggacccccccaccagcgccgtgctgctggaccactgccacttcagccaggtgatcttcaacagcgtggagaagttctacatccccggcggcgacgtgacctgccactacaccttcacccagcacttcatccccagaagaaaggactggatcggcatcttcagagtgggctggaagaccaccagagagtactacaccttcatgtgggtgaccctgcccatcgacctgaacaacaagagcgccaagcagcaggaggtgcagttcaaggcctactacctgcccaaggacgacgagtactaccagttctgctacgtggacgaggacggcgtggtgagaggcgccagcatccccttccagttcagacccgagaacgaggaggacatcctggtggtgaccacccagggcgaggtggaggagatcgagcagcacaacaaggagctgtgcaaggagaaccaggagctgaaggacagctgcatcagcctgcagaagcagaacagcgacatgcaggccgagctgcagaagaagcaggaggagctggagaccctgcagagcatcaacaagaagctggagctgaaggtgaaggagcagaaggactactgggagaccgagctgctgcagctgaaggagcagaaccagaagatgagcagcgagaacgagaagatgggcatcagagtggaccagctgcaggcccagctgagcacccaggagaaggagatggagaagctggtgcagggcgaccaggacaagaccgagcagctggagcagctgaagaaggagaacgaccacctgttcctgagcctgaccgagcagagaaaggaccagaagaagctggagcagaccgtggagcagatgaagcagaacgagaccaccgccatgaagaagcagcaggagctgatggacgagaacttcgacctgagcaagagactgagcgagaacgagatcatctgcaacgccctgcagagacagaaggagagactggagggcgagaacgacctgctgaagagagagaacagcagactgctgagctacatgggcctggacttcaacagcctgccctaccaggtgcccaccagcgacgagggcggcgccagacagaaccccggcctggcctacggcaacccctacagcggcatccaggagagcagcagccccagccccctgagcatcaagaagtgccccatctgcaaggccgacgacatctgcgaccacaccctggagcagcagcagatgcagcccctgtgcttcaactgccccatctgcgacaagatcttccccgccaccgagaagcagatcttcgaggaccacgtgttctgccacagcctgtag

SEQ ID NO: 9383 - DNA, 1329 bp, Homo sapiens
  source 1..1329: mol_type = genomic DNA
atggccctgcccggcgccagagccagaggctgggccgccgccgccagagccgcccagagaagaagaagagtggagaacgccggcggcagccccagccccgagcccgccggcagaagagccgccctgtacgtgcactggccctactgcgagaagagatgcagctactgcaacttcaacaagtacatccccagaagactggaggaggccgccatgcagaagtgcctggtgaccgaggcccagaccctgctgagactgagcggcgtgcagagagtggagagcgtgttcttcggcggcggcacccccagcctggccagcccccacaccgtggccgccgtgctggaggccgtggcccaggccgcccacctgcccgccgacctggaggtgaccctggaggccaaccccaccagcgcccccggcagcagactggccgagttcggcgccgccggcgtgaacagactgagcatcggcctgcagagcctggacgacaccgagctgagactgctgggcagaacccacagcgcctgcgacgccctgagaaccctggccgaggccagaagactgttccccggcagagtgagcgtggacctgatgctgggcctgcccgcccagcaggtgggcccctggctgggccagctgcaggagctgctgcaccactgcgacgaccacctgagcctgtaccagctgagcctggagagaggcaccgccctgttcgcccaggtgcagagaggcgccctgcccgcccccgaccccgagctggccgccgagatgtaccagagaggcagagccgtgctgagagaggccggcttccaccagtacgaggtgagcaacttcgccagaaacggcgccctgagcacccacaactggacctactggcagtgcggccagtacctgggcgtgggccccggcgcccacggcagattcatgccccagggcgccggcggccacaccagagaggccagaatccagaccctggagcccgacaactggatgaaggaggtgatgctgttcggccacggcaccagaaagagagtgcccctgggcagactggagctgctggaggaggtgctggccctgggcctgagaaccgacgtgggcatcacccaccagcactggcagcagttcgagccccagctgaccctgtgggacgtgttcggcgccaacaaggaggtgcaggagctgctggagagaggcctgctgcagctggaccacagaggcctgagatgcagctgggagggcctggccgtgctggacagcctgctgctgaccctgctgccccagctgcaggaggcctggcagcagagaacccccagccccgtgcccggcggctag

SEQ ID NO: 9384 - DNA, 1278 bp, Homo sapiens
  source 1..1278: mol_type = genomic DNA
atggacaagaacatcggcgagcagctgaacaaggcctacgaggccttcagacaggcctgcatggacagagacagcgccgtgaaggagctgcagcagaagaccgagaactacgagcagagaatcagagagcagcaggagcagctgagcctgcagcagaccatcatcgacaagctgaagagccagctgctgctggtgaacagcacccaggacaacaactacggctgcgtgcccctgctggaggacagcgagaccagaaagaacaacctgaccctggaccagccccaggacaaggtgatcagcggcatcgccagagagaagctgcccaaggtgagaagacaggaggtgagcagccccagaaaggagaccagcgccagaagcctgggcagccccctgctgcacgagagaggcaacatcgagaagaccttctgggacctgaaggaggagttccacaagatctgcatgctggccaaggcccagaaggaccacctgagcaagctgaacatccccgacaccgccaccgagacccagtgcagcgtgcccatccagtgcaccgacaagaccgacaagcaggaggccctgttcaagccccaggccaaggacgacatcaacagaggcgcccccagcatcaccagcgtgacccccagaggcctgtgcagagacgaggaggacaccagcttcgagagcctgagcaagttcaacgtgaagttcccccccatggacaacgacagcaccttcctgcacagcacccccgagagacccggcatcctgagccccgccaccagcgaggccgtgtgccaggagaagttcaacatggagttcagagacaaccccggcaacttcgtgaagaccgaggagaccctgttcgagatccagggcatcgaccccatcgccagcgccatccagaacctgaagaccaccgacaagaccaagcccagcaacctggtgaacacctgcatcagaaccaccctggacagagccgcctgcctgccccccggcgaccacaacgccctgtacgtgaacagcttccccctgctggaccccagcgacgcccccttccccagcctggacagccccggcaaggccatcagaggcccccagcagcccatctggaagcccttccccaaccaggacagcgacagcgtggtgctgagcggcaccgacagcgagctgcacatccccagagtgtgcgagttctgccaggccgtgttcccccccagcatcaccagcagaggcgacttcctgagacacctgaacagccacttcaacggcgagacctag

SEQ ID NO: 9385 - DNA, 2055 bp, Homo sapiens
  source 1..2055: mol_type = genomic DNA
atggagaacctgcagaccaacttcagcctggtgcagggcagcaccaagaagctgaacggcatgggcgacgacggcagcccccccgccaagaagatgatcaccgacatccacgccaacggcaagaccatcaacaaggtgcccaccgtgaagaaggagcacctggacgactacggcgaggcccccgtggagaccgacggcgagcacgtgaagagaacctgcaccagcgtgcccgagaccctgcacctgaaccccagcctgaagcacaccctggcccagttccacctgagcagccagagcagcctgggcggccccgccgccttcagcgccagacacagccaggagagcatgagccccaccgtgttcctgcccctgcccagcccccaggtgctgcccggccccctgctgatccccagcgacagcagcaccgagctgacccagaccgtgctggagggcgagagcatcagctgcttccaggtgggcggcgagaagagactgtgcctgccccaggtgctgaacagcgtgctgagagagttcaccctgcagcagatcaacaccgtgtgcgacgagctgtacatctactgcagcagatgcaccagcgaccagctgcacatcctgaaggtgctgggcatcctgcccttcaacgcccccagctgcggcctgatcaccctgaccgacgcccagagactgtgcaacgccctgctgagacccagaaccttcccccagaacggcagcgtgctgcccgccaagagcagcctggcccagctgaaggagaccggcagcgccttcgaggtggagcacgagtgcctgggcaagtgccagggcctgttcgccccccagttctacgtgcagcccgacgccccctgcatccagtgcctggagtgctgcggcatgttcgccccccagaccttcgtgatgcacagccacagaagccccgacaagagaacctgccactggggcttcgagagcgccaagtggcactgctacctgcacgtgaaccagaagtacctgggcacccccgaggagaagaagctgaagatcatcctggaggagatgaaggagaagttcagcatgagaagcggcaagagaaaccagagcaagaccgacgcccccagcggcatggagctgcagagctggtaccccgtgatcaagcaggagggcgaccacgtgagccagacccacagcttcctgcaccccagctactacctgtacatgtgcgacaaggtggtggcccccaacgtgagcctgaccagcgccgtgagccagagcaaggagctgaccaagaccgaggccagcaagagcatcagcagacagagcgagaaggcccacagcagcggcaagctgcagaagaccgtgagctaccccgacgtgagcctggaggagcaggagaagatggacctgaagaccagcagagagctgtgcagcagactggacgccagcatcagcaacaacagcaccagcaagagaaagagcgagagcgccacctgcaacctggtgagagacatcaacaaggtgggcatcggcctggtggccgccgccagcagccccctgctggtgaaggacgtgatctgcgaggacgacaagggcaagatcatggaggaggtgatgagaacctacctgaagcagcaggagaagctgaacctgatcctgcagaagaagcagcagctgcagatggaggtgaagatgctgagcagcagcaagagcatgaaggagctgaccgaggagcagcagaacctgcagaaggagctggagagcctgcagaacgagcacgcccagagaatggaggagttctacgtggagcagaaggacctggagaagaagctggagcagatcatgaagcagaagtgcacctgcgacagcaacctggagaaggacaaggaggccgagtacgccggccagctggccgagctgagacagagactggaccacgccgaggccgacagacaggagctgcaggacgagctgagacaggagagagaggccagacagaagctggagatgatgatcaaggagctgaagctgcagatcctgaagagcagcaagaccgccaaggagtag

SEQ ID NO: 9386 - DNA, 1080 bp, Homo sapiens
  source 1..1080: mol_type = genomic DNA
atgagctacagaagagagctggagaagtacagagacctggacgaggacgagatcctgggcgccctgaccgaggaggagctgagaaccctggagaacgagctggacgagctggaccccgacaacgccctgctgcccgccggcctgagacagaaggaccagaccaccaaggcccccaccggccccttcaagagagaggagctgctggaccacctggagaagcaggccaaggagttcaaggacagagaggacctggtgccctacaccggcgagaagagaggcaaggtgtgggtgcccaagcagaagcccctggaccccgtgctggagagcgtgaccctggagcccgagctggaggaggccctggccaacgccagcgacgccgagctgtgcgacatcgccgccatcctgggcatgcacaccctgatgagcaaccagcagtactaccaggccctgagcagcagcagcatcatgaacaaggagggcctgaacagcgtgatcaagcccacccagtacaagcccgtgcccgacgaggagcccaacagcaccgacgtggaggagaccctggagagaatcaagaacaacgaccccaagctggaggaggtgaacctgaacaacatcagaaacatccccatccccaccctgaaggcctacgccgaggccctgaaggagaacagctacgtgaagaagttcagcatcgtgggcaccagaagcaacgaccccgtggcctacgccctggccgagatgctgaaggagaacaaggtgctgaagaccctgaacgtggagagcaacttcatcagcggcgccggcatcctgagactggtggaggccctgccctacaacaccagcctggtggagatgaagatcgacaaccagagccagcccctgggcaacaaggtggagatggagatcgtgagcatgctggagaagaacgccaccctgctgaagttcggctaccacttcacccagcagggccccagactgagagccagcaacgccatgatgaacaacaacgacctggtgagaaagagaagactggccgacctgaccggccccatcatccccaagtgcagaagcggcgtgtag

SEQ ID NO: 9387 - DNA, 1941 bp, Homo sapiens
  source 1..1941: mol_type = genomic DNA
atggaggagagaggcagccccgacggcgacctggccagaagcctggagcagggccccgagggccccgagacccccatccaggtggtgctgagagtgagacccatgagcgccgccgagctgagaagaggccagcagagcgtgctgcactgcagcggcaccagaaccctgcagggcggccccgaggtggccttcagattcggcgccgtgctggacgccgccagaacccaggaggacgtgttcagagcctgcggcgtgagaagactgggcgagctggccctgagaggcttcagctgcaccgtgttcaccttcggccagaccggcagcggcaagacctacaccctgaccggcccccccccccagggcgagggcgtgcccgtgccccccagcctggccggcatcatgcagagaaccttcgcctggctgctggacagagtgcagcacctgggcgcccccgtgaccctgagagccagctacctggagatctacaacgagcaggtgagagacctgctgagcctgggcagccccagacccctgcccgtgagatggaacaagaccagaggcttctacgtggagcagctgagagtggtggagttcggcagcctggaggccctgatggagctgctgcagaccggcctgagcagaagaagaaacagcgcccacaccctgaaccaggccagcagcagaagccacgccctgctgaccctgtacatcagcagacagaccgcccagcagatgcccagcgtggaccccggcgagccccccgtgggcggcaagctgtgcttcgtggacctggccggcagcgagaaggtggccgccaccggcagcagaggcgagctgatgctggaggccaacagcatcaacagaagcctgctggccctgggccactgcatcagcctgctgctggacccccagagaaagcagagccacatccccttcagagacagcaagctgaccaagctgctggccgacagcctgggcggcagaggcgtgaccctgatggtggcctgcgtgagccccagcgcccagtgcctgcccgagaccctgagcaccctgagatacgccagcagagcccagagagtgaccaccagaccccaggcccccaagagccccgtggccaagcagccccagagactggagaccgagatgctgcagctgcaggaggagaacagaagactgcagttccagctggaccagatggactgcaaggccagcggcctgagcggcgccagagtggcctgggcccagagaaacctgtacggcatgctgcaggagttcatgctggagaacgagagactgagaaaggagaagagccagctgcagaacagcagagacctggcccagaacgagcagagaatcctggcccagcaggtgcacgccctggagagaagactgctgagcgcctgctaccaccaccagcagggccccggcctgacccccccctgcccctgcctgatggcccccgcccccccctgccacgccctgccccccctgtacagctgcccctgctgccacatctgccccctgtgcagagtgcccctggcccactgggcctgcctgcccggcgagcaccacctgccccaggtgctggaccccgaggccagcggcggcagaccccccagcgccagaccccccccctgggcccccccctgcagccccggcagcgccaagtgccccagagagagaagccacagcgactggacccagaccagagtgctggccgagatgctgaccgaggaggaggtggtgcccagcgccccccccctgcccgtgagaccccccaagaccagccccggcctgagaggcggcgccggcgtgcccaacctggcccagagactggaggccctgagagaccagatcggcagcagcctgagaagaggcagaagccagcccccctgcagcgagggcgccagaagccccggccaggtgctgcccccccactag

SEQ ID NO: 9388 - DNA, 462 bp, Homo sapiens
  source 1..462: mol_type = genomic DNA
atggccagaaacaccctgagcagcagattcagaagagtggacatcgacgagttcgacgagaacaagttcgtggacgagcaggaggaggccgccgccgccgccgccgagcccggccccgaccccagcgaggtggacggcctgctgagacagggcgacatgctgagagccttccacgccgccctgagaaacagccccgtgaacaccaagaaccaggccgtgaaggagagagcccagggcgtggtgctgaaggtgctgaccaacttcaagagcagcgagatcgagcaggccgtgcagagcctggacagaaacggcgtggacctgctgatgaagtacatctacaagggcttcgagaagcccaccgagaacagcagcgccgtgctgctgcagtggcacgagaaggccctggccgtgggcggcctgggcagcatcatcagagtgctgaccgccagaaagaccgtgtag

SEQ ID NO: 9389 - DNA, 3318 bp, Homo sapiens
  source 1..3318: mol_type = genomic DNA
atggccgccaccgccagcgccggcgtgcccgccaccgtgagcgagaagcaggagttctaccagctgctgaagaacctgatcaaccccagctgcatggtgagaagacaggccgaggagatctacgagaacatccccggcctgtgcaagaccaccttcctgctggacgccgtgagaaacagaagagccggctacgaggtgagacagatggccgccgccctgctgagaagactgctgagcagcggcttcgaggaggtgtaccccaacctgcccgccgacgtgcagagagacgtgaagatcgagctgatcctggccgtgaagctggagacccacgccagcatgagaaagaagctgtgcgacatcttcgccgtgctggccagaaacctgatcgacgaggacggcaccaaccactggcccgagggcctgaagttcctgatcgacagcatctacagcaagaacgtggtgctgtgggaggtggccctgcacgtgttctggcacttccccggcatcttcggcacccaggagagacacgacctggacatcatcaagagactgctggaccagtgcatccaggaccaggagcaccccgccatcagaaccctgagcgccagagccgccgccgccttcgtgctggccaacgagaacaacatcgccctgttcaaggacttcgccgacctgctgcccggcatcctgcaggccgtgaacgacagctgctaccaggacgacgacagcgtgctggagagcctggtggagatcgccgacaccgtgcccaagtacctgggcccctacctggaggacaccctgcagctgagcctgaagctgtgcggcgacagcagactgagcaacctgcagagacagctggccctggaggtgatcgtgaccctgagcgagaccgccacccccatgctgaagaagcacaccaacatcatcgcccaggccgtgccccacatcctggccatgatggtggacctgcaggacgacgaggactgggtgaacgccgacgagatggaggaggacgacttcgacagcaacgccgtggccgccgagagcgccctggacagactggcctgcggcctgggcggcaaggtggtgctgcccatgaccaaggagcacatcatgcagatgctgcagagccccgactggaagtacagacacgccggcctgatggccctgagcgccatcggcgagggctgccaccagcagatggagagcatcctggacgagaccgtgaacagcgtgctgctgttcctgcaggacccccaccccagagtgagagccgccgcctgcaccaccctgggccagatggccaccgacttcgcccccaacttccagaagaagttccacgagaccgtgatcgccgccctgctgagaaccatggagaaccagggcaaccagagagtgcagagccacgccgccagcgccctgatcatcttcatcgaggactgccccaagagcctgctggtgctgtacgtggacagcatggtgaagaacctgcacagcgtgctggtgatcaagctgcaggagctgatcagaaacggcaccaagctggccctggagcagctggtgaccaccatcgccagcgtggccgacaccatcgaggagaagttcgtgccctactacgacatcttcatgcccagcctgaagcacatcgtggagctggccgtgcagaaggagctgaagctgctgagaggcaagaccatcgagtgcatcagccacatcggcctggccgtgggcaaggagaagttcatgcaggacgccagcaacgtgatgcagctgctgctgaagacccagagcgacctgaacaacatggaggacgacgacccccagaccagctacatggtgagcgcctgggccagaatgtgcaagatcctgggcaaggacttccagcagtacctgcccctggtgatcgagcccctgatcaagaccgccagcgccaagcccgacgtggccctgctggacacccaggacgtggagaacatgagcgacgacgacggctggcagttcgtgaacctgggcgaccagcagagcttcggcatcaagaccagcggcctggaggccaaggccaccgcctgccagatgctggtgtactacgccaaggagctgagagagggcttcgtggagtacaccgagcaggtggtgaagctgatggtgcccctgctgaagttctacttccacgacaacgtgagagtggccgccgccgagagcatgcccttcctgctggagtgcgccagaatcagaggccccgagtacctggcccagatgtggcagttcatctgcgaccccctgatcaaggccatcggcaccgagcccgacaccgacgtgctgagcgagatcatgaacagcttcgccaagagcatcgaggtgatgggcgacggctgcctgaacgacgagcacctggaggagctgggcggcatcctgaaggccaagctggagggccacttcaagaaccaggagctgagacaggtgaagagacaggaggagaactacgaccagcaggtggagatgagcctgcaggacgaggacgagtgcgacgtgtacatcctgaccaaggtgagcgacatcctgcacagcctgttcagcacctacaaggagaagatcctgccctggttcgagcagctgctgcccctgatcgtgaacctgatctgcagcagcagaccctggcccgacagacagtggggcctgtgcatcttcgacgacatcatcgagcactgcagccccaccagcttcaagtacgtggagtacttcagatggcccatgctgctgaacatgagagacaacaaccccgaggtgagacaggccgccgcctacggcctgggcgtgatggcccagttcggcggcgacgactacagaagcctgtgcagcgaggccgtgcccctgctggtgaaggtgatcaagtgcgccaacagcaagaccaagaagaacgtgatcgccaccgagaactgcatcagcgccatcggcaagatcctgaagttcaagcccaactgcgtgaacgtggacgaggtgctgccccactggctgagctggctgcccctgcacgaggacaaggaggaggccatccagaccctgagcttcctgtgcgacctgatcgagagcaaccaccccgtggtgatcggccccaacaacagcaacctgcccaagatcatcagcatcatcgccgagggcaagatcaacgagaccatcaactacgaggacccctgcgccaagagactggccaacgtggtgagacaggtgcagaccagcgaggacctgtggctggagtgcgtgagccagctggacgacgagcagcaggaggccctgcaggagctgctgaacttcgcctag

SEQ ID NO: 9390 - DNA, 1914 bp, Homo sapiens
  source 1..1914: mol_type = genomic DNA
atggaggtgaccggcttcggcgtgaccagacccggcaaggtgccccaggccagaatgagcggcctggtgctgggccagagagacgagcccgccggccacagactgagccaggaggagatcctgggcagcaccagactggtgagccagggcctggaggccctgagaagcgagcaccaggccgtgctgcagagcctgagccagaccatcgagtgcctgcagcagggcggccacgaggagggcctggtgcacgagaaggccagacagctgagaagaagcatggagaacatcgagctgggcctgagcgaggcccaggtgatgctggccctggccagccacctgagcaccgtggagagcgagaagcagaagctgagagcccaggtgagaagactgtgccaggagaaccagtggctgagagacgagctggccggcacccagcagagactgcagagaagcgagcaggccgtggcccagctggaggaggagaagaagcacctggagttcctgggccagctgagacagtacgacgaggacggccacaccagcgaggagaaggagggcgacgccaccaaggacagcctggacgacctgttccccaacgaggaggaggaggaccccagcaacggcctgagcagaggccagggcgccaccgccgcccagcagggcggctacgagatccccgccagactgagaaccctgcacaacctggtgatccagtacgccgcccagggcagatacgaggtggccgtgcccctgtgcaagcaggccctggaggacctggagagaaccagcggcagaggccaccccgacgtggccaccatgctgaacatcctggccctggtgtacagagaccagaacaagtacaaggaggccgcccacctgctgaacgacgccctgagcatcagagagagcaccctgggccccgaccaccccgccgtggccgccaccctgaacaacctggccgtgctgtacggcaagagaggcaagtacaaggaggccgagcccctgtgccagagagccctggagatcagagagaaggtgctgggcaccaaccaccccgacgtggccaagcagctgaacaacctggccctgctgtgccagaaccagggcaagtacgaggccgtggagagatactaccagagagccctggccatctacgagggccagctgggccccgacaaccccaacgtggccagaaccaagaacaacctggccagctgctacctgaagcagggcaagtacgccgaggccgagaccctgtacaaggagatcctgaccagagcccacgtgcaggagttcggcagcgtggacgacgaccacaagcccatctggatgcacgccgaggagagagaggagatgagcaagagcagacaccacgagggcggcaccccctacgccgagtacggcggctggtacaaggcctgcaaggtgagcagccccaccgtgaacaccaccctgagaaacctgggcgccctgtacagaagacagggcaagctggaggccgccgagaccctggaggagtgcgccctgagaagcagaagacagggcaccgaccccatcagccagaccaaggtggccgagctgctgggcgagagcgacggcagaagaaccagccaggagggccccggcgacagcgtgaagttcgagggcggcgaggacgccagcgtggccgtggagtggagcggcgacggcagcggcaccctgcagagaagcggcagcctgggcaagatcagagacgtgctgagaagaagcagcgagctgctggtgagaaagctgcagggcaccgagcccagacccagcagcagcaacatgaagagagccgccagcctgaactacctgaaccagcccagcgccgcccccctgcaggtgagcagaggcctgagcgccagcaccatggacctgagcagcagcagctag

SEQ ID NO: 9391 - DNA, 3966 bp, Homo sapiens
  source 1..3966: mol_type = genomic DNA
atgcagtgcctggccgccgccctgaaggacgagaccaacatgagcggcggcggcgagcaggccgacatcctgcccgccaactacgtggtgaaggacagatggaaggtgctgaagaagatcggcggcggcggcttcggcgagatctacgaggccatggacctgctgaccagagagaacgtggccctgaaggtggagagcgcccagcagcccaagcaggtgctgaagatggaggtggccgtgctgaagaagctgcagggcaaggaccacgtgtgcagattcatcggctgcggcagaaacgagaagttcaactacgtggtgatgcagctgcagggcagaaacctggccgacctgagaagaagccagcccagaggcaccttcaccctgagcaccaccctgagactgggcaagcagatcctggagagcatcgaggccatccacagcgtgggcttcctgcacagagacatcaagcccagcaacttcgccatgggcagactgcccagcacctacagaaagtgctacatgctggacttcggcctggccagacagtacaccaacaccaccggcgacgtgagaccccccagaaacgtggccggcttcagaggcaccgtgagatacgccagcgtgaacgcccacaagaacagagagatgggcagacacgacgacctgtggagcctgttctacatgctggtggagttcgccgtgggccagctgccctggagaaagatcaaggacaaggagcaggtgggcatgatcaaggagaagtacgagcacagaatgctgctgaagcacatgcccagcgagttccacctgttcctggaccacatcgccagcctggactacttcaccaagcccgactaccagctgatcatgagcgtgttcgagaacagcatgaaggagagaggcatcgccgagaacgaggccttcgactgggagaaggccggcaccgacgccctgctgagcaccagcaccagcacccccccccagcagaacaccagacagaccgccgccatgttcggcgtggtgaacgtgacccccgtgcccggcgacctgctgagagagaacaccgaggacgtgctgcagggcgagcacctgagcgaccaggagaacgccccccccatcctgcccggcagacccagcgagggcctgggccccagcccccacctggtgccccaccccggcggccccgaggccgaggtgtgggaggagaccgacgtgaacagaaacaagctgagaatcaacatcggcaagagcccctgcgtggaggaggagcagagcagaggcatgggcgtgcccagcagccccgtgagagccccccccgacagccccaccacccccgtgagaagcctgagatacagaagagtgaacagccccgagagcgagagactgagcaccgccgacggcagagtggagctgcccgagagaagaagcagaatggacctgcccggcagccccagcagacaggcctgcagcagccagcccgcccagatgctgagcgtggacaccggccacgccgacagacaggccagcggcagaatggacgtgagcgccagcgtggagcaggaggccctgagcaacgccttcagaagcgtgcccctggccgaggaggaggacttcgacagcaaggagtgggtgatcatcgacaaggagaccgagctgaaggacttcccccccggcgccgagcccagcaccagcggcaccaccgacgaggagcccgaggagctgagacccctgcccgaggagggcgaggagagaagaagactgggcgccgagcccaccgtgagacccagaggcagaagcatgcaggccctggccgaggaggacctgcagcacctgcccccccagcccctgcccccccagctgagccagggcgacggcagaagcgagaccagccagccccccacccccggcagccccagccacagccccctgcacagcggccccagacccagaagaagagagagcgaccccaccggcccccagagacaggtgttcagcgtggccccccccttcgaggtgaacggcctgcccagagccgtgcccctgagcctgccctaccaggacttcaagagagacctgagcgactacagagagagagccagactgctgaacagagtgagaagagtgggcttcagccacatgctgctgaccaccccccaggtgcccctggcccccgtgcagccccaggccaacggcaaggaggaggaggaggaggaggaggaggacgaggaggaggaggaggaggacgaggaggaggaggaggaggaggaggaggaggaggaggaggaggaggaggaggaggaggaggaggaggaggccgccgccgccgtggccctgggcgaggtgctgggccccagaagcggcagcagcagcgagggcagcgagagaagcaccgacagaagccaggagggcgcccccagcaccctgctggccgacgaccagaaggagagcagaggcagagccagcatggccgacggcgacctggagcccgaggagggcagcaagaccctggtgctggtgagccccggcgacatgaagaagagccccgtgaccgccgagctggcccccgaccccgacctgggcaccctggccgccctgaccccccagcacgagagaccccagcccaccggcagccagctggacgtgagcgagcccggcaccctgagcagcgtgctgaagagcgagcccaagccccccggccccggcgccggcctgggcgccggcaccgtgaccaccggcgtgggcggcgtggccgtgaccagcagccccttcaccaaggtggagagaaccttcgtgcacatcgccgagaagacccacctgaacgtgatgagcagcggcggccaggccctgagaagcgaggagttcagcgccggcggcgagctgggcctggagctggccagcgacggcggcgccgtggaggagggcgccagagcccccctggagaacggcctggccctgagcggcctgaacggcgccgagatcgagggcagcgccctgagcggcgcccccagagagacccccagcgagatggccaccaacagcctgcccaacggccccgccctggccgacggccccgcccccgtgagccccctggagcccagccccgagaaggtggccaccatcagccccagaagacacgccatgcccggcagcagacccagaagcagaatccccgtgctgctgagcgaggaggacaccggcagcgagcccagcggcagcctgagcgccaaggagagatggagcaagagagccagaccccagcaggacctggccagactggtgatggagaagagacagggcagactgctgctgagactggccagcggcgccagcagcagcagcagcgaggagcagagaagagccagcgagaccctgagcggcaccggcagcgaggaggacacccccgccagcgagcccgccgccgccctgcccagaaagagcggcagagccgccgccaccagaagcagaatccccagacccatcggcctgagaatgcccatgcccgtggccgcccagcagcccgccagcagaagccacggcgccgcccccgccctggacaccgccatcaccagcagactgcagctgcagaccccccccggcagcgccaccgccgccgacctgagacccaagcagccccccggcagaggcctgggccccggcagagcccaggccggcgccagaccccccgcccccagaagccccagactgcccgccagcaccagcgccgccagaaacgccagcgccagccccagaagccagagcctgagcagaagagagagccccagccccagccaccaggccagacccggcgtgcccccccccagaggcgtgccccccgccagagcccagcccgacggcacccccagccccggcggcagcaagaagggccccagaggcaagctgcaggcccagagagccaccaccaagggcagagccggcggcgccgagggcagagccggcgccagatag

SEQ ID NO: 9392 - DNA, 1818 bp, Homo sapiens
  source 1..1818: mol_type = genomic DNA
atgagccagctgagcagcaccctgaagagatacaccgagagcgccagatacaccgacgcccactacgccaagagcggctacggcgcctacacccccagcagctacggcgccaacctggccgccagcctgctggagaaggagaagctgggcttcaagcccgtgcccaccagcagcttcctgaccagacccagaacctacggccccagcagcctgctggactacgacagaggcagacccctgctgagacccgacatcaccggcggcggcaagagagccgagagccagaccagaggcaccgagagacccctgggcagcggcctgagcggcggcagcggcttcccctacggcgtgaccaacaactgcctgagctacctgcccatcaacgcctacgaccagggcgtgaccctgacccagaagctggacagccagagcgacctggccagagacttcagcagcctgagaaccagcgacagctacagaatcgaccccagaaacctgggcagaagccccatgctggccagaaccagaaaggagctgtgcaccctgcagggcctgtaccagaccgccagctgccccgagtacctggtggactacctggagaactacggcagaaagggcagcgccagccaggtgcccagccaggccccccccagcagagtgcccgagatcatcagccccacctacagacccatcggcagatacaccctgtgggagaccggcaagggccaggcccccggccccagcagaagcagcagccccggcagagacggcatgaacagcaagagcgcccagggcctggccggcctgagaaacctgggcaacacctgcttcatgaacagcatcctgcagtgcctgagcaacaccagagagctgagagactactgcctgcagagactgtacatgagagacctgcaccacggcagcaacgcccacaccgccctggtggaggagttcgccaagctgatccagaccatctggaccagcagccccaacgacgtggtgagccccagcgagttcaagacccagatccagagatacgcccccagattcgtgggctacaaccagcaggacgcccaggagttcctgagattcctgctggacggcctgcacaacgaggtgaacagagtgaccctgagacccaagagcaaccccgagaacctggaccacctgcccgacgacgagaagggcagacagatgtggagaaagtacctggagagagaggacagcagaatcggcgacctgttcgtgggccagctgaagagcagcctgacctgcaccgactgcggctactgcagcaccgtgttcgaccccttctgggacctgagcctgcccatcgccaagagaggctaccccgaggtgaccctgatggactgcatgagactgttcaccaaggaggacgtgctggacggcgacgagaagcccacctgctgcagatgcagaggcagaaagagatgcatcaagaagttcagcatccagagattccccaagatcctggtgctgcacctgaagagattcagcgagagcagaatcagaaccagcaagctgaccaccttcgtgaacttccccctgagagacctggacctgagagagttcgccagcgagaacaccaaccacgccgtgtacaacctgtacgccgtgagcaaccacagcggcaccaccatgggcggccactacaccgcctactgcagaagccccggcaccggcgagtggcacaccttcaacgacagcagcgtgacccccatgagcagcagccaggtgagaaccagcgacgcctacctgctgttctacgagctggccagcccccccagcagaatgtag

SEQ ID NO: 9393 - DNA, 1353 bp, Homo sapiens
  source 1..1353: mol_type = genomic DNA
atggtgcccctggtggccgtggtgagcggccccagagcccagctgttcgcctgcctgctgagactgggcacccagcaggtgggccccctgcagctgcacaccggcgccagccacgccgccagaaaccactacgaggtgctggtgctgggcggcggcagcggcggcatcaccatggccgccagaatgaagagaaaggtgggcgccgagaacgtggccatcgtggagcccagcgagagacacttctaccagcccatctggaccctggtgggcgccggcgccaagcagctgagcagcagcggcagacccaccgccagcgtgatccccagcggcgtggagtggatcaaggccagagtgaccgagctgaaccccgacaagaactgcatccacaccgacgacgacgagaagatcagctacagatacctgatcatcgccctgggcatccagctggactacgagaagatcaagggcctgcccgagggcttcgcccaccccaagatcggcagcaactacagcgtgaagaccgtggagaagacctggaaggccctgcaggacttcaaggagggcaacgccatcttcaccttccccaacacccccgtgaagtgcgccggcgccccccagaagatcatgtacctgagcgaggcctacttcagaaagaccggcaagagaagcaaggccaacatcatcttcaacaccagcctgggcgccatcttcggcgtgaagaagtacgccgacgccctgcaggagatcatccaggagagaaacctgaccgtgaactacaagaagaacctgatcgaggtgagagccgacaagcaggaggccgtgttcgagaacctggacaagcccggcgagacccaggtgatcagctacgagatgctgcacgtgaccccccccatgagcccccccgacgtgctgaagaccagccccgtggccgacgccgccggctgggtggacgtggacaaggagaccctgcagcacagaagataccccaacgtgttcggcatcggcgactgcaccaacctgcccaccagcaagaccgccgccgccgtggccgcccagagcggcatcctggacagaaccatcagcgtgatcatgaagaaccagacccccaccaagaagtacgacggctacaccagctgccccctggtgaccggctacaacagagtgatcctggccgagttcgactacaaggccgagcccctggagaccttccccttcgaccagagcaaggagagactgagcatgtacctgatgaaggccgacctgatgcccttcctgtactggaacatgatgctgagaggctactggggcggccccgccttcctgagaaagctgttccacctgggcatgagctag

SEQ ID NO: 9394 - DNA, 5244 bp, Homo sapiens
  source 1..5244: mol_type = genomic DNA
atggacggcgtgagcagcgaggccaacgaggagaacgacaacatcgagagacccgtgagaagaagacacagcagcatcctgaagccccccagaagccccctgcaggacctgagaggcggcaacgagagagtgcaggagagcaacgccctgagaaacaagaagaacagcagaagagtgagcttcgccgacaccatcaaggtgttccagaccgagagccacatgaagatcgtgagaaagagcgagatggaggagaccgagaccggcgagaacctgctgctgatccagaacaagaagctggaggacaactactgcgagatcaccggcatgaacaccctgctgagcgcccccatccacacccagatgcagcagaaggagttcagcatcatcgagcacaccagagagagaaagcacgccaacgaccagaccgtgatcttcagcgacgagaaccagatggacctgaccagcagccacaccgtgatgatcaccaagggcctgctggacaaccccatcagcgagaagagcaccaagatcgacaccaccagcttcctggccaacctgaagctgcacaccgaggacagcagaatgaagaaggaggtgaacttcagcgtggaccagaacaccagcagcgagaacaagatcgacttcaacgacttcatcaagagactgaagaccggcaagtgcagcgccttccccgacgtgcccgacaaggagaacttcgagatccccatctacagcaaggagcccaacagcgccagcagcacccaccagatgcacgtgagcctgaaggaggacgagaacaacagcaacatcaccagactgttcagagagaaggacgacggcatgaacttcacccagtgccacaccgccaacatccagaccctgatccccaccagcagcgagaccaacagcagagagagcaagggcaacgacatcaccatctacggcaacgacttcatggacctgaccttcaaccacaccctgcagatcctgcccgccaccggcaacttcagcgagatcgagaaccagacccagaacgccatggacgtgaccaccggctacggcaccaaggccagcggcaacaagaccgtgttcaagagcaagcagaacaccgccttccaggacctgagcatcaacagcgccgacaagatccacatcaccagaagccacatcatgggcgccgagacccacatcgtgagccagacctgcaaccaggacgccagaatcctggccatgacccccgagagcatctacagcaaccccagcatccagggctgcaagaccgtgttctacagcagctgcaacgacgccatggagatgaccaagtgcctgagcaacatgagagaggagaagaacctgctgaagcacgacagcaactacgccaagatgtactgcaaccccgacgccatgagcagcctgaccgagaagaccatctacagcggcgaggagaacatggacatcaccaagagccacaccgtggccatcgacaaccagatcttcaagcaggaccagagcaacgtgcagatcgccgccgcccccacccccgagaaggagatgatgctgcagaacctgatgaccaccagcgaggacggcaagatgaacgtgaactgcaacagcgtgccccacgtgagcaaggagagaatccagcagagcctgagcaaccccctgagcatcagcctgaccgacagaaagaccgagctgctgagcggcgagaacatggacctgaccgagagccacaccagcaacctgggcagccaggtgcccctggccgcctacaacctggcccccgagagcaccagcgagagccacagccagagcaagagcagcagcgacgagtgcgaggagatcaccaagagcagaaacgagcccttccagagaagcgacatcatcgccaagaacagcctgaccgacacctggaacaaggacaaggactgggtgctgaagatcctgccctacctggacaaggacagcccccagagcgccgactgcaaccaggagatcgccaccagccacaacatcgtgtactgcggcggcgtgctggacaagcagatcaccaacagaaacaccgtgagctgggagcagagcctgttcagcaccaccaagcccctgttcagcagcggccagttcagcatgaagaaccacgacaccgccatcagcagccacaccgtgaagagcgtgctgggccagaacagcaagctggccgagcccctgagaaagagcctgagcaaccccacccccgactactgccacgacaagatgatcatctgcagcgaggaggagcagaacatggacctgaccaagagccacaccgtggtgatcggcttcggccccagcgagctgcaggagctgggcaagaccaacctggagcacaccaccggccagctgaccaccatgaacagacagatcgccgtgaaggtggagaagtgcggcaagagccccatcgagaagagcggcgtgctgaagagcaactgcatcatggacgtgctggaggacgagagcgtgcagaagcccaagttccccaaggagaagcagaacgtgaagatctggggcagaaagagcgtgggcggccccaagatcgacaagaccatcgtgttcagcgaggacgacaagaacgacatggacatcaccaagagctacaccatcgagatcaaccacagacccctgctggagaagagagactgccacctggtgcccctggccggcaccagcgagaccatcctgtacacctgcagacaggacgacatggagatcaccagaagccacaccaccgccctggagtgcaagaccgtgagccccgacgagatcaccaccagacccatggacaagaccgtggtgttcgtggacaaccacgtggagctggagatgaccgagagccacaccgtgttcatcgactaccaggagaaggagagaaccgacagacccaacttcgagctgagccagagaaagagcctgggcacccccaccgtgatctgcacccccaccgaggagagcgtgttcttccccggcaacggcgagagcgacagactggtggccaacgacagccagctgacccccctggaggagtggagcaacaacagaggccccgtggaggtggccgacaacatggagctgagcaagagcgccacctgcaagaacatcaaggacgtgcagagccccggcttcctgaacgagcccctgagcagcaagagccagagaagaaagagcctgaagctgaagaacgacaagaccatcgtgttcagcgagaaccacaagaacgacatggacatcacccagagctgcatggtggagatcgacaacgagagcgccctggaggacaaggaggacttccacctggccggcgccagcaagaccatcctgtacagctgcggccaggacgacatggagatcaccagaagccacaccaccgccctggagtgcaagaccctgctgcccaacgagatcgccatcagacccatggacaagaccgtgctgttcaccgacaactacagcgacctggaggtgaccgacagccacaccgtgttcatcgactgccaggccaccgagaagatcctggaggagaaccccaagttcggcatcggcaagggcaagaacctgggcgtgagcttccccaaggacaacagctgcgtgcaggagatcgccgagaagcaggccctggccgtgggcaacaagatcgtgctgcacaccgagcagaagcagcagctgttcgccgccaccaacagaaccaccaacgagatcatcaagttccacagcgccgccatggacgagaaggtgatcggcaaggtggtggaccaggcctgcaccctggagaaggcccaggtggagagctgccagctgaacaacagagacagaagaaacgtggacttcaccagcagccacgccaccgccgtgtgcggcagcagcgacaactacagctgcctgcccaacgtgatcagctgcaccgacaacctggagggcagcgccatgctgctgtgcgacaaggacgaggagaaggccaactactgccccgtgcagaacgacctggcctacgccaacgacttcgccagcgagtactacctggagagcgagggccagcccctgagcgccccctgccccctgctggagaaggaggaggtgatccagaccagcaccaagggccagctggactgcgtgatcaccctgcacaaggaccaggacctgatcaaggaccccagaaacctgctggccaaccagaccctggtgtacagccaggacctgggcgagatgaccaagctgaacagcaagagagtgagcttcaagctgcccaaggaccagatgaaggtgtacgtggacgacatctacgtgatcccccagccccacttcagcaccgaccagccccccctgcccaagaagggccagagcagcatcaacaaggaggaggtgatcctgagcaaggccggcaacaagagcctgaacatcatcgagaacagcagcgcccccatctgcgagaacaagcccaagatcctgaacagcgaggagtggttcgccgccgcctgcaagaaggagctgaaggagaacatccagaccaccaactacaacaccgccctggacttccacagcaacagcgacgtgaccaagcaggtgatccagacccacgtgaacgccggcgaggcccccgaccccgtgatcaccagcaacgtgccctgcttccacagcatcaagcccaacctgaacaacctgaacggcaagaccggcgagttcctggccttccagaccgtgcacctgccccccctgcccgagcagctgctggagctgggcaacaaggcccacaacgacatgcacatcgtgcaggccaccgagatccacaacatcaacatcatcagcagcaacgccaaggacagcagagacgaggagaacaagaagagccacaacggcgccgagaccaccagcctgccccccaagaccgtgttcaaggacaaggtgagaagatgcagcctgggcatcttcctgcccagactgcccaacaagagaaactgcagcgtgaccggcatcgacgacctggagcagatccccgccgacaccaccgacatcaaccacctggagacccagcccgtgagcagcaaggacagcggcatcggcagcgtggccggcaagctgaacctgagccccagccagtacatcaacgaggagaacctgcccgtgtaccccgacgagatcaacagcagcgacagcatcaacatcgagaccgagcccaagaagaacgtgggcaccagaagaagaagatacagctag

SEQ ID NO: 9395 - DNA, 2061 bp, Homo sapiens
  source 1..2061: mol_type = genomic DNA
atgatccccggcaagtacagaagcgtgagcggcagagccgccaacaacgtgaactgcggcctgcacctggtgatccagaccagcagcctgcccgagaagaacaaggtggagttcaagctgaacaaggacaccagcagcttccccggcagactgctgcagcacgacctggagagaaactacagcagcagacagggcgaccacatcaacctggtgagcagcagcctgagcagcttccccatcctgcagagaagcagcgaggagaagatcctgtacagcgacagactgagcctggagagacagaagctgaccgtgtgccccatcatcaacggcgaggaccacctgagactgctgaacttccagcacaacttcatcaccagaatccagaacatcagcaacctgcagaagctgatcagcctggacctgtacgacaaccagatcgaggagatcagcggcctgagcaccctgagatgcctgagagtgctgctgctgggcaagaacagaatcaagaagatcagcaacctggagaacctgaagagcctggacgtgctggacctgcacggcaaccagatcaccaagatcgagaacatcaaccacctgtgcgagctgagagtgctgaacctggccagaaacttcctgagccacgtggacaacctgaacggcctggacagcctgaccgagctgaacctgagacacaaccagatcaccttcgtgagagacgtggacaacctgccctgcctgcagcacctgttcctgagcttcaacaacatcagcagcttcgacagcgtgagctgcctggccgacagcagcagcctgagcgacatcaccttcgacggcaaccccatcgcccaggagagctggtacaagcacaccgtgctgcagaacatgatgcagctgagacagctggacatgaagagaatcaccgaggaggagagaagaatggccagcgtgctggccaagaaggaggaggagaagaagagagagagccacaagcagagcctgctgaaggagaagaagagactgaccatcaacaacgtggccagacagtgggacctgcagcagcagagagtggccaacatcgccaccaacgaggacagaaaggacagcgacagcccccaggacccctgccagatcgacggcagcaccctgagcgccttccccgaggagaccggccccctggacagcggcctgaacaacgccctgcagggcctgagcgtgatcgacacctacctggtggaggtggacggcgacaccctgagcctgtacggcagcggcgccctggagagcctggacagaaactggagcgtgcagaccgccggcatgatcaccaccgtgagcttcaccttcatcgagttcgacgagatcgtgcaggtgctgcccaagctgaagatcaagttccccaacagcctgcacctgaagttcaaggagaccaacctggtgatgctgcagcagttcaacgccctggcccagctgagaagaatcgaccagctgaccatcgacccccagggcaaccccgtggtgaacttcaccctgtggaagtactacgtgctgttcagactgagccacttcagcatgcagaagatcaacggcaccgaggtgacccagaacgacatgatcatggccgagagactgttcggcatcctggcccacgtggccagcagcgagctgccccagtacagactgatcagcatcctgggcgacgccagaaagaagcagttcagatacctgctggagagcaagggcaagaagcccggcatcatcaacgaggagaacaacgacagcaagagactggtgggcgagaacaccaacagagccaccctgaactacaccaccagagacttctacaacgagaagctggaggagatcaaggagaagaagaagttctgcaagacctacatcgaggacctggtgaaggaggccaccgagatcaacatgaagaacgaggccctgcagaagctgtggccccagatgttcatcgagctggtgagagacgccgtgatcgagatcagaaacaagaacagctacatgaagctgtgcctgcagcagatcaccgaccagaagtag

SEQ ID NO: 9396 - DNA, 255 bp, Homo sapiens
  source 1..255: mol_type = genomic DNA
atgccctacctgctgatcagcacccagatcagaatggaggtgggccccaccatggtgggcgacgagcagagcgaccccgagctgatgcagcacctgggcgccagcaagagaagagccctgggcaacaacttctacgagtactacgtggacgacccccccagaatcgtgctggacaagctggagagaagaggcttcagagtgctgagcatgaccggcgtgggccagaccctggtgtggtgcctgcacaaggagtag

SEQ ID NO: 9397 - DNA, 2664 bp, Homo sapiens
  source 1..2664: mol_type = genomic DNA
atgcccagcctgccccaggagggcgtgatccagggccccagccccctggacctgaacaccgagctgccctaccagagcaccatgaagagaaaggtgagaaagaagaagaagaagggcaccatcaccgccaacgtggccggcaccaagttcgagatcgtgagactggtgatcgacgagatgggcttcatgaagacccccgacgaggacgagaccagcaacctgatctggtgcgacagcgccgtgcagcaggagaagatcagcgagctgcagaactaccagagaatcaaccacttccccggcatgggcgagatctgcagaaaggacttcctggccagaaacatgaccaagatgatcaagagcagacccctggactacaccttcgtgcccagaacctggatcttccccgccgagtacacccagttccagaactacgtgaaggagctgaagaagaagagaaagcagaagaccttcatcgtgaagcccgccaacggcgccatgggccacggcatcagcctgatcagaaacggcgacaagctgcccagccaggaccacctgatcgtgcaggagtacatcgagaagcccttcctgatggagggctacaagttcgacctgagaatctacatcctggtgaccagctgcgaccccctgaagatcttcctgtaccacgacggcctggtgagaatgggcaccgagaagtacatcccccccaacgagagcaacctgacccagctgtacatgcacctgaccaactacagcgtgaacaagcacaacgagcacttcgagagagacgagaccgagaacaagggcagcaagagaagcatcaagtggttcaccgagttcctgcaggccaaccagcacgacgtggccaagttctggagcgacatcagcgagctggtggtgaagaccctgatcgtggccgagccccacgtgctgcacgcctacagaatgtgcagacccggccagccccccggcagcgagagcgtgtgcttcgaggtgctgggcttcgacatcctgctggacagaaagctgaagccctggctgctggagatcaacagagcccccagcttcggcaccgaccagaagatcgactacgacgtgaagagaggcgtgctgctgaacgccctgaagctgctgaacatcagaaccagcgacaagagaagaaacctggccaagcagaaggccgaggcccagagaagactgtacggccagaacagcatcaagagactgctgcccggcagcagcgactgggagcagcagagacaccagctggagagaagaaaggaggagctgaaggagagactggcccaggtgagaaagcagatcagcagagaggagcacgagaacagacacatgggcaactacagaagaatctacccccccgaggacaaggccctgctggagaagtacgagaacctgctggccgtggccttccagaccttcctgagcggcagagccgccagcttccagagagagctgaacaaccccctgaagagaatgaaggaggaggacatcctggacctgctggagcagtgcgagatcgacgacgagaagctgatgggcaagaccaccaagaccagaggccccaagcccctgtgcagcatgcccgagagcaccgagatcatgaagagacccaagtactgcagcagcgacagcagctacgacagcagcagcagcagcagcgagagcgacgagaacgagaaggaggagtaccagaacaagaagagagagaagcaggtgacctacaacctgaagcccagcaaccactacaagctgatccagcagcccagcagcatcagaagaagcgtgagctgccccagaagcatcagcgcccagagccccagcagcggcgacaccagacccttcagcgcccagcagatgatcagcgtgagcagacccaccagcgccagcagaagccacagcctgaacagagccagcagctacatgagacacctgccccacagcaacgacgcctgcagcaccaacagccaggtgagcgagagcctgagacagctgaagaccaaggagcaggaggacgacctgaccagccagaccctgttcgtgctgaaggacatgaagatcagattccccggcaagagcgacgccgagagcgagctgctgatcgaggacatcatcgacaactggaagtaccacaagaccaaggtggccagctactggctgatcaagctggacagcgtgaagcagagaaaggtgctggacatcgtgaagaccagcatcagaaccgtgctgcccagaatctggaaggtgcccgacgtggaggaggtgaacctgtacagaatcttcaacagagtgttcaacagactgctgtggagcagaggccagggcctgtggaactgcttctgcgacagcggcagcagctgggagagcatcttcaacaagagccccgaggtggtgacccccctgcagctgcagtgctgccagagactggtggagctgtgcaagcagtgcctgctggtggtgtacaagtacgccaccgacaagagaggcagcctgagcggcatcggccccgactggggcaacagcagatacctgctgcccggcagcacccagttcttcctgagaacccccacctacaacctgaagtacaacagccccggcatgaccagaagcaacgtgctgttcaccagcagatacggccacctgtag

SEQ ID NO: 9398 - DNA, 1140 bp, Homo sapiens
  source 1..1140: mol_type = genomic DNA
atggccggccccagagtggaggtggacggcagcatcatggagggcggcggccagatcctgagagtgagcaccgccctgagctgcctgctgggcctgcccctgagagtgcagaagatcagagccggcagaagcacccccggcctgagcagcggcggctggaagagcaagatcaaggtgctgaccagaccccagcacctgagcggcctggagatgatcagagacctgtgcgacggccagctggagggcgccgagatcggcagcaccgagatcaccttcacccccgagaagatcaagggcggcatccacaccgccgacaccaagaccgccggcagcgtgtgcctgctgatgcaggtgagcatgccctgcgtgctgttcgccgccagccccagcgagctgcacctgaagggcggcaccaacgccgagatggccccccagatcgactacaccgtgatggtgttcaagcccatcgtggagaagttcggcttcatcttcaactgcgacatcaagaccagaggctactaccccaagggcggcggcgaggtgatcgtgagaatgagccccgtgaagcagctgaaccccatcaacctgaccgagagaggctgcgtgaccaagatctacggcagagccttcgtggccggcgtgctgcccttcaaggtggccaaggacatggccgccgccgccgtgagatgcatcagaaaggagatcagagacctgtacgtgaacatccagcccgtgcaggagcccaaggaccaggccttcggcaacggcaacggcatcatcatcatcgccgagaccagcaccggctgcctgttcgccggcagcagcctgggcaagagaggcgtgaacgccgacaaggtgggcatcgaggccgccgagatgctgctggccaacctgagacacggcggcaccgtggacgagtacctgcaggaccagctgatcgtgttcatggccctggccaacggcgtgagcagaatcaagaccggccccgtgaccctgcacacccagaccgccatccacttcgccgagcagatcgccaaggccaagttcatcgtgaagaagagcgaggacgaggaggacgccgccaaggacacctacatcatcgagtgccagggcatcggcatgaccaaccccaacctgtag

SEQ ID NO: 9399 - DNA, 1056 bp, Homo sapiens
  source 1..1056: mol_type = genomic DNA
atgcccagcgagaccctgtgggagatcgccaaggccgaggtggagaagagaggcatcaacggcagcgagggcgacggcgccgagatcgccgagaagttcgtgttcttcatcggcagcaagaacggcggcaagaccaccatcatcctgagatgcctggacagagacgagccccccaagcccaccctggccctggagtacacctacggcagaagagccaagggccacaacacccccaaggacatcgcccacttctgggagctgggcggcggcaccagcctgctggacctgatcagcatccccatcaccggcgacaccctgagaaccttcagcctggtgctggtgctggacctgagcaagcccaacgacctgtggcccaccatggagaacctgctgcaggccaccaagagccacgtggacaaggtgatcatgaagctgggcaagaccaacgccaaggccgtgagcgagatgagacagaagatctggaacaacatgcccaaggaccaccccgaccacgagctgatcgaccccttccccgtgcccctggtgatcatcggcagcaagtacgacgtgttccaggacttcgagagcgagaagagaaaggtgatctgcaagaccctgagattcgtggcccactactacggcgccagcctgatgttcaccagcaagagcgaggccctgctgctgaagatcagaggcgtgatcaaccagctggccttcggcatcgacaagagcaagagcatctgcgtggaccagaacaagcccctgttcatcaccgccggcctggacagcttcggccagatcggcagcccccccgtgcccgagaacgacatcggcaagctgcacgcccacagccccatggagctgtggaagaaggtgtacgagaagctgttcccccccaagagcatcaacaccctgaaggacatcaaggaccccgccagagacccccagtacgccgagaacgaggtggacgagatgagaatccagaaggacctggagctggagcagtacaagagaagcagcagcaagagctggaagcagatcgagctggacagctag

SEQ ID NO: 9400 - DNA, 798 bp, Homo sapiens
  source 1..798: mol_type = genomic DNA
atgtgcaccagcgagaccttccaggccctggacaccttcgaggccagacacgacgacatcgtgctggccagctaccccaagtgcggcagcaactggatcctgcacatcgtgagcgagctgatctacgccgtgagcaagaagaagtacaagtaccccgagttccccgtgctggagtgcggcgacagcgagaagtaccagagaatgaagggcttccccagccccagaatcctggccacccacctgcactacgacaagctgcccggcagcatcttcgagaacaaggccaagatcctggtgatcttcagaaaccccaaggacaccgccgtgagcttcctgcacttccacaacgacgtgcccgacatccccagctacggcagctgggacgagttcttcagacagttcatgaagggccaggtgagctggggcagatacttcgacttcgccatcaactggaacaagcacctggacggcgacaacgtgaagttcatcctgtacgaggacctgaaggagaacctggccgccggcatcaagcagatcgccgagttcctgggcttcttcctgaccggcgagcagatccagaccatcagcgtgcagagcaccttccaggccatgagagccaagagccaggacacccacggcgccgtgggccccttcctgttcagaaagggcgaggtgggcgactggaagaacctgttcagcgagatccagaaccaggagatggacgagaagttcaaggagtgcctggccggcaccagcctgggcgccaagctgaagtacgagagctactgccagggctag

SEQ ID NO: 9401 - DNA, 5343 bp, Homo sapiens
  source 1..5343: mol_type = genomic DNA
atggagagcaacttcaaccaggagggcgtgcccagacccagctacgtgttcagcgccgaccccatcgccagacccagcgagatcaacttcgacggcatcaagctggacctgagccacgagttcagcctggtggcccccaacaccgaggccaacagcttcgagagcaaggactacctgcaggtgtgcctgagaatcagacccttcacccagagcgagaaggagctggagagcgagggctgcgtgcacatcctggacagccagaccgtggtgctgaaggagccccagtgcatcctgggcagactgagcgagaagagcagcggccagatggcccagaagttcagcttcagcaaggtgttcggccccgccaccacccagaaggagttcttccagggctgcatcatgcagcccgtgaaggacctgctgaagggccagagcagactgatcttcacctacggcctgaccaacagcggcaagacctacaccttccagggcaccgaggagaacatcggcatcctgcccagaaccctgaacgtgctgttcgacagcctgcaggagagactgtacaccaagatgaacctgaagccccacagaagcagagagtacctgagactgagcagcgagcaggagaaggaggagatcgccagcaagagcgccctgctgagacagatcaaggaggtgaccgtgcacaacgacagcgacgacaccctgtacggcagcctgaccaacagcctgaacatcagcgagttcgaggagagcatcaaggactacgagcaggccaacctgaacatggccaacagcatcaagttcagcgtgtgggtgagcttcttcgagatctacaacgagtacatctacgacctgttcgtgcccgtgagcagcaagttccagaagagaaagatgctgagactgagccaggacgtgaagggctacagcttcatcaaggacctgcagtggatccaggtgagcgacagcaaggaggcctacagactgctgaagctgggcatcaagcaccagagcgtggccttcaccaagctgaacaacgccagcagcagaagccacagcatcttcaccgtgaagatcctgcagatcgaggacagcgagatgagcagagtgatcagagtgagcgagctgagcctgtgcgacctggccggcagcgagagaaccatgaagacccagaacgagggcgagagactgagagagaccggcaacatcaacaccagcctgctgaccctgggcaagtgcatcaacgtgctgaagaacagcgagaagagcaagttccagcagcacgtgcccttcagagagagcaagctgacccactacttccagagcttcttcaacggcaagggcaagatctgcatgatcgtgaacatcagccagtgctacctggcctacgacgagaccctgaacgtgctgaagttcagcgccatcgcccagaaggtgtgcgtgcccgacaccctgaacagcagccaggagaagctgttcggccccgtgaagagcagccaggacgtgagcctggacagcaacagcaacagcaagatcctgaacgtgaagagagccaccatcagctgggagaacagcctggaggacctgatggaggacgaggacctggtggaggagctggagaacgccgaggagacccagaacgtggagaccaagctgctggacgaggacctggacaagaccctggaggagaacaaggccttcatcagccacgaggagaagagaaagctgctggacctgatcgaggacctgaagaagaagctgatcaacgagaagaaggagaagctgaccctggagttcaagatcagagaggaggtgacccaggagttcacccagtactgggcccagagagaggccgacttcaaggagaccctgctgcaggagagagagatcctggaggagaacgccgagagaagactggccatcttcaaggacctggtgggcaagtgcgacaccagagaggaggccgccaaggacatctgcgccaccaaggtggagaccgaggaggccaccgcctgcctggagctgaagttcaaccagatcaaggccgagctggccaagaccaagggcgagctgatcaagaccaaggaggagctgaagaagagagagaacgagagcgacagcctgatccaggagctggagaccagcaacaagaagatcatcacccagaaccagagaatcaaggagctgatcaacatcatcgaccagaaggaggacaccatcaacgagttccagaacctgaagagccacatggagaacaccttcaagtgcaacgacaaggccgacaccagcagcctgatcatcaacaacaagctgatctgcaacgagaccgtggaggtgcccaaggacagcaagagcaagatctgcagcgagagaaagagagtgaacgagaacgagctgcagcaggacgagccccccgccaagaagggcagcatccacgtgagcagcgccatcaccgaggaccagaagaagagcgaggaggtgagacccaacatcgccgagatcgaggacatcagagtgctgcaggagaacaacgagggcctgagagccttcctgctgaccatcgagaacgagctgaagaacgagaaggaggagaaggccgagctgaacaagcagatcgtgcacttccagcaggagctgagcctgagcgagaagaagaacctgaccctgagcaaggaggtgcagcagatccagagcaactacgacatcgccatcgccgagctgcacgtgcagaagagcaagaaccaggagcaggaggagaagatcatgaagctgagcaacgagatcgagaccgccaccagaagcatcaccaacaacgtgagccagatcaagctgatgcacaccaagatcgacgagctgagaaccctggacagcgtgagccagatcagcaacatcgacctgctgaacctgagagacctgagcaacggcagcgaggaggacaacctgcccaacacccagctggacctgctgggcaacgactacctggtgagcaagcaggtgaaggagtacagaatccaggagcccaacagagagaacagcttccacagcagcatcgaggccatctgggaggagtgcaaggagatcgtgaaggccagcagcaagaagagccaccagatcgaggagctggagcagcagatcgagaagctgcaggccgaggtgaagggctacaaggacgagaacaacagactgaaggagaaggagcacaagaaccaggacgacctgctgaaggagaaggagaccctgatccagcagctgaaggaggagctgcaggagaagaacgtgaccctggacgtgcagatccagcacgtggtggagggcaagagagccctgagcgagctgacccagggcgtgacctgctacaaggccaagatcaaggagctggagaccatcctggagacccagaaggtggagtgcagccacagcgccaagctggagcaggacatcctggagaaggagagcatcatcctgaagctggagagaaacctgaaggagttccaggagcacctgcaggacagcgtgaagaacaccaaggacctgaacgtgaaggagctgaagctgaaggaggagatcacccagctgaccaacaacctgcaggacatgaagcacctgctgcagctgaaggaggaggaggaggagaccaacagacaggagaccgagaagctgaaggaggagctgagcgccagcagcgccagaacccagaacctgaaggccgacctgcagagaaaggaggaggactacgccgacctgaaggagaagctgaccgacgccaagaagcagatcaagcaggtgcagaaggaggtgagcgtgatgagagacgaggacaagctgctgagaatcaagatcaacgagctggagaagaagaagaaccagtgcagccaggagctggacatgaagcagagaaccatccagcagctgaaggagcagctgaacaaccagaaggtggaggaggccatccagcagtacgagagagcctgcaaggacctgaacgtgaaggagaagatcatcgaggacatgagaatgaccctggaggagcaggagcagacccaggtggagcaggaccaggtgctggaggccaagctggaggaggtggagagactggccaccgagctggagaagtggaaggagaagtgcaacgacctggagaccaagaacaaccagagaagcaacaaggagcacgagaacaacaccgacgtgctgggcaagctgaccaacctgcaggacgagctgcaggagagcgagcagaagtacaacgccgacagaaagaagtggctggaggagaagatgatgctgatcacccaggccaaggaggccgagaacatcagaaacaaggagatgaagaagtacgccgaggacagagagagattcttcaagcagcagaacgagatggagatcctgaccgcccagctgaccgagaaggacagcgacctgcagaagtggagagaggagagagaccagctggtggccgccctggagatccagctgaaggccctgatcagcagcaacgtgcagaaggacaacgagatcgagcagctgaagagaatcatcagcgagaccagcaagatcgagacccagatcatggacatcaagcccaagagaatcagcagcgccgaccccgacaagctgcagaccgagcccctgagcaccagcttcgagatcagcagaaacaagatcgaggacggcagcgtggtgctggacagctgcgaggtgagcaccgagaacgaccagagcaccagattccccaagcccgagctggagatccagttcacccccctgcagcccaacaagatggccgtgaagcaccccggctgcaccacccccgtgaccgtgaagatccccaaggccagaaagagaaagagcaacgagatggaggaggacctggtgaagtgcgagaacaagaagaacgccacccccagaaccaacctgaagttccccatcagcgacgacagaaacagcagcgtgaagaaggagcagaaggtggccatcagacccagcagcaagaagacctacagcctgagaagccaggccagcatcatcggcgtgaacctggccaccaagaagaaggagggcaccctgcagaagttcggcgacttcctgcagcacagccccagcatcctgcagagcaaggccaagaagatcatcgagaccatgagcagcagcaagctgagcaacgtggaggccagcaaggagaacgtgagccagcccaagagagccaagagaaagctgtacaccagcgagatcagcagccccatcgacatcagcggccaggtgatcctgatggaccagaagatgaaggagagcgaccaccagatcatcaagagaagactgagaaccaagaccgccaagtag

SEQ ID NO: 9402 - DNA, 1371 bp, Homo sapiens
  source 1..1371: mol_type = genomic DNA
atgaacagcagcgacgaggagaagcagctgcagctgatcaccagcctgaaggagcaggccatcggcgagtacgaggacctgagagccgagaaccagaagaccaaggagaagtgcgacaagatcagacaggagagagacgaggccgtgaagaagctggaggagttccagaagatcagccacatggtgatcgaggaggtgaacttcatgcagaaccacctggagatcgagaagacctgcagagagagcgccgaggccctggccaccaagctgaacaaggagaacaagaccctgaagagaatcagcatgctgtacatggccaagctgggccccgacgtgatcaccgaggagatcaacatcgacgacgaggacagcaccaccgacaccgacggcgccgccgagacctgcgtgagcgtgcagtgccagaagcagatcaaggagctgagagaccagatcgtgagcgtgcaggaggagaagaagatcctggccatcgagctggagaacctgaagagcaagctggtggaggtgatcgaggaggtgaacaaggtgaagcaggagaagaccgtgctgaacagcgaggtgctggagcagagaaaggtgctggagaagtgcaacagagtgagcatgctggccgtggaggagtacgaggagatgcaggtgaacctggagctggagaaggacctgagaaagaaggccgagagcttcgcccaggagatgttcatcgagcagaacaagctgaagagacagagccacctgctgctgcagagcagcatccccgaccagcagctgctgaaggccctggacgagaacgccaagctgacccagcagctggaggaggagagaatccagcaccagcagaaggtgaaggagctggaggagcagctggagaacgagaccctgcacaaggagatccacaacctgaagcagcagctggagctgctggaggaggacaagaaggagctggagctgaagtaccagaacagcgaggagaaggccagaaacctgaagcacagcgtggacgagctgcagaagagagtgaaccagagcgagaacagcgtgcccccccccccccccccccccccccccctgcccccccccccccccaaccccatcagaagcctgatgagcatgatcagaaagagaagccaccccagcggcagcggcgccaagaaggagaaggccacccagcccgagaccaccgaggaggtgaccgacctgaagagacaggccgtggaggagatgatggacagaatcaagaagggcgtgcacctgagacccgtgaaccagaccgccagacccaagaccaagcccgagagcagcaagggctgcgagagcgccgtggacgagctgaagggcatcctggccagccagtag

SEQ ID NO: 9403 - DNA, 630 bp, Homo sapiens
  source 1..630: mol_type = genomic DNA
atgaagaaggtgagactgaaggagctggagagcagactgcagcaggtggacggcttcgagaagcccaagctgctgctggagcagtaccccaccagaccccacatcgccgcctgcatgctgtacaccatccacaacacctacgacgacatcgagaacaaggtggtggccgacctgggctgcggctgcggcgtgctgagcatcggcaccgccatgctgggcgccggcctgtgcgtgggcttcgacatcgacgaggacgccctggagatcttcaacagaaacgccgaggagttcgagctgaccaacatcgacatggtgcagtgcgacgtgtgcctgctgagcaacagaatgagcaagagcttcgacaccgtgatcatgaacccccccttcggcaccaagaacaacaagggcaccgacatggccttcctgaagaccgccctggagatggccagaaccgccgtgtacagcctgcacaagagcagcaccagagagcacgtgcagaagaaggccgccgagtggaagatcaagatcgacatcatcgccgagctgagatacgacctgcccgccagctacaagttccacaagaagaagagcgtggacatcgaggtggacctgatcagattcagcttctag

SEQ ID NO: 9404 - DNA, 4719 bp, Homo sapiens
  source 1..4719: mol_type = genomic DNA
atggccagcagcgccagagagcacctgctgttcgtgagaagaagaaacccccagatgagatacaccctgagccccgagaacctgcagagcctggccgcccagagcagcatgcccgagaacatgaccctgcagagagccaacagcgacaccgacctggtgaccagcgagagcagaagcagcctgaccgccagcatgtacgagtacaccctgggccaggcccagaacctgatcatcttctgggacatcaaggaggaggtggaccccagcgactggatcggcctgtaccacatcgacgagaacagccccgccaacttctgggacagcaagaacagaggcgtgaccggcacccagaagggccagatcgtgtggagaatcgagcccggcccctacttcatggagcccgagatcaagatctgcttcaagtactaccacggcatcagcggcgccctgagagccaccaccccctgcatcaccgtgaagaaccccgccgtgatgatgggcgccgagggcatggagggcggcgccagcggcaacctgcacagcagaaagctggtgagcttcaccctgagcgacctgagagccgtgggcctgaagaagggcatgttcttcaaccccgacccctacctgaagatgagcatccagcccggcaagaagagcagcttccccacctgcgcccaccacggccaggagagaagaagcaccatcatcagcaacaccaccaaccccatctggcacagagagaagtacagcttcttcgccctgctgaccgacgtgctggagatcgagatcaaggacaagttcgccaagagcagacccatcatcaagagattcctgggcaagctgaccatccccgtgcagagactgctggagagacaggccatcggcgaccagatgctgagctacaacctgggcagaagactgcccgccgaccacgtgagcggctacctgcagttcaaggtggaggtgaccagcagcgtgcacgaggacgccagccccgaggccgtgggcaccatcctgggcgtgaacagcgtgaacggcgacctgggcagccccagcgacgacgaggacatgcccggcagccaccacgacagccaggtgtgcagcaacggccccgtgagcgaggacagcgccgccgacggcacccccaagcacagcttcagaaccagcagcaccctggagatcgacaccgaggagctgaccagcaccagcagcagaaccagcccccccagaggcagacaggacagcctgaacgactacctggacgccatcgagcacaacggccacagcagacccggcaccgccacctgcagcgagagaagcatgggcgccagccccaagctgagaagcagcttccccaccgacaccagactgaacgccatgctgcacatcgacagcgacgaggaggaccacgagttccagcaggacctgggctaccccagcagcctggaggaggagggcggcctgatcatgttcagcagagccagcagagccgacgacggcagcctgaccagccagaccaagctggaggacaaccccgtggagaacgaggaggccagcacccacgaggccgccagcttcgaggacaagcccgagaacctgcccgagctggccgagagcagcctgcccgccggccccgcccccgaggagggcgagggcggccccgagccccagcccagcgccgaccagggcagcgccgagctgtgcggcagccaggaggtggaccagcccaccagcggcgccgacaccggcaccagcgacgccagcggcggcagcagaagagccgtgagcgagaccgagagcctggaccagggcagcgagcccagccaggtgagcagcgagaccgagcccagcgaccccgccagaaccgagagcgtgagcgaggccagcaccagacccgagggcgagagcgacctggagtgcgccgacagcagctgcaacgagagcgtgaccacccagctgagcagcgtggacaccagatgcagcagcctggagagcgccagattccccgagacccccgccttcagcagccaggaggaggaggacggcgcctgcgccgccgagcccaccagcagcggccccgccgagggcagccaggagagcgtgtgcaccgccggcagcctgcccgtggtgcaggtgcccagcggcgaggacgagggccccggcgccgagagcgccaccgtgcccgaccaggaggagctgggcgaggtgtggcagagaagaggcagcctggagggcgccgccgccgccgccgagagccccccccaggaggagggcagcgccggcgaggcccagggcacctgcgagggcgccaccgcccaggaggagggcgccaccggcggcagccaggccaacggccaccagcccctgagaagcctgcccagcgtgagacaggacgtgagcagataccagagagtggacgaggccctgccccccaactgggaggccagaatcgacagccacggcagaatcttctacgtggaccacgtgaacagaaccaccacctggcagagacccaccgccccccccgccccccaggtgctgcagagaagcaacagcatccagcagatggagcagctgaacagaagataccagagcatcagaagaaccatgaccaacgagagacccgaggagaacaccaacgccatcgacggcgccggcgaggaggccgacttccaccaggccagcgccgacttcagaagagagaacatcctgccccacagcaccagcagaagcagaatcaccctgctgctgcagagcccccccgtgaagttcctgatcagccccgagttcttcaccgtgctgcacagcaaccccagcgcctacagaatgttcaccaacaacacctgcctgaagcacatgatcaccaaggtgagaagagacacccaccacttcgagagataccagcacaacagagacctggtgggcttcctgaacatgttcgccaacaagcagctggagctgcccagaggctgggagatgaagcacgaccaccagggcaaggccttcttcgtggaccacaacagcagaaccaccaccttcatcgaccccagactgcccctgcagagcagcagacccaccagcgccctggtgcacagacagcacctgaccagacagagaagccacagcgccggcgaggtgggcgaggacagcagacacgccggcccccccgtgctgcccagacccagcagcaccttcaacaccgtgagcagaccccagtaccaggacatggtgcccgtggcctacaacgacaagatcgtggccttcctgagacagcccaacatcttcgagatcctgcaggagagacagcccgacctgaccagaaaccacagcctgagagagaagatccagttcatcagaaccgagggcacccccggcctggtgagactgagcagcgacgccgacctggtgatgctgctgagcctgttcgaggaggagatcatgagctacgtgcccccccacgccctgctgcaccccagctactgccagagccccagaggcagccccgtgagcagcccccagaacagccccggcacccagagagccaacgccagagcccccgccccctacaagagagacttcgaggccaagctgagaaacttctacagaaagctggagaccaagggctacggccagggccccggcaagctgaagctgatcatcagaagagaccacctgctggaggacgccttcaaccagatcatgggctacagcagaaaggacctgcagagaaacaagctgtacgtgaccttcgtgggcgaggagggcctggactacagcggccccagcagagagttcttcttcctggtgagcagagagctgttcaacccctactacggcctgttcgagtacagcgccaacgacacctacaccgtgcagatcagccccatgagcgccttcgtggacaaccaccacgagtggttcagattcagcggcagaatcctgggcctggccctgatccaccagtacctgctggacgccttcttcaccagacccttctacaaggccctgctgagaatcctgtgcgacctgagcgacctggagtacctggacgaggagttccaccagagcctgcagtggatgaaggacaacgacatccacgacatcctggacctgaccttcaccgtgaacgaggaggtgttcggccagatcaccgagagagagctgaagcccggcggcgccaacatccccgtgaccgagaagaacaagaaggagtacatcgagagaatggtgaagtggagaatcgagagaggcgtggtgcagcagaccgagagcctggtgagaggcttctacgaggtggtggacgccagactggtgagcgtgttcgacgccagagagctggagctggtgatcgccggcaccgccgagatcgacctgagcgactggagaaacaacaccgagtacagaggcggctaccacgacaaccacatcgtgatcagatggttctgggccgccgtggagagattcaacaacgagcagagactgagactgctgcagttcgtgaccggcaccagcagcatcccctacgagggcttcgccagcctgagaggcagcaacggccccagaagattctgcgtggagaagtggggcaagatcaccgccctgcccagagcccacacctgcttcaacagactggacctgcccccctaccccagcttcagcatgctgtacgagaagctgctgaccgccgtggaggagaccagcaccttcggcctggagtag

SEQ ID NO: 9405 - DNA, 1206 bp, Homo sapiens
  source 1..1206: mol_type = genomic DNA
atgagctgcagatgctggatcagcagacaccccagctacgagggctggaacctgcagagcatcatcttccacaagcagatcagaggcgtggacctggagagcaccttcgtgaccaagttcggcaacaactgcagcctgagactgaacgagaccgtggacatccacaaggagaaggtggccagaagagagatcggcatcctgaccaccaacaagaacaccagcagaacccacaagatcatcgcccccgccaacctggagagacccgtgagatacatcagaaagcccatcgactacaccatcctggacgacatcggccacggcgtgaaggtgagcacccagaacatgaagatgggcggcctgcccagaaccaccccccccacccagaagccccccagcccccccatgagcggcaagggcaccctgggcagacacagcccctacagaaccctggagcccgtgagaccccccgtggtgcccaacgactacgtgcccagccccaccagaaacatggcccccagccagcagagccccgtgagaaccgccagcgtgaaccagagaaacagaacctacagcagcagcggcagcagcggcggcagccaccccagcagcagaagcagcagcagagagaacagcggcagcggcagcgtgggcgtgcccatcgccgtgcccacccccagcccccccagcgtgttccccggccaccccgtgcagttctacagcatgaacagacccgccagcagacacaccccccccaccatcggcggcagcctgccctacagaagaccccccagcatcaccagccagaccagcctgcagaaccagatgaacggcggccccttctacagccagaaccccgtgagcgacaccccccccccccccccccccgtggaggagcccgtgttcgacgagagccccccccccccccccccccccgaggactacgaggaggaggaggccgccgtggtggagtacagcgacccctacgccgaggaggaccccccctgggcccccagaagctacctggagaaggtggtggccatctacgactacaccaaggacaaggaggacgagctgagcttccaggagggcgccatcatctacgtgatcaagaagaacgacgacggctggtacgagggcgtgatgaacggcgtgaccggcctgttccccggcaactacgtggagagcatcatgcactacagcgagtag

SEQ ID NO: 9406 - DNA, 1428 bp, Homo sapiens
  source 1..1428: mol_type = genomic DNA
atggccgagctgcagatgctgctggaggaggagatccccggcggcagaagagccctgttcgacagctacaccaacctggagagagtggccgactactgcgagaacaactacatccagagcgccgacaagcagagagccctggaggagaccaaggcctacaccacccagagcctggccagcgtggcctacctgatcaacaccctggccaacaacgtgctgcagatgctggacatccaggccagccagctgagaagaatggagagcagcatcaaccacatcagccagaccgtggacatccacaaggagaaggtggccagaagagagatcggcatcctgaccaccaacaagaacaccagcagaacccacaagatcatcgcccccgccaacctggagagacccgtgagatacatcagaaagcccatcgactacaccatcctggacgacatcggccacggcgtgaaggtgagcacccagaacatgaagatgggcggcctgcccagaaccaccccccccacccagaagccccccagcccccccatgagcggcaagggcaccctgggcagacacagcccctacagaaccctggagcccgtgagaccccccgtggtgcccaacgactacgtgcccagccccaccagaaacatggcccccagccagcagagccccgtgagaaccgccagcgtgaaccagagaaacagaacctacagcagcagcggcagcagcggcggcagccaccccagcagcagaagcagcagcagagagaacagcggcagcggcagcgtgggcgtgcccatcgccgtgcccacccccagcccccccagcgtgttccccggccaccccgtgcagttctacagcatgaacagacccgccagcagacacaccccccccaccatcggcggcagcctgccctacagaagaccccccagcatcaccagccagaccagcctgcagaaccagatgaacggcggccccttctacagccagaaccccgtgagcctggccccccccccccccagcatcctgcaggtgaccccccagctgcccctgatgggcttcgtggccagagtgcaggagaacatcagcgacaccccccccccccccccccccgtggaggagcccgtgttcgacgagagccccccccccccccccccccccgaggactacgaggaggaggaggccgccgtggtggagtacagcgacccctacgccgaggaggaccccccctgggcccccagaagctacctggagaaggtggtggccatctacgactacaccaaggacaaggaggacgagctgagcttccaggagggcgccatcatctacgtgatcaagaagaacgacgacggctggtacgagggcgtgatgaacggcgtgaccggcctgttccccggcaactacgtggagagcatcatgcactacagcgagtag

SEQ ID NO: 9407 - DNA, 900 bp, Homo sapiens
  source 1..900: mol_type = genomic DNA
atgaagatgggcggcctgcccagaaccaccccccccacccagaagccccccagcccccccatgagcggcaagggcaccctgggcagcagcggcagcagcggcggcagccaccccagcagcagaagcagcagcagagagaacagcggcagcggcagcgtgggcgtgcccatcgccgtgcccacccccagcccccccagcgtgttccccgcccccgccggcagcgccggcaccccccccctgcccgccaccagcgccagcgcccccgcccccctggtgcccgccaccgtgcccagcagcaccgcccccgacgccgccgccggcggcgcccagaccctggccgacggcttcaccagccccaccccccccgtggtgagcagcaccccccccaccggccaccccgtgcagttctacagcatgaacagacccgccagcagacacaccccccccaccatcggcggcagcctgccctacagaagaccccccagcatcaccagccagaccagcctgcagaaccagatgaacggcggccccttctacagccagaaccccgtgagcgacaccccccccccccccccccccgtggaggagcccgtgttcgacgagagccccccccccccccccccccccgaggactacgaggaggaggaggccgccgtggtggagtacagcgacccctacgccgaggaggaccccccctgggcccccagaagctacctggagaaggtggtggccatctacgactacaccaaggacaaggaggacgagctgagcttccaggagggcgccatcatctacgtgatcaagaagaacgacgacggctggtacgagggcgtgatgaacggcgtgaccggcctgttccccggcaactacgtggagagcatcatgcactacagcgagtag

SEQ ID NO: 9408 - DNA, 1926 bp, Homo sapiens
  source 1..1926: mol_type = genomic DNA
atgggcagaagaagcaccagcagcaccaagagcggcaagttcatgaaccccaccgaccaggccagaaaggaggccagaaagagagagctgaagaagaacaagaagcagagaatgatggtgagagccgccgtgctgaagatgaaggaccccaagcagatcatcagagacatggagaagctggacgagatggagttcaaccccgtgcagcagccccagctgaacgagaaggtgctgaaggacaagagaaagaagctgagagagaccttcgagagaatcctgagactgtacgagaaggagaaccccgacatctacaaggagctgagaaagctggaggtggagtacgagcagaagagagcccagctgagccagtacttcgacgccgtgaagaacgcccagcacgtggaggtggagagcatccccctgcccgacatgccccacgcccccagcaacatcctgatccaggacatccccctgcccggcgcccagccccccagcatcctgaagaagaccagcgcctacggcccccccaccagagccgtgagcatcctgcccctgctgggccacggcgtgcccagactgccccccggcagaaagccccccggccccccccccggccccccccccccccaggtggtgcagatgtacggcagaaaggtgggcttcgccctggacctgccccccagaagaagagacgaggacatgctgtacagccccgagctggcccagagaggccacgacgacgacgtgagcagcaccagcgaggacgacggctaccccgaggacatggaccaggacaagcacgacgacagcaccgacgacagcgacaccgacaagagcgacggcgagagcgacggcgacgagttcgtgcacagagacaacggcgagagagacaacaacgaggagaagaagagcggcctgagcgtgagattcgccgacatgcccggcaagagcagaaagaagaagaagaacatgaaggagctgacccccctgcaggccatgatgctgagaatggccggccaggagatccccgaggagggcagagaggtggaggagttcagcgaggacgacgacgaggacgacagcgacgacagcgaggccgagaagcagagccagaagcagcacaaggaggagagccacagcgacggcaccagcaccgccagcagccagcagcaggcccccccccagagcgtgccccccagccagatccaggccccccccatgcccggccccccccccctgggccccccccccgccccccccctgagaccccccggcccccccaccggcctgccccccggccccccccccggcgccccccccttcctgagaccccccggcatgcccggcctgagaggccccctgcccagactgctgccccccggccccccccccggcagaccccccggccccccccccggccccccccccggcctgccccccggccccccccccagaggccccccccccagactgcccccccccgccccccccggcatccccccccccagacccggcatgatgagaccccccctggtgccccccctgggccccgccccccccggcctgttcccccccgcccccctgcccaaccccggcgtgctgagcgccccccccaacctgatccagagacccaaggccgacgacaccagcgccgccaccatcgagaagaaggccaccgccaccatcagcgccaagccccagatcaccaaccccaaggccgagatcaccagattcgtgcccaccgccctgagagtgagaagagagaacaagggcgccaccgccgccccccagagaaagagcgaggacgacagcgccgtgcccctggccaaggccgcccccaagagcggccccagcgtgcccgtgagcgtgcagaccaaggacgacgtgtacgaggccttcatgaaggagatggagggcctgctgtag

SEQ ID NO: 9409 - DNA, 4419 bp, Homo sapiens
  source 1..4419: mol_type = genomic DNA
atgaagggcagcgaggtgagcctggagaagaagaagaagatcaagatgcccgtgaagagactgagagaggtggtgagccagaaccacggcgaccacctggtgctgctgaaggacgagctgccctgcgtgccccccgccctgagcgccaacaagagactgcccgtgggcaccggcaccagcctgaacggcaccagcagaggcagcagcgacctgaccagcgccagaaactgctaccagcccctgctggagaaccccatggtgagcgagagcgacttcagcaaggacgtggccgtgcaggtgctgcccctggacaagatcgaggagaacaacaagcagaaggccaacgacatcttcatcagccagtacaccatgggccagaaggacgccctgagaaccgtgctgaagcagaaggcccagagcatgcccgtgttcaaggaggtgaaggtgcacctgctggaggacgccggcatcgagaaggacgccgtgacccaggagaccagaatcagccccagcggcatcgacagcgccaccaccgtggccgccgccaccgccgccgccatcgccaccgccgcccccctgatcaaggtgcagagcgacctggaggccaaggtgaacagcgtgaccgagctgctgagcaagctgcaggagaccgacaagcacctgcagagagtgaccgagcagcagaccagcatccagagaaagcaggagaagctgcactgccacgaccacgagaagcagatgaacgtgttcatggagcagcacatcagacacctggagaagctgcagcagcagcagatcgacatccagacccacttcatcagcgccgccctgaagaccagcagcttccagcccgtgagcatgcccagcagcagagccgtggagaagtacagcgtgaagcccgagcaccccaacctgggcagctgcaaccccagcctgtacaacaccttcgccagcaagcaggcccccctgaaggaggtggaggacaccagcttcgacaagcagaagagccccctggagacccccgcccccagaagattcgcccccgtgcccgtgagcagagacgacgagctgagcaagagagagaacctgctggaggagaaggagaacatggaggtgagctgccacagaggcaacgtgagactgctggagcagatcctgaacaacaacgacagcctgaccagaaagagcgagagcagcaacaccaccagcctgaccagaagcaagatcggctggacccccgagaagaccaacagattccccagctgcgaggagctggagaccaccaaggtgaccatgcagaagagcgacgacgtgctgcacgacctgggccagaaggagaaggagaccaacagcatggtgcagcccaaggagagcctgagcatgctgaagctgcccgacctgccccagaacagcgtgaagctgcagaccaccaacaccaccagaagcgtgctgaaggacgccgagaagatcctgagaggcgtgcagaacaacaagaaggtgctggaggagaacctggaggccatcatcagagccaaggacggcgccgccatgtacagcctgatcaacgccctgagcaccaacagagagatgagcgagaagatcagaatcagaaagaccgtggacgagtggatcaagaccatcagcgccgagatccagggcctgctgaaggccaccaccgtgatccaggacgaggactacatgctgcaggtgtacggcaagcccgtgtaccagggccacagaagcaccctgaagaagggcccctacctgagattcaacagccccagccccaagagcagaccccagagacccaaggtgatcgagagagtgaagggcaccaaggtgaagagcatcagaacccagaccgacttctacgccaccaagcccaagaagatggacagcaagatgaagcacagcgtgcccgtgctgccccacggcgaccagcagtacctgttcagccccagcagagagatgcccaccttcagcggcaccctggagggccacctgatccccatggccatcctgctgggccagacccagagcaacagcgacaccatgccccccgccggcgtgatcgtgagcaagccccaccccgtgaccgtgaccaccagcatcccccccagcagcagaaaggtggagaccggcgtgaagaagcccaacatcgccatcgtggagatgaagagcgagaagaaggaccccccccagctgaccgtgcaggtgctgcccagcgtggacatcgacagcatcagcaacagcagcgccgacgtgctgagccccctgagcagccccaaggaggccagcctgccccccgtgcagacctggatcaagacccccgagatcatgaaggtggacgaggaggaggtgaagttccccggcaccaacttcgacgagatcatcgacgtgatccaggaggaggagaagtgcgacgagatccccgacagcgagcccatcctggagttcaacagaagcgtgaaggccgacagcaccaagtacaacggcccccccttcccccccgtggccagcaccttccagcccaccgccgacatcctggacaaggtgatcgagagaaaggagaccctggagaacagcctgatccagtgggtggagcaggagatcatgagcagaatcatcagcggcctgttccccgtgcagcagcagatcgcccccagcatcagcgtgagcgtgagcgagaccagcgagcccctgaccagcgacatcgtggagggcaccagcagcggcgccctgcagctgttcgtggacgccggcgtgcccgtgaacagcaacgtgatcaagcacttcgtgaacgaggccctggccgagaccatcgccgtgatgctgggcgacagagaggccaagaagcagggccccgtggccaccggcgtgagcggcgacgccagcaccaacgagacctacctgcccgccagagtgtgcacccccctgcccaccccccagcccacccccccctgcagccccagcagccccgccaaggagtgcgtgctggtgaagacccccgacagcagcccctgcgacagcgaccacgacatggccttccccgtgaaggagatctgcgccgagaagggcgacgacatgcccgccatcatgctggtgaacacccccaccgtgacccccaccaccacccccccccccgccgccgccgtgttcacccccaccctgagcgacatcagcatcgacaagctgaaggtgagcagccccgagctgcccaagccctggggcgacggcgacctgcccctggaggaggagaaccccaacagcccccaggaggagctgcaccccagagccatcgtgatgagcgtggccaaggacgaggagcccgagagcatggacttccccgcccagccccccccccccgagcccgtgcccttcatgcccttccccgccggcaccaaggcccccagccccagccagatgcccggcagcgacagcagcaccctggagagcaccctgagcgtgaccgtgaccgagaccgagaccctggacaagcccatcagcgagggcgagatcctgttcagctgcggccagaagctggcccccaagatcctggaggacatcggcctgtacctgaccaacctgaacgacagcctgagcagcaccctgcacgacgccgtggagatggaggacgacccccccagcgagggccaggtgatcagaatgagccacaagaagttccacgccgacgccatcctgagcttcgccaagcagaaccaggagagcgccgtgagccagcaggccgtgtaccacagcgaggacctggagaacagcgtgggcgagctgagcgagggccagagaccccagctgaccgccgccgccgagaacatcctgatgggccacagcctgtacatgcagccccccgtgaccaacacccagagcctggaccagcagtgcgaccccaagcccctgagcagacagttcgacaccgtgagcggcagcatctacgaggacagctgcgccagccacggccccatgagcctgggcgagctggagctggagcccaacagcaagctggtgctgcccaccaccctgctgaccgcccaggagaacgacgtgaacctgcccgtggccgccgaggacttcagccagtaccagctgaagcagaaccaggacgtgaagcaggtggagcacaagcccagccagagctacctgagagtgagaaacaagagcgacatcgcccccagccagcagcaggtgagccccggcgacatggacagaacccagatcgagctgaacccctacctgacctgcgtgttcagcggcggcaaggccgtgcccctgagcgccagccagatgccccccgccaagatgagcgtgatgctgcccagcgtgaacctggaggactgcagccagagcctgagcctgagcaccatgcaggaggacatggagagcagcggcgccgacaccttctag

SEQ ID NO: 9410 - DNA, 1986 bp, Homo sapiens
  source 1..1986: mol_type = genomic DNA
atggagggcgccgccgcccccgtggccggcgacagacccgacctgggcctgggcgcccccggcagccccagagaggccgtggccggcgccaccgccgccctggagcccagaaagccccacggcgtgaagagacaccaccacaagcacaacctgaagcacagatacgagctgcaggagaccctgggcaagggcacctacggcaaggtgaagagagccaccgagagattcagcggcagagtggtggccatcaagagcatcagaaaggacaagatcaaggacgagcaggacatggtgcacatcagaagagagatcgagatcatgagcagcctgaaccacccccacatcatcagcatctacgaggtgttcgagaacaaggacaagatcgtgatcatcatggagtacgccagcaagggcgagctgtacgactacatcagcgagagaagaagactgagcgagagagagaccagacacttcttcagacagatcgtgagcgccgtgcactactgccacaagaacggcgtggtgcacagagacctgaagctggagaacatcctgctggacgacaactgcaacatcaagatcgccgacttcggcctgagcaacctgtaccagaaggacaagttcctgcagaccttctgcggcagccccctgtacgccagccccgagatcgtgaacggcagaccctacagaggccccgaggtggacagctgggccctgggcgtgctgctgtacaccctggtgtacggcaccatgcccttcgacggcttcgaccacaagaacctgatcagacagatcagcagcggcgagtacagagagcccacccagcccagcgacgccagaggcctgatcagatggatgctgatggtgaaccccgacagaagagccaccatcgaggacatcgccaaccactggtgggtgaactggggctacaagagcagcgtgtgcgactgcgacgccctgcacgacagcgagagccccctgctggccagaatcatcgactggcaccacagaagcaccggcctgcaggccgacaccgaggccaagatgaagggcctggccaagcccaccaccagcgaggtgatgctggagagacagagaagcctgaagaagagcaagaaggagaacgacttcgcccagagcggccaggacgccgtgcccgagagccccagcaagctgagcagcaagagacccaagggcatcctgaagaagagaagcaacagcgagcacagaagccacagcaccggcttcatcgagggcgtggtgggccccgccctgcccagcaccttcaagatggagcaggacctgtgcagaaccggcgtgctgctgcccagcagccccgaggccgaggtgcccggcaagctgagccccaagcagagcgccaccatgcccaagaagggcatcctgaagaagacccagcagagagagagcggctactacagcagccccgagagaagcgagagcagcgagctgctggacagcaacgacgtgatgggcagcagcatccccagccccagcccccccgaccccgccagagtgaccagccacagcctgagctgcagaagaaagggcatcctgaagcacagcagcaagtacagcgccggcaccatggaccccgccctggtgagccccgagatgcccaccctggagagcctgagcgagcccggcgtgcccgccgagggcctgagcagaagctacagcagacccagcagcgtgatcagcgacgacagcgtgctgagcagcgacagcttcgacctgctggacctgcaggagaacagacccgccagacagagaatcagaagctgcgtgagcgccgagaacttcctgcagatccaggacttcgagggcctgcagaacagacccagaccccagtacctgaagagatacagaaacagactggccgacagcagcttcagcctgctgaccgacatggacgacgtgacccaggtgtacaagcaggccctggagatctgcagcaagctgaactag

SEQ ID NO: 9411 - DNA, 603 bp, Homo sapiens
  source 1..603: mol_type = genomic DNA
atggccaacatcgccgtgcagagaatcaagagagagttcaaggaggtgctgaagagcgaggagaccagcaagaaccagatcaaggtggacctggtggacgagaacttcaccgagctgagaggcgagatcgccggcccccccgacaccccctacgagggcggcagataccagctggagatcaagatccccgagacctaccccttcaacccccccaaggtgagattcatcaccaagatctggcaccccaacatcagcagcgtgaccggcgccatctgcctggacatcctgaaggaccagtgggccgccgccatgaccctgagaaccgtgctgctgagcctgcaggccctgctggccgccgccgagcccgacgacccccaggacgccgtggtggccaaccagtacaagcagaaccccgagatgttcaagcagaccgccagactgtgggcccacgtgtacgccggcgcccccgtgagcagccccgagtacaccaagaagatcgagaacctgtgcgccatgggcttcgacagaaacgccgtgatcgtggccctgagcagcaagagctgggacgtggagaccgccaccgagctgctgctgagcaactag

SEQ ID NO: 9412 - DNA, 5313 bp, Homo sapiens
  source 1..5313: mol_type = genomic DNA
atgcccagaagaagaaagaacctgggcggcaaccccttcagaaagaccgccaaccccaaggaggtggtggtgagcagcgtggccagcagagaggagcccaccaccaccctgcccagcatgggcgagaccaaggtggaccaggaggagctgttcaccagcatcagcgagatcttcagcgacctggaccccgacgtggtgtacctgatgctgagcgagtgcgacttcaaggtggagaacgccatggactgcctgctggagctgagcgccaccgacaccaagatcgaggagagcagcagccagagcttcgtggccagcgagaaccaggtgggcgccgccgagagcaagatcatggagaagagacccgaggaggagagcgaggacagcaagatggacagcttcctggacatgcagctgaccgaggacctggacagcctgatccagaacgccttcgagaagctgaacagcagccccgacgaccaggtgtacagcttcctgcccagccaggacgtgaacagcttcaacgacagcagcgagttcatcaaccccgacagcagcaacatgacccccatcttcagcacccagaacatgaacctgaacggcgagaacctggagaacagcggcagcaccctgagcctgaaccccctgcccagccacagcgtgctgaacgagagcaagtgcttcatcaaggacaacaccctggccctggagagcaactaccccgaggacagcctgctgagcagcagcctgaacgtggccagcgacagcatcgccggctgcagcagcctgaaccagaagcagaaggagctgctggagagcgagtgcgtggaggcccagttcagcgaggcccccgtggacctggacgccagcgagccccaggcctgcctgaacctgcccggcctggacctgcccggcaccggcggcgaccagaagagcaccagagtgagcgacgtgttcctgcccagcgagggcttcaacttcaagccccacaagcaccccgagctgcccaccaagggcaaggacgtgagctactgccccgtgctggcccccctgcccctgctgctgcccccccccccccccccccccatgtggaaccccatgatccccgccttcgacctgttccagggcaaccacggcttcgtggcccccgtggtgaccaccgccgcccactggagaagcgtgaactacaccttcccccccagcgtgatcagccacaccagccccaccaaggtgtggagaaacaaggacggcaccagcgcctaccaggtgcaggagacccccgtgagccaggtggtgagaaagaagaccagctacgtgggcctggtgctggtgctgctgagaggcctgcccggcagcggcaagagcttcctggccagaaccctgcaggaggacaaccccagcggcgtgatcctgagcaccgacgactacttctacatcaacggccagtaccagttcgacgtgaagtacctgggcgaggcccacgagtggaaccagaacagagccaaggaggccttcgagaagaagatcagccccatcatcatcgacaacaccaacctgcaggcctgggagatgaagccctacgtggccctgagccagaagcacaagtacaaggtgctgttcagagagcccgacacctggtggaagttcaagcccaaggagctggccagaagaaacatccacggcgtgagcaaggagaagatcaccagaatgctggagcactaccagagattcgtgagcgtgcccatcatcatgagcagcagcgtgcccgagaagatcgagagaatcgagctgtgcgcctacagctgcgaggacagaagcaccagccccagagacgacgaggacatcatcagcgagaaggaggagaacatcctgagcctgagcctgaagcacctggagttcaccgaggagaagaacctggacgtgaccaaggagaccatgctgcccgagaacgtggcctacctgagcaacgccgacctgaacaagagaagaaaggagatcagcgacatgaaccccagcatccagagcgccctgatcctggagaccccccacatgtacttcagcgacagcgagagcaagctgcaggccaccgacaagagcgagaacgagcagatcgagatggtggccgtgaagggctacagcaagaccgacaccgacagcagcatggagagagtgagccccagcacctgctgcagcgagaacaaccaggaggactgcgacctggccaacagcggccccctgcagaacgagaagagcagccccggcgagatcgtggaggagagagccaccgtgaccaagaaggccttcggcaagcagaagagcaagagcaccctggagaagttccccagacacgagctgagcaacttcgtgggcgactggcccgtggacaagaccatcggccagagaaccaagagaaacagaaagaccgagaagaccagcagcgtgcagagcgacaagaagtacaactacccccagagccacaagctggtgaacagcgtgagcgtgaacaccgactgcgtgcagcagagaggcagcccccacgagagcgtggaggacggcagaaagagccagtgcgacgacgccagcgagcccctgaacagctacaagtacgacgcctacaagaacatcgacaagaacagcttcaacatcatgggcgactggcccagcagcgacagcctggcccagagagagcacagaagcagaatgcccaagaccggcctgagcgagcccaacctggagatcggcaccaacgacaagatgaacgagatcagcctgagcaccgcccacgaggcctgctggggcaccagcagccagaagctgaagaccctgggcagcagcaacctgggcagcagcgagatgctgctgagcgagatgacctgcgagagccagacctgcctgagcaagaagagccacggccagcacaccagcctgcccctgaccttcaccaacagcgcccccaccgtgagcggcgtggtggagccccagaccctggccgagtgccaggagcagatgcccaagagagaccccggcaaggaggtgggcatgtgcacccagaccgagccccaggacttcgccctgctgtggaagatcgagaagaacaagatcagcatcagcgacagcatcaaggtgctgaccggcagactggacggcttcaagcccaaggtgttcaacatcaacaccaagagcgacgtgcaggaggccatcccctacagagtgatgtacgacaagagcaccttcgtggaggagagcgagctgaccagcgccgacgagagcgagaacctgaacatcctgtgcaagctgttcggcagcttcagcctggaggccctgaaggacctgtacgagagatgcaacaaggacatcatctgggccaccagcctgctgctggacagcgagaccaagctgtgcgaggacaccgagttcgagaacttccagaagagctgcgacggcagccagatcggccccttcagcctgggcctgaacctgaaggagatcatcagccagagaggcaccctggagaacagcaacagccccgtgcccgagttcagccacggcatcggcatcagcaacgccgacagccagagcacctgcgacgccgagagaggcaacagcgagcaggccgagatgagagccgtgacccccgagaaccacgagagcatgaccagcatcttccccagcgccgccgtgggcctgaagaacaacaacgacatcctgcccaacagccaggaggagctgctgtacagcagcaagcagagcttccccggcatcctgaaggccaccacccccaaggacatgagcgagaccgagaagaacctggtggtgaccgagaccggcgacaacatccacagccccagccacttcagcgacatcttcaacttcgtgagcagcaccagcaacctggagctgaacgaggagatctacttcaccgacagcctggagatcaagagaaacgagaacttccccaaggactacgtgaagttcagcgacgaggaggagttcatgaacgaggacgagaaggagatgaaggagatcctgatggccggcagcagcctgagcgccggcgtgagcggcgaggacaagaccgagatcctgaaccccacccccgccatggccaagagcctgaccatcgactgcctggagctggccctgccccccgagctggccttccagctgaacgagctgttcggccccgtgggcatcgacagcggcagcctgaccgtggaggactgcgtggtgcacatcgacctgaacctggccaaggtgatccacgagaagtggaaggagagcgtgatggagagacagagacaggaggaggtgagctgcggcaagttcatgcaggaccccagcctggtgggccacaccggcctggacaaccccgagcagaagagcagccagagaaccggcaagaagctgctgaagaccctgaccgccagcgagatgctgcccctgctggaccactggaacacccagaccaagaaggtgagcctgagagagatcatgagcgaggagatcgccctgcaggagaagcacaacctgaagagagagaccctgatgttcgagaaggactgcgccaccaagctgaaggagaagcagctgttcaagatcttccccgccatcaaccagaacttcctggtggacatcttcaaggaccacaactacagcctggagcacaccgtgcagttcctgaactgcgtgctggagggcgaccccgtgaagaccgtggtggcccaggagttcgtgcaccagaacgagaacgtgaccagccacaccggccagaagagcaaggagaagaagcccaagaagctgaaggagaccgaggagacccccagcgagctgagcttccaggacttcgagtaccccgactacgacgactacagagccgaggccttcctgcaccagcagaagagaatggagtgctacagcaaggccaaggaggcctacagaatcggcaagaagaacgtggccaccttctacgcccagcagggcaccctgcacgagcagaagatgaaggaggccaaccacctggccgccatcgagatcttcgagaaggtgaacgccagcctgctgccccagaacgtgctggacctgcacggcctgcacgtggacgaggccctggagcacctgatgagagtgctggagaagaagaccgaggagttcaagcagaacggcggcaagccctacctgagcgtgatcaccggcagaggcaaccacagccagggcggcgtggccagaatcaagcccgccgtgatcaagtacctgatcagccacagcttcagattcagcgagatcaagcccggctgcctgaaggtgatgctgaagtag

SEQ ID NO: 9413 - DNA, 1362 bp, Homo sapiens
  source 1..1362: mol_type = genomic DNA
atggactggaaggaggtgctgagaagaagactggccacccccaacacctgccccaacaagaagaagagcgagcaggagctgaaggacgaggagatggacctgttcaccaagtactacagcgagtggaagggcggcagaaagaacaccaacgagttctacaagaccatccccagattctactacagactgcccgccgaggacgaggtgctgctgcagaagctgagagaggagagcagagccgtgttcctgcagagaaagagcagagagctgctggacaacgaggagctgcagaacctgtggttcctgctggacaagcaccagaccccccccatgatcggcgaggaggccatgatcaactacgagaacttcctgaaggtgggcgagaaggccggcgccaagtgcaagcagttcttcaccgccaaggtgttcgccaagctgctgcacaccgacagctacggcagaatcagcatcatgcagttcttcaactacgtgatgagaaaggtgtggctgcaccagaccagaatcggcctgagcctgtacgacgtggccggccagggctacctgagagagagcgacctggagaactacatcctggagctgatccccaccctgccccagctggacggcctggagaagagcttctacagcttctacgtgtgcaccgccgtgagaaagttcttcttcttcctggaccccctgagaaccggcaagatcaagatccaggacatcctggcctgcagcttcctggacgacctgctggagctgagagacgaggagctgagcaaggagagccaggagaccaactggttcagcgcccccagcgccctgagagtgtacggccagtacctgaacctggacaaggaccacaacggcatgctgagcaaggaggagctgagcagatacggcaccgccaccatgaccaacgtgttcctggacagagtgttccaggagtgcctgacctacgacggcgagatggactacaagacctacctggacttcgtgctggccctggagaacagaaaggagcccgccgccctgcagtacatcttcaagctgctggacatcgagaacaagggctacctgaacgtgttcagcctgaactacttcttcagagccatccaggagctgatgaagatccacggccaggaccccgtgagcttccaggacgtgaaggacgagatcttcgacatggtgaagcccaaggaccccctgaagatcagcctgcaggacctgatcaacagcaaccagggcgacaccgtgaccaccatcctgatcgacctgaacggcttctggacctacgagaacagagaggccctggtggccaacgacagcgagaacagcgccgacctggacgacacctag

SEQ ID NO: 9414 - DNA, 3348 bp, Homo sapiens
  source 1..3348: mol_type = genomic DNA
atgcccgaggaccaggtgggcaagctggaggccaccgagaacaccatcagcgccatggccgccgccgccgccgagcagcagcagttctacctgctgctgggcaacctgctgagccccgacaacgtggtgagaaagcaggccgaggagacctacgagaacatccccggccagagcaagatcaccttcctgctgcaggccatcagaaacaccaccgccgccgaggaggccagacagatggccgccgtgctgctgagaagactgctgagcagcgccttcgacgaggtgtaccccgccctgcccagcgacgtgcagaccgccatcaagagcgagctgctgatgatcatccagatggagacccagagcagcatgagaaagaaggtgtgcgacatcgccgccgagctggccagaaacctgatcgacgaggacggcaacaaccagtggcccgagggcctgaagttcctgttcgacagcgtgagcagccagaacgtgggcctgagagaggccgccctgcacatcttctggaacttccccggcatcttcggcaaccagcagcagcactacctggacgtgatcaagagaatgctggtgcagtgcatgcaggaccaggagcaccccagcatcagaaccctgagcgccagagccaccgccgccttcatcctggccaacgagcacaacgtggccctgttcaagcacttcgccgacctgctgcccggcttcctgcaggccgtgaacgacagctgctaccagaacgacgacagcgtgctgaagagcctggtggagatcgccgacaccgtgcccaagtacctgagaccccacctggaggccaccctgcagctgagcctgaagctgtgcggcgacaccagcctgaacaacatgcagagacagctggccctggaggtgatcgtgaccctgagcgagaccgccgccgccatgctgagaaagcacaccaacatcgtggcccagaccatcccccagatgctggccatgatggtggacctggaggaggacgaggactgggccaacgccgacgagctggaggacgacgacttcgacagcaacgccgtggccggcgagagcgccctggacagaatggcctgcggcctgggcggcaagctggtgctgcccatgatcaaggagcacatcatgcagatgctgcagaaccccgactggaagtacagacacgccggcctgatggccctgagcgccatcggcgagggctgccaccagcagatggagggcatcctgaacgagatcgtgaacttcgtgctgctgttcctgcaggacccccaccccagagtgagatacgccgcctgcaacgccgtgggccagatggccaccgacttcgcccccggcttccagaagaagttccacgagaaggtgatcgccgccctgctgcagaccatggaggaccagggcaaccagagagtgcaggcccacgccgccgccgccctgatcaacttcaccgaggactgccccaagagcctgctgatcccctacctggacaacctggtgaagcacctgcacagcatcatggtgctgaagctgcaggagctgatccagaagggcaccaagctggtgctggagcaggtggtgaccagcatcgccagcgtggccgacaccgccgaggagaagttcgtgccctactacgacctgttcatgcccagcctgaagcacatcgtggagaacgccgtgcagaaggagctgagactgctgagaggcaagaccatcgagtgcatcagcctgatcggcctggccgtgggcaaggagaagttcatgcaggacgccagcgacgtgatgcagctgctgctgaagacccagaccgacttcaacgacatggaggacgacgacccccagatcagctacatgatcagcgcctgggccagaatgtgcaagatcctgggcaaggagttccagcagtacctgcccgtggtgatgggccccctgatgaagaccgccagcatcaagcccgaggtggccctgctggacacccaggacatggagaacatgagcgacgacgacggctgggagttcgtgaacctgggcgaccagcagagcttcggcatcaagaccgccggcctggaggagaagagcaccgcctgccagatgctggtgtgctacgccaaggagctgaaggagggcttcgtggagtacaccgagcaggtggtgaagctgatggtgcccctgctgaagttctacttccacgacggcgtgagagtggccgccgccgagagcatgcccctgctgctggagtgcgccagagtgagaggccccgagtacctgacccagatgtggcacttcatgtgcgacgccctgatcaaggccatcggcaccgagcccgacagcgacgtgctgagcgagatcatgcacagcttcgccaagtgcatcgaggtgatgggcgacggctgcctgaacaacgagcacttcgaggagctgggcggcatcctgaaggccaagctggaggagcacttcaagaaccaggagctgagacaggtgaagagacaggacgaggactacgacgagcaggtggaggagagcctgcaggacgaggacgacaacgacgtgtacatcctgaccaaggtgagcgacatcctgcacagcatcttcagcagctacaaggagaaggtgctgccctggttcgagcagctgctgcccctgatcgtgaacctgatctgcccccacagaccctggcccgacagacagtggggcctgtgcatcttcgacgacgtgatcgagcactgcagccccgccagcttcaagtacgccgagtacttcctgagacccatgctgcagtacgtgtgcgacaacagccccgaggtgagacaggccgccgcctacggcctgggcgtgatggcccagtacggcggcgacaactacagacccttctgcaccgaggccctgcccctgctggtgagagtgatccagagcgccgacagcaagaccaaggagaacgtgaacgccaccgagaactgcatcagcgccgtgggcaagatcatgaagttcaagcccgactgcgtgaacgtggaggaggtgctgccccactggctgagctggctgcccctgcacgaggacaaggaggaggccgtgcagaccttcaactacctgtgcgacctgatcgagagcaaccaccccatcgtgctgggccccaacaacaccaacctgcccaagatcttcagcatcatcgccgagggcgagatgcacgaggccatcaagcacgaggacccctgcgccaagagactggccaacgtggtgagacaggtgcagaccagcggcggcctgtggaccgagtgcatcgcccagctgagccccgagcagcaggccgccatccaggagctgctgaacagcgcctag

SEQ ID NO: 9415 - DNA, 1929 bp, Homo sapiens
  source 1..1929: mol_type = genomic DNA
atgaagagaagcagcgtgagcagcggcggcgccggcagactgagcatgcaggagctgagaagccaggacgtgaacaagcagggcctgtacaccccccagaccaaggagaagcccaccttcggcaagctgagcatcaacaagcccaccagcgagagaaaggtgagcctgttcggcaagagaaccagcggccacggcagcagaaacagccagctgggcatcttcagcagcagcgagaagatcaaggaccccagacccctgaacgacaaggccttcatccagcagtgcatcagacagctgtgcgagttcctgaccgagaacggctacgcccacaacgtgagcatgaagagcctgcaggcccccagcgtgaaggacttcctgaagatcttcaccttcctgtacggcttcctgtgccccagctacgagctgcccgacaccaagttcgaggaggaggtgcccagaatcttcaaggacctgggctaccccttcgccctgagcaagagcagcatgtacaccgtgggcgccccccacacctggccccacatcgtggccgccctggtgtggctgatcgactgcatcaagatccacaccgccatgaaggagagcagccccctgttcgacgacggccagccctggggcgaggagaccgaggacggcatcatgcacaacaagctgttcctggactacaccatcaagtgctacgagagcttcatgagcggcgccgacagcttcgacgagatgaacgccgagctgcagagcaagctgaaggacctgttcaacgtggacgccttcaagctggagagcctggaggccaagaacagagccctgaacgagcagatcgccagactggagcaggagagagagaaggagcccaacagactggagagcctgagaaagctgaaggccagcctgcagggcgacgtgcagaagtaccaggcctacatgagcaacctggagagccacagcgccatcctggaccagaagctgaacggcctgaacgaggagatcgccagagtggagctggagtgcgagaccatcaagcaggagaacaccagactgcagaacatcatcgacaaccagaagtacagcgtggccgacatcgagagaatcaaccacgagagaaacgagctgcagcagaccatcaacaagctgaccaaggacctggaggccgagcagcagaagctgtggaacgaggagctgaagtacgccagaggcaaggaggccatcgagacccagctggccgagtaccacaagctggccagaaagctgaagctgatccccaagggcgccgagaacagcaagggctacgacttcgagatcaagttcaaccccgaggccggcgccaactgcctggtgaagtacagagcccaggtgtacgtgcccctgaaggagctgctgaacgagaccgaggaggagatcaacaaggccctgaacaagaagatgggcctggaggacaccctggagcagctgaacgccatgatcaccgagagcaagagaagcgtgagaaccctgaaggaggaggtgcagaagctggacgacctgtaccagcagaagatcaaggaggccgaggaggaggacgagaagtgcgccagcgagctggagagcctggagaagcacaagcacctgctggagagcaccgtgaaccagggcctgagcgaggccatgaacgagctggacgccgtgcagagagagtaccagctggtggtgcagaccaccaccgaggagagaagaaaggtgggcaacaacctgcagagactgctggagatggtggccacccacgtgggcagcgtggagaagcacctggaggagcagatcgccaaggtggacagagagtacgaggagtgcatgagcgaggacctgagcgagaacatcaaggagatcagagacaagtacgagaagaaggccaccctgatcaagagcagcgaggagtag

SEQ ID NO: 9416 - DNA, 4770 bp, Homo sapiens
  source 1..4770: mol_type = genomic DNA
atgagcctgcccttctaccagagatgccaccagcactacgacctgagctacagaaacaaggacgtgagaagcaccgtgagccactaccagagagagaagaagagaagcgccgtgtacacccagggcagcaccgcctacagcagcagaagcagcgccgcccacagaagagagagcgaggccttcagaagagccagcgccagcagcagccagcagcaggccagccagcacgccctgagcagcgaggtgagcagaaaggccgccagcgcctacgactacggcagcagccacggcctgaccgacagcagcctgctgctggacgactacagcagcaagctgagccccaagcccaagagagccaagcacagcctgctgagcggcgaggagaaggagaacctgcccagcgactacatggtgcccatcttcagcggcagacagaagcacgtgagcggcatcaccgacaccgaggaggagagaatcaaggaggccgccgcctacatcgcccagagaaacctgctggccagcgaggagggcatcaccaccagcaagcagagcaccgccagcaagcagaccaccgccagcaagcagagcaccgccagcaagcagagcaccgccagcaagcagagcaccgccagcagacagagcaccgccagcagacagagcgtggtgagcaagcaggccaccagcgccctgcagcaggaggagaccagcgagaagaagagcagaaaggtggtgatcagagagaaggccgagagactgagcctgagaaagaccctggaggagaccgagacctaccacgccaagctgaacgaggaccacctgctgcacgcccccgagttcatcatcaagcccagaagccacaccgtgtgggagaaggagaacgtgaagctgcactgcagcatcgccggctggcccgagcccagagtgacctggtacaagaaccaggtgcccatcaacgtgcacgccaaccccggcaagtacatcatcgagagcagatacggcatgcacaccctggagatcaacggctgcgacttcgaggacaccgcccagtacagagccagcgccatgaacgtgaagggcgagctgagcgcctacgccagcgtggtggtgaagagatacaagggcgagttcgacgagaccagattccacgccggcgccagcaccatgcccctgagcttcggcgtgaccccctacggctacgccagcagattcgagatccacttcgacgacaagttcgacgtgagcttcggcagagagggcgagaccatgagcctgggctgcagagtggtgatcacccccgagatcaagcacttccagcccgagatccagtggtacagaaacggcgtgcccctgagccccagcaagtgggtgcagaccctgtggagcggcgagagagccaccctgaccttcagccacctgaacaaggaggacgagggcctgtacaccatcagagtgagaatgggcgagtactacgagcagtacagcgcctacgtgttcgtgagagacgccgacgccgagatcgagggcgcccccgccgcccccctggacgtgaagtgcctggaggccaacaaggactacatcatcatcagctggaagcagcccgccgtggacggcggcagccccatcctgggctacttcatcgacaagtgcgaggtgggcaccgacagctggagccagtgcaacgacacccccgtgaagttcgccagattccccgtgaccggcctgatcgagggcagaagctacatcttcagagtgagagccgtgaacaagatgggcatcggcttccccagcagagtgagcgagcccgtggccgccctggaccccgccgagaaggccagactgaagagcagacccagcgccccctggaccggccagatcatcgtgaccgaggaggagcccagcgagggcatcgtgcccggcccccccaccgacctgagcgtgaccgaggccaccagaagctacgtggtgctgagctggaagccccccggccagagaggccacgagggcatcatgtacttcgtggagaagtgcgaggccggcaccgagaactggcagagagtgaacaccgagctgcccgtgaagagccccagattcgccctgttcgacctggccgagggcaagagctactgcttcagagtgagatgcagcaacagcgccggcgtgggcgagcccagcgaggccaccgaggtgaccgtggtgggcgacaagctggacatccccaaggcccccggcaagatcatccccagcagaaacaccgacaccagcgtggtggtgagctgggaggagagcaaggacgccaaggagctggtgggctactacatcgaggccagcgtggccggcagcggcaagtgggagccctgcaacaacaaccccgtgaagggcagcagattcacctgccacggcctggtgaccggccagagctacatcttcagagtgagagccgtgaacgccgccggcctgagcgagtacagccaggacagcgaggccatcgaggtgaaggccgccatcgccccccccagccccccctgcgacatcacctgcctggagagcttcagagacagcatggtgctgggctggaagcagcccgacaagatcggcggcgccgagatcaccggctactacgtgaactacagagaggtgatcgacggcgtgcccggcaagtggagagaggccaacgtgaaggccgtgagcgaggaggcctacaagatcagcaacctgaaggagaacatggtgtaccagttccaggtggccgccatgaacatggccggcctgggcgcccccagcgccgtgagcgagtgcttcaagtgcgaggagtggaccatcgccgtgcccggccccccccacagcctgaagtgcagcgaggtgagaaaggacagcctggtgctgcagtggaagccccccgtgcacagcggcagaacccccgtgaccggctacttcgtggacctgaaggaggccaaggccaaggaggaccagtggagaggcctgaacgaggccgccatcaagaacgtgtacctgaaggtgagaggcctgaaggagggcgtgagctacgtgttcagagtgagagccatcaaccaggccggcgtgggcaagcccagcgacctggccggccccgtggtggccgagaccagacccggcaccaaggaggtggtggtgaacgtggacgacgacggcgtgatcagcctgaacttcgagtgcgacaagatgacccccaagagcgagttcagctggagcaaggactacgtgagcaccgaggacagccccagactggaggtggagagcaagggcaacaagaccaagatgaccttcaaggacctgggcatggacgacctgggcatctacagctgcgacgtgaccgacaccgacggcatcgccagcagctacctgatcgacgaggaggagctgaagagactgctggccctgagccacgagcacaagttccccaccgtgcccgtgaagagcgagctggccgtggagatcctggagaagggccaggtgagattctggatgcaggccgagaagctgagcggcaacgccaaggtgaactacatcttcaacgagaaggagatcttcgagggccccaagtacaagatgcacatcgacagaaacaccggcatcatcgagatgttcatggagaagctgcaggacgaggacgagggcacctacaccttccagctgcaggacggcaaggccaccaaccacagcaccgtggtgctggtgggcgacgtgttcaagaagctgcagaaggaggccgagttccagagacaggagtggatcagaaagcagggcccccacttcgtggagtacctgagctgggaggtgaccggcgagtgcaacgtgctgctgaagtgcaaggtggccaacatcaagaaggagacccacatcgtgtggtacaaggacgagagagagatcagcgtggacgagaagcacgacttcaaggacggcatctgcaccctgctgatcaccgagttcagcaagaaggacgccggcatctacgaggtgatcctgaaggacgacagaggcaaggacaagagcagactgaagctggtggacgaggccttcaaggagctgatgatggaggtgtgcaagaagatcgccctgagcgccaccgacctgaagatccagagcaccgccgagggcatccagctgtacagcttcgtgacctactacgtggaggacctgaaggtgaactggagccacaacggcagcgccatcagatacagcgacagagtgaagaccggcgtgaccggcgagcagatctggctgcagatcaacgagcccacccccaacgacaagggcaagtacgtgatggagctgttcgacggcaagaccggccaccagaagaccgtggacctgagcggccaggcctacgacgaggcctacgccgagttccagagactgaagcaggccgccatcgccgagaagaacagagccagagtgctgggcggcctgcccgacgtggtgaccatccaggagggcaaggccctgaacctgacctgcaacgtgtggggcgaccccccccccgaggtgagctggctgaagaacgagaaggccctggccagcgacgaccactgcaacctgaagttcgaggccggcagaaccgcctacttcaccatcaacggcgtgagcaccgccgacagcggcaagtacggcctggtggtgaagaacaagtacggcagcgagaccagcgacttcaccgtgagcgtgttcatccccgaggaggaggccagaatggccgccctggagagcctgaagggcggcaagaaggccaagtag

SEQ ID NO: 9417 - DNA, 546 bp, Homo sapiens
  source 1..546: mol_type = genomic DNA
atgggcggcttcttcagcagcatcttcagcagcctgttcggcaccagagagatgagaatcctgatcctgggcctggacggcgccggcaagaccaccatcctgtacagactgcaggtgggcgaggtggtgaccaccatccccaccatcggcttcaacgtggagaccgtgacctacaagaacctgaagttccaggtgtgggacctgggcggccagaccagcatcagaccctactggagatgctactacagcaacaccgacgccgtgatctacgtggtggacagctgcgacagagacagaatcggcatcagcaagagcgagctggtggccatgctggaggaggaggagctgagaaaggccatcctggtggtgttcgccaacaagcaggacatggagcaggccatgaccagcagcgagatggccaacagcctgggcctgcccgccctgaaggacagaaagtggcagatcttcaagaccagcgccaccaagggcaccggcctggacgaggccatggagtggctggtggagaccctgaagagcagacagtag

SEQ ID NO: 9418 - DNA, 1269 bp, Homo sapiens
  source 1..1269: mol_type = genomic DNA
atggccgccgccgccgtggtggagttccagagagcccagagcctgctgagcaccgacagagaggccagcatcgacatcctgcacagcatcgtgaagagagacatccaggagaacgacgaggaggccgtgcaggtgaaggagcagagcatcctggagctgggcagcctgctggccaagaccggccaggccgccgagctgggcggcctgctgaagtacgtgagacccttcctgaacagcatcagcaaggccaaggccgccagactggtgagaagcctgctggacctgttcctggacatggaggccgccaccggccaggaggtggagctgtgcctggagtgcatcgagtgggccaagagcgagaagagaaccttcctgagacaggccctggaggccagactggtgagcctgtacttcgacaccaagagataccaggaggccctgcacctgggcagccagctgctgagagagctgaagaagatggacgacaaggccctgctggtggaggtgcagctgctggagagcaagacctaccacgccctgagcaacctgcccaaggccagagccgccctgaccagcgccagaaccaccgccaacgccatctactgcccccccaagctgcaggccaccctggacatgcagagcggcatcatccacgccgccgaggagaaggactggaagaccgcctacagctacttctacgaggccttcgagggctacgacagcatcgacagccccaaggccatcaccagcctgaagtacatgctgctgtgcaagatcatgctgaacacccccgaggacgtgcaggccctggtgagcggcaagctggccctgagatacgccggcagacagaccgaggccctgaagtgcgtggcccaggccagcaagaacagaagcctggccgacttcgagaaggccctgaccgactacagagccgagctgagagacgaccccatcatcagcacccacctggccaagctgtacgacaacctgctggagcagaacctgatcagagtgatcgagcccttcagcagagtgcagatcgagcacatcagcagcctgatcaagctgagcaaggccgacgtggagagaaagctgagccagatgatcctggacaagaagttccacggcatcctggaccagggcgagggcgtgctgatcatcttcgacgagccccccgtggacaagacctacgaggccgccctggagaccatccagaacatgagcaaggtggtggacagcctgtacaacaaggccaagaagctgacctag

SEQ ID NO: 9419 - DNA, 1449 bp, Homo sapiens
  source 1..1449: mol_type = genomic DNA
atggccagcctgggccccgccgccgccggcgagcaggccagcggcgccgaggccgagcccggccccgccggccccccccccccccccagccccagcagcctgggccccctgctgcccctgcagagagagcccctgtacaactggcaggccaccaaggccagcctgaaggagagattcgccttcctgttcaacagcgagctgctgagcgacgtgagattcgtgctgggcaagggcagaggcgccgccgccgccggcggcccccagagaatccccgcccacagattcgtgctggccgccggcagcgccgtgttcgacgccatgttcaacggcggcatggccaccaccagcgccgagatcgagctgcccgacgtggagcccgccgccttcctggccctgctgagattcctgtacagcgacgaggtgcagatcggccccgagaccgtgatgaccaccctgtacaccgccaagaagtacgccgtgcccgccctggaggcccactgcgtggagttcctgaccaagcacctgagagccgacaacgccttcatgctgctgacccaggccagactgttcgacgagccccagctggccagcctgtgcctggacaccatcgacaagagcaccatggacgccatcagcgccgagggcttcaccgacatcgacatcgacaccctgtgcgccgtgctggagagagacaccctgagcatcagagagagcagactgttcggcgccgtggtgagatgggccgaggccgagtgccagagacagcagctgcccgtgaccttcggcaacaagcagaaggtgctgggcaaggccctgagcctgatcagattccccctgatgaccatcgaggagttcgccgccggccccgcccagagcggcatcctgagcgacagagaggtggtgaacctgttcctgcacttcaccgtgaaccccaagcccagagtggagtacatcgacagacccagatgctgcctgagaggcaaggagtgctgcatcaacagattccagcaggtggagagcagatggggctacagcggcaccagcgacagaatcagattcaccgtgaacagaagaatcagcatcgtgggcttcggcctgtacggcagcatccacggccccaccgactaccaggtgaacatccagatcatcgagtacgagaagaagcagaccctgggccagaacgacaccggcttcagctgcgacggcaccgccaacaccttcagagtgatgttcaaggagcccatcgagatcctgcccaacgtgtgctacaccgcctgcgccaccctgaagggccccgacagccactacggcaccaagggcctgaagaaggtggtgcacgagacccccgccgccagcaagaccgtgttcttcttcttcagcagccccggcaacaacaacggcaccagcatcgaggacggccagatccccgagatcatcttctacacctag

SEQ ID NO: 9420 - DNA, 2883 bp, Homo sapiens
  source 1..2883: mol_type = genomic DNA
atgagcagactgatcgtgaagaacctgcccaacggcatgaaggaggagagattcagacagctgttcgccgccttcggcaccctgaccgactgcagcctgaagttcaccaaggacggcaagttcagaaagttcggcttcatcggcttcaagagcgaggaggaggcccagaaggcccagaagcacttcaacaagagcttcatcgacaccagcagaatcaccgtggagttctgcaagagcttcggcgaccccgccaagcccagagcctggagcaagcacgcccagaagcccagccagcccaagcagccccccaaggacagcaccacccccgagatcaagaaggacgagaagaagaagaaggtggccggccagctggagaagctgaaggaggacaccgagttccaggagttcctgagcgtgcaccagagaagagcccaggccgccacctgggccaacgacggcctggacgccgagcccagcaagggcaagagcaagcccgccagcgactacctgaacttcgacagcgacagcggccaggagagcgaggaggagggcgccggcgaggacctggaggaggaggccagcctggagcccaaggccgccgtgcagaaggagctgagcgacatggactacctgaagagcaagatggtgaaggccggcagcagcagcagcagcgaggaggaggagagcgaggacgaggccgtgcactgcgacgagggcagcgaggccgaggaggaggacagcagcgccacccccgtgctgcaggagagagacagcaagggcgccggccaggagcagggcatgcccgccggcaagaagagaccccccgaggccagagccgagaccgagaagcccgccaaccagaaggagcccaccacctgccacaccgtgaagctgagaggcgcccccttcaacgtgaccgagaagaacgtgatggagttcctggcccccctgaagcccgtggccatcagaatcgtgagaaacgcccacggcaacaagaccggctacatcttcgtggacttcagcaacgaggaggaggtgaagcaggccctgaagtgcaacagagagtacatgggcggcagatacatcgaggtgttcagagagaagaacgtgcccaccaccaagggcgcccccaagaacaccaccaagagctggcagggcagaatcctgggcgagaacgaggaggaggaggacctggccgagagcggcagactgttcgtgagaaacctgccctacaccagcaccgaggaggacctggagaagctgttcagcaagtacggccccctgagcgagctgcactaccccatcgacagcctgaccaagaagcccaagggcttcgccttcatcaccttcatgttccccgagcacgccgtgaaggcctacagcgaggtggacggccaggtgttccagggcagaatgctgcacgtgctgcccagcaccatcaagaaggaggccagcgaggacgccagcgccctgggcagcagcagctacaagaagaagaaggaggcccaggacaaggccaacagcgccagcagccacaactggaacaccctgttcatgggccccaacgccgtggccgacgccatcgcccagaagtacaacgccaccaagagccaggtgttcgaccacgagaccaagggcagcgtggccgtgagagtggccctgggcgagacccagctggtgcaggaggtgagaagattcctgatcgacaacggcgtgagcctggacagcttcagccaggccgccgccgagagaagcaagaccgtgatcctggtgaagaacctgcccgccggcaccctggccgcccagctgcaggagaccttcggccacttcggcagcctgggcagagtgctgctgcccgagggcggcatcaccgccatcgtggagttcctggagcccctggaggccagaaaggccttcagacacctggcctacagcaagttccaccacgtgcccctgtacctggagtgggcccccgtgggcgtgttcagcagcaccgccccccagaagaagaagctgcaggacacccccagcgagcccatggagaaggaccccgccgagcccgagaccgtgcccgacggcgagacccccgaggacgagaaccccaccgaggagggcgccgacaacagcagcgccaagatggaggaggaggaggaggaggaggaggaggaggaggagagcctgcccggctgcaccctgttcatcaagaacctgaacttcgacaccaccgaggagaagctgaaggaggtgttcagcaaggtgggcaccgtgaagagctgcagcatcagcaagaagaagaacaaggccggcgtgctgctgagcatgggcttcggcttcgtggagtacagaaagcccgagcaggcccagaaggccctgaagcagctgcagggccacgtggtggacggccacaagctggaggtgagaatcagcgagagagccaccaagcccgccgtgaccctggccagaaagaagcaggtgcccagaaagcagaccaccagcaagatcctggtgagaaacatccccttccaggcccacagcagagagatcagagagctgttcagcaccttcggcgagctgaagaccgtgagactgcccaagaagatgaccggcaccggcacccacagaggcttcggcttcgtggacttcctgaccaagcaggacgccaagagagccttcaacgccctgtgccacagcacccacctgtacggcagaagactggtgctggagtgggccgacagcgaggtgaccctgcaggccctgagaagaaagaccgccgcccacttccacgagccccccaagaagaagagaagcgtggtgctggacgagatcctggagcagctggagggcagcgacagcgacagcgaggagcagaccctgcagctgtag

SEQ ID NO: 9421 - DNA, 2919 bp, Homo sapiens
  source 1..2919: mol_type = genomic DNA
atggccaccagaggccacgtgcaggaccccaacgacagaagactgagacccatctacgactacctggacaacggcaacaacaagatggccatccagcaggccgacaagctgctgaagaagcacaaggacctgcactgcgccaaggtgctgaaggccatcggcctgcagagaaccggcaagcaggaggaggccttcaccctggcccaggaggtggccgccctggagcccaccgacgacaacagcctgcaggccctgaccatcctgtacagagagatgcacagacccgagctggtgaccaagctgtacgaggccgccgtgaagaaggtgcccaacagcgaggagtaccacagccacctgttcatggcctacgccagagtgggcgagtacaagaagatgcagcaggccggcatggccctgtacaagatcgtgcccaagaacccctactacttctggagcgtgatgagcctgatcatgcagagcatcagcgcccaggacgagaacctgagcaagaccatgttcctgcccctggccgagagaatggtggagaagatggtgaaggaggacaagatcgaggccgaggccgaggtggagctgtactacatgatcctggagagactgggcaagtaccaggaggccctggacgtgatcagaggcaagctgggcgagaagctgaccagcgagatccagagcagagagaacaagtgcatggccatgtacaagaagctgagcagatggcccgagtgcaacgccctgagcagaagactgctgctgaagaacagcgacgactggcagttctacctgacctacttcgacagcgtgttcagactgatcgaggaggcctggagcccccccgccgagggcgagcacagcctggagggcgaggtgcactacagcgccgagaaggccgtgaagttcatcgaggacagaatcaccgaggagagcaagagcagcagacacctgagaggcccccacctggccaagctggagctgatcagaagactgagaagccagggctgcaacgacgagtacaagctgggcgaccccgaggagctgatgttccagtacttcaagaagttcggcgacaagccctgctgcttcaccgacctgaaggtgttcgtggacctgctgcccgccacccagtgcaccaagttcatcaaccagctgctgggcgtggtgcccctgagcacccccaccgaggacaagctggccctgcccgccgacatcagagccctgcagcagcacctgtgcgtggtgcagctgaccagactgctgggcctgtaccacaccatggacaagaaccagaagctgagcgtggtgagagagctgatgctgagataccagcacggcctggagttcggcaagacctgcctgaagaccgagctgcagttcagcgactactactgcctgctggccgtgcacgccctgatcgacgtgtggagagagaccggcgacgagaccaccgtgtggcaggccctgaccctgctggaggagggcctgacccacagccccagcaacgcccagttcaagctgctgctggtgagaatctactgcatgctgggcgccttcgagcccgtggtggacctgtacagcagcctggacgccaagcacatccagcacgacaccatcggctacctgctgaccagatacgccgagagcctgggccagtacgccgccgccagccagagctgcaacttcgccctgagattcttccacagcaaccagaaggacaccagcgagtacatcatccaggcctacaagtacggcgccttcgagaagatccccgagttcatcgccttcagaaacagactgaacaacagcctgcacttcgcccaggtgagaaccgagagaatgctgctggacctgctgctggaggccaacatcagcaccagcctggccgagagcatcaagagcatgaacctgagacccgaggaggacgacatcccctgggaggacctgagagacaacagagacctgaacgtgttcttcagctgggaccccaaggacagagacgtgagcgaggagcacaagaagctgagcctggaggaggagaccctgtggctgagaatcagaagcctgaccctgagactgatcagcggcctgcccagcctgaaccaccccgtggagcccaagaacagcgagaagaccgccgagaacggcgtgagcagcagaatcgacatcctgagactgctgctgcagcagctggaggccaccctggagaccggcaagagattcatcgagaaggacatccagtaccccttcctgggccccgtgcccaccagaatgggcggcttcttcaacagcggctgcagccagtgccagatcagcagcttctacctggtgaacgacatctacgagctggacaccagcggcctggaggacaccatggagatccaggagagaatcgagaacagcttcaagagcctgctggaccagctgaaggacgtgttcagcaagtgcaagggcgacctgctggaggtgaaggacggcaacctgaagacccaccccaccctgctggagaacctggtgttcttcgtggagaccatcagcgtgatcctgtgggtgagcagctactgcgagagcgtgctgagaccctacaagctgaacctgcagaagaagaagaagaagaagaaggagaccagcatcatcatgccccccgtgttcaccagcttccaggactacgtgaccggcctgcagaccctgatcagcaacgtggtggaccacatcaagggcctggagacccacctgatcgccctgaagctggaggagctgatcctggaggacaccagcctgagccccgaggagagaaagttcagcaagaccgtgcagggcaaggtgcagagcagctacctgcacagcctgctggagatgggcgagctgctgaagaagagactggagaccaccaagaagctgaagatctag

SEQ ID NO: 9422 - DNA, 2166 bp, Homo sapiens
  source 1..2166: mol_type = genomic DNA
atggccgagaagttcgagagcctgatgaacatccacggcttcgacctgggcagcagatacatggacctgaagcccctgggctgcggcggcaacggcctggtgttcagcgccgtggacaacgactgcgacaagagagtggccatcaagaagatcgtgctgaccgacccccagagcgtgaagcacgccctgagagagatcaagatcatcagaagactggaccacgacaacatcgtgaaggtgttcgagatcctgggccccagcggcagccagctgaccgacgacgtgggcagcctgaccgagctgaacagcgtgtacatcgtgcaggagtacatggagaccgacctggccaacgtgctggagcagggccccctgctggaggagcacgccagactgttcatgtaccagctgctgagaggcctgaagtacatccacagcgccaacgtgctgcacagagacctgaagcccgccaacctgttcatcaacaccgaggacctggtgctgaagatcggcgacttcggcctggccagaatcatggacccccactacagccacaagggccacctgagcgagggcctggtgaccaagtggtacagaagccccagactgctgctgagccccaacaactacaccaaggccatcgacatgtgggccgccggctgcatcttcgccgagatgctgaccggcaagaccctgttcgccggcgcccacgagctggagcagatgcagctgatcctggagagcatccccgtggtgcacgaggaggacagacaggagctgctgagcgtgatccccgtgtacatcagaaacgacatgaccgagccccacaagcccctgacccagctgctgcccggcatcagcagagaggccctggacttcctggagcagatcctgaccttcagccccatggacagactgaccgccgaggaggccctgagccacccctacatgagcatctacagcttccccatggacgagcccatcagcagccaccccttccacatcgaggacgaggtggacgacatcctgctgatggacgagacccacagccacatctacaactgggagagataccacgactgccagttcagcgagcacgactggcccgtgcacaacaacttcgacatcgacgaggtgcagctggaccccagagccctgagcgacgtgaccgacgaggaggaggtgcaggtggaccccagaaagtacctggacggcgacagagagaagtacctggaggaccccgccttcgacaccaactacagcaccgagccctgctggcagtacagcgaccaccacgagaacaagtactgcgacctggagtgcagccacacctgcaactacaagaccagaagcagcagctacctggacaacctggtgtggagagagagcgaggtgaaccactactacgagcccaagctgatcatcgacctgagcaactggaaggagcagagcaaggagaagagcgacaagaagggcaagagcaagtgcgagagaaacggcctggtgaaggcccagatcgccctggaggaggccagccagcagctggccggcaaggagagagagaagaaccagggcttcgacttcgacagcttcatcgccggcaccatccagctgagcagccagcacgagcccaccgacgtggtggacaagctgaacgacctgaacagcagcgtgagccagctggagctgaagagcctgatcagcaagagcgtgagccaggagaagcaggagaagggcatggccaacctggcccagctggaggccctgtaccagagcagctgggacagccagttcgtgagcggcggcgaggactgcttcttcatcaaccagttctgcgaggtgagaaaggacgagcaggtggagaaggagaacacctacaccagctacctggacaagttcttcagcagaaaggaggacaccgagatgctggagaccgagcccgtggaggacggcaagctgggcgagagaggccacgaggagggcttcctgaacaacagcggcgagttcctgttcaacaagcagctggagagcatcggcatcccccagttccacagccccgtgggcagccccctgaagagcatccaggccaccctgacccccagcgccatgaagagcagcccccagatcccccaccagacctacagcagcatcctgaagcacctgaactag

SEQ ID NO: 9423 - DNA, 948 bp, Homo sapiens
  source 1..948: mol_type = genomic DNA
atggccgccggcgtgccctgcgccctggtgaccagctgcagcagcgtgttcagcggcgaccagctggtgcagcacatcctgggcaccgaggacctgatcgtggaggtgaccagcaacgacgccgtgagattctacccctggaccatcgacaacaagtactacagcgccgacatcaacctgtgcgtggtgcccaacaagttcctggtgaccgccgagatcgccgagagcgtgcaggccttcgtggtgtacttcgacagcacccagaagagcggcctggacagcgtgagcagctggctgcccctggccaaggcctggctgcccgaggtgatgatcctggtgtgcgacagagtgagcgaggacggcatcaacagacagaaggcccaggagtggtgcatcaagcacggcttcgagctggtggagctgagccccgaggagctgcccgaggaggacgacgacttccccgagagcaccggcgtgaagagaatcgtgcaggccctgaacgccaacgtgtggagcaacgtggtgatgaagaacgacagaaaccagggcttcagcctgctgaacagcctgaccggcaccaaccacagcatcggcagcgccgacccctgccaccccgagcagccccacctgcccgccgccgacagcaccgagagcctgagcgaccacagaggcggcgccagcaacaccaccgacgcccaggtggacagcatcgtggaccccatgctggacctggacatccaggagctggccagcctgaccaccggcggcggcgacgtggagaacttcgagagactgttcagcaagctgaaggagatgaaggacaaggccgccaccctgccccacgagcagagaaaggtgcacgccgagaaggtggccaaggccttctggatggccatcggcggcgacagagacgagatcgagggcctgagcagcgacgaggagcactag

SEQ ID NO: 9424 - DNA, 1338 bp, Homo sapiens
  source 1..1338: mol_type = genomic DNA
atggccgcccccgaggagagagacctgacccaggagcagaccgagaagctgctgcagttccaggacctgaccggcatcgagagcatggaccagtgcagacacaccctggagcagcacaactggaacatcgaggccgccgtgcaggacagactgaacgagcaggagggcgtgcccagcgtgttcaaccccccccccagcagacccctgcaggtgaacaccgccgaccacagaatctacagctacgtggtgagcagaccccagcccagaggcctgctgggctggggctactacctgatcatgctgcccttcagattcacctactacaccatcctggacatcttcagattcgccctgagattcatcagacccgaccccagaagcagagtgaccgaccccgtgggcgacatcgtgagcttcatgcacagcttcgaggagaagtacggcagagcccaccccgtgttctaccagggcacctacagccaggccctgaacgacgccaagagagagctgagattcctgctggtgtacctgcacggcgacgaccaccaggacagcgacgagttctgcagaaacaccctgtgcgcccccgaggtgatcagcctgatcaacaccagaatgctgttctgggcctgcagcaccaacaagcccgagggctacagagtgagccaggccctgagagagaacacctaccccttcctggccatgatcatgctgaaggacagaagaatgaccgtggtgggcagactggagggcctgatccagcccgacgacctgatcaaccagctgaccttcatcatggacgccaaccagacctacctggtgagcgagagactggagagagaggagagaaaccagacccaggtgctgagacagcagcaggacgaggcctacctggccagcctgagagccgaccaggagaaggagagaaagaagagagaggagagagagagaaagagaagaaaggaggaggaggtgcagcagcagaagctggccgaggagagaagaagacagaacctgcaggaggagaaggagagaaagctggagtgcctgccccccgagcccagccccgacgaccccgagagcgtgaagatcatcttcaagctgcccaacgacagcagagtggagagaagattccacttcagccagagcctgaccgtgatccacgacttcctgttcagcctgaaggagagccccgagaagttccagatcgaggccaacttccccagaagagtgctgccctgcatccccagcgaggagtggcccaacccccccaccctgcaggaggccggcctgagccacaccgaggtgctgttcgtgcaggacctgaccgacgagtag

SEQ ID NO: 9425 - DNA, 2724 bp, Homo sapiens
  source 1..2724: mol_type = genomic DNA
atggccacccccgaccagaagagccccaacgtgctgctgcagaacctgtgctgcagaatcctgggcagaagcgaggccgacgtggcccagcagttccagtacgccgtgagagtgatcggcagcaacttcgcccccaccgtggagagagacgagttcctggtggccgagaagatcaagaaggagctgatcagacagagaagagaggccgacgccgccctgttcagcgagctgcacagaaagctgcacagccagggcgtgctgaagaacaagtggagcatcctgtacctgctgctgagcctgagcgaggaccccagaagacagcccagcaaggtgagcagctacgccaccctgttcgcccaggccctgcccagagacgcccacagcaccccctactactacgccagaccccagaccctgcccctgagctaccaggacagaagcgcccagagcgcccagagcagcggcagcgtgggcagcagcggcatcagcagcatcggcctgtgcgccctgagcggccccgcccccgccccccagagcctgctgcccggccagagcaaccaggcccccggcgtgggcgactgcctgagacagcagctgggcagcagactggcctggaccctgaccgccaaccagcccagcagccaggccaccaccagcaagggcgtgcccagcgccgtgagcagaaacatgaccagaagcagaagagagggcgacaccggcggcaccatggagatcaccgaggccgccctggtgagagacatcctgtacgtgttccagggcatcgacggcaagaacatcaagatgaacaacaccgagaactgctacaaggtggagggcaaggccaacctgagcagaagcctgagagacaccgccgtgagactgagcgagctgggctggctgcacaacaagatcagaagatacaccgaccagagaagcctggacagaagcttcggcctggtgggccagagcttctgcgccgccctgcaccaggagctgagagagtactacagactgctgagcgtgctgcacagccagctgcagctggaggacgaccagggcgtgaacctgggcctggagagcagcctgaccctgagaagactgctggtgtggacctacgaccccaagatcagactgaagaccctggccgccctggtggaccactgccagggcagaaagggcggcgagctggccagcgccgtgcacgcctacaccaagaccggcgacccctacatgagaagcctggtgcagcacatcctgagcctggtgagccaccccgtgctgagcttcctgtacagatggatctacgacggcgagctggaggacacctaccacgagttcttcgtggccagcgaccccaccgtgaagaccgacagactgtggcacgacaagtacaccctgagaaagagcatgatccccagcttcatgaccatggaccagagcagaaaggtgctgctgatcggcaagagcatcaacttcctgcaccaggtgtgccacgaccagacccccaccaccaagatgatcgccgtgaccaagagcgccgagagcccccaggacgccgccgacctgttcaccgacctggagaacgccttccagggcaagatcgacgccgcctacttcgagaccagcaagtacctgctggacgtgctgaacaagaagtacagcctgctggaccacatgcaggccatgagaagatacctgctgctgggccagggcgacttcatcagacacctgatggacctgctgaagcccgagctggtgagacccgccaccaccctgtaccagcacaacctgaccggcatcctggagaccgccgtgagagccaccaacgcccagttcgacagccccgagatcctgagaagactggacgtgagactgctggaggtgagccccggcgacaccggctgggacgtgttcagcctggactaccacgtggacggccccatcgccaccgtgttcaccagagagtgcatgagccactacctgagagtgttcaacttcctgtggagagccaagagaatggagtacatcctgaccgacatcagaaagggccacatgtgcaacgccaagctgctgagaaacatgcccgagttcagcggcgtgctgcaccagtgccacatcctggccagcgagatggtgcacttcatccaccagatgcagtactacatcaccttcgaggtgctggagtgcagctgggacgagctgtggaacaaggtgcagcaggcccaggacctggaccacatcatcgccgcccacgaggtgttcctggacaccatcatcagcagatgcctgctggacagcgacagcagagccctgctgaaccagctgagagccgtgttcgaccagatcatcgagctgcagaacgcccaggacgccatctacagagccgccctggaggagctgcagagaagactgcagttcgaggagaagaagaagcagagagagatcgagggccagtggggcgtgaccgccgccgaggaggaggaggagaacaagagaatcggcgagttcaaggagagcatccccaagatgtgcagccagctgagaatcctgacccacttctaccagggcatcgtgcagcagttcctggtgctgctgaccaccagcagcgacgagagcctgagattcctgagcttcagactggacttcaacgagcactacaaggccagagagcccagactgagagtgagcctgggcaccagaggcagaagaagcagccacacctag

SEQ ID NO: 9426 - DNA, 1086 bp, Homo sapiens
  source 1..1086: mol_type = genomic DNA
atgaccggcaaggccggcgaggccctgagcaagcccaagagcgagaccgtggccaagagcaccagcggcggcgcccccgccagatgcaccggcttcggcatccaggagatcctgggcctgaacaaggagccccccagcagccaccccagagccgccctggacggcctggcccccggccacctgctggccgccagaagcgtgctgagccccgccggcgtgggcggcatgggcctgctgggccccggcggcctgcccggcttctacacccagcccaccttcctggaggtgctgagcgacccccagagcgtgcacctgcagcccctgggcagagccagcggccccctggacaccagccagaccgccagcagcgacagcgaggacgtgagcagcagcgacagaaagatgagcaagagcgccctgaaccagaccaagaagagaaagaagagaagacacagaaccatcttcaccagctaccagctggaggagctggagaaggccttcaacgaggcccactaccccgacgtgtacgccagagagatgctggccatgaagaccgagctgcccgaggacagaatccaggtgtggttccagaacagaagagccaagtggagaaagagagagaagtgctggggcagaagcagcgtgatggccgagtacggcctgtacggcgccatggtgagacacagcatccccctgcccgagagcatcctgaagagcgccaaggacggcatcatggacagctgcgccccctggctgctgggcatgcacaagaagagcctggaggccgccgccgagagcggcagaaagcccgagggcgagagacaggccctgcccaagctggacaagatggagcaggacgagagaggccccgacgcccaggccgccatcagccaggaggagctgagagagaacagcatcgccgtgctgagagccaaggcccaggagcacagcaccaaggtgctgggcaccgtgagcggccccgacagcctggccagaagcaccgagaagcccgaggaggaggaggccatggacgaggacagacccgccgagagactgagccccccccagctggaggacatggcctag

SEQ ID NO: 9427 - DNA, 2073 bp, Homo sapiens
  source 1..2073: mol_type = genomic DNA
atggaggagagccccctgagcagagcccccagcagaggcggcgtgaacttcctgaacgtggccagaacctacatccccaacaccaaggtggagtgccactacaccctgccccccggcaccatgcccagcgccagcgactggatcggcatcttcaaggtggaggccgcctgcgtgagagactaccacaccttcgtgtggagcagcgtgcccgagagcaccaccgacggcagccccatccacaccagcgtgcagttccaggccagctacctgcccaagcccggcgcccagctgtaccagttcagatacgtgaacagacagggccaggtgtgcggccagagcccccccttccagttcagagagcccagacccatggacgagctggtgaccctggaggaggccgacggcggcagcgacatcctgctggtggtgcccaaggccaccgtgctgcagaaccagctggacgagagccagcaggagagaaacgacctgatgcagctgaagctgcagctggagggccaggtgaccgagctgagaagcagagtgcaggagctggagagagccctggccaccgccagacaggagcacaccgagctgatggagcagtacaagggcatcagcagaagccacggcgagatcaccgaggagagagacatcctgagcagacagcagggcgaccacgtggccagaatcctggagctggaggacgacatccagaccatcagcgagaaggtgctgaccaaggaggtggagctggacagactgagagacaccgtgaaggccctgaccagagagcaggagaagctgctgggccagctgaaggaggtgcaggccgacaaggagcagagcgaggccgagctgcaggtggcccagcaggagaaccaccacctgaacctggacctgaaggaggccaagagctggcaggaggagcagagcgcccaggcccagagactgaaggacaaggtggcccagatgaaggacaccctgggccaggcccagcagagagtggccgagctggagcccctgaaggagcagctgagaggcgcccaggagctggccgccagcagccagcagaaggccaccctgctgggcgaggagctggccagcgccgccgccgccagagacagaaccatcgccgagctgcacagaagcagactggaggtggccgaggtgaacggcagactggccgagctgggcctgcacctgaaggaggagaagtgccagtggagcaaggagagagccggcctgctgcagagcgtggaggccgagaaggacaagatcctgaagctgagcgccgagatcctgagactggagaaggccgtgcaggaggagagaacccagaaccaggtgttcaagaccgagctggccagagagaaggacagcagcctggtgcagctgagcgagagcaagagagagctgaccgagctgagaagcgccctgagagtgctgcagaaggagaaggagcagctgcaggaggagaagcaggagctgctggagtacatgagaaagctggaggccagactggagaaggtggccgacgagaagtggaacgaggacgccaccaccgaggacgaggaggccgccgtgggcctgagctgccccgccgccctgaccgacagcgaggacgagagccccgaggacatgagactgcccccctacggcctgtgcgagagaggcgaccccggcagcagccccgccggccccagagaggccagccccctggtggtgatcagccagcccgcccccatcagcccccacctgagcggccccgccgaggacagcagcagcgacagcgccgaggacgagaagagcgtgctgatggccgccgtgcagagcggcggcgaggaggccaacctgctgctgcccgagctgggcagcgccttctacgacatggccagcggcttcaccgtgggcaccctgagcgagaccagcaccggcggccccgccacccccacctggaaggagtgccccatctgcaaggagagattccccgccgagagcgacaaggacgccctggaggaccacatggacggccacttcttcttcagcacccaggaccccttcaccttcgagtag

SEQ ID NO: 9428 - DNA, 1980 bp, Homo sapiens
  source 1..1980: mol_type = genomic DNA
atgagcctgccccccgagaaggccagcgagctgaagcagctgatccaccagcagctgagcaagatggacgtgcacggcagaatcagagagatcctggccgagaccatcagagaggagctggcccccgaccagcagcacctgagcaccgaggacctgatcaaggccctgagaagaagaggcatcatcgacgacgtgatgaaggagctgaacttcgtgaccgacagcgtggagcaggagctgcccagcagccccaagcagcccatctgcttcgacagacagagcaccctgaagaagaccaacatcgaccccaccagaagatacctgtacctgcaggtgctgggcggcaaggccttcctggagcacctgcaggagcccgagcccctgcccggccaggtgtgcagcaccttcaccctgtgcctgcactacagaaaccagagattcagaagcaagcccgtgccctgcgcctgcgagcccgacttccacgacggcttcctgctggaggtgcacagagagagcctgggcgacggcaccagaatggccgacagcaccaccatgctgagcatcagcgaccccatccacatggtgctgatcaagaccgacatcttcggcgagaccaccctggtggccagctacttcctggagtggagaagcgtgctgggcagcgagaacggcgtgaccagcctgaccgtggagctgatgggcgtgggcaccgagagcaaggtgagcgtgggcatcctgaacatcaagctggagatgtacccccccctgaaccagaccctgagccaggaggtggtgaacacccagctggccctggagagacagaagaccgccgagaaggagagactgttcctggtgtacgccaagcagtggtggagagagtacctgcagatcagacccagccacaacagcagactggtgaagatcttcgcccaggacgagaacggcatcaacagacccgtgtgcagctacgtgaagcccctgagagccggcagactgctggacacccccagacaggccgccagattcgtgaacgtgctgggctacgagagagcccccgtgatcggcggcggcggcaagcaggagcagtggtgcaccctgctggccttcctgtgcagaaacaagggcgactgcgaggaccacgccaacctgctgtgcagcctgctgctgggctacggcctggaggccttcgtgtgcgtgggcaccaaggccaagggcgtgccccacgcctgggtgatgacctgcggcaccgacggcgccatcaccttctgggagagcctgaccggccacagatacatccacaagcccaccaaccccgacgagccccccgtggccgagcagcccaagcccctgtacccctacagaaccatcggctgcgtgttcaaccaccagatgttcctgggcaactgccagcccagcgacgccgtggagacctgcgtgttcgacctgaacgacgagagcaagtggaagcccatgagcgaggaggccatcaagagcgtgtgcgcccccggcgccaccaccagcctgccccccttcccccccctgtgcgccagcaccatcgacgccagcgtgaccagcaacgagatcgagatgcagctgagactgctggtgagcgagcacagaaaggacctgggcctgaccaccgtgtgggaggaccagctgagctacctgctgagccccgccctggccagctacgagttcgagagaaccaccagcatcagcgccggcaacgaggagttccaggacgccatcagaagagccgtgcccgacggccacaccttcaagggcttccccatccacttcgtgtacagaaacgccagaagagccttcgccacctgcctgagaagccccttctgcgaggagatcatctgctgcagaggcgaccaggtgagactggccgtgagagtgagagtgttcacctaccccgagagcgcctgcgccgtgtggatcatgttcgcctgcaagtacagaagcgtgctgtag

SEQ ID NO: 9429 - DNA, 1500 bp, Homo sapiens
  source 1..1500: mol_type = genomic DNA
atgctggagagaccccccgccctggccatgcccatgcccaccgagggcacccccccccccctgagcggcacccccatccccgtgcccgcctacttcagacacgccgagcccggcttcagcctgaagagacccagaggcctgagcagaagcctgcccccccccccccccgccaagggcagcatccccatcagcagactgttcccccccagaacccccggctggcaccagctgcagcccagaagagtgagcttcagaggcgaggccagcgagaccctgcagagccccggctacgaccccagcagacccgagagcttcttccagcagagcttccagagactgagcagactgggccacggcagctacggcgaggtgttcaaggtgagaagcaaggaggacggcagactgtacgccgtgaagagaagcatgagccccttcagaggccccaaggacagagccagaaagctggccgaggtgggcagccacgagaaggtgggccagcacccctgctgcgtgagactggagcaggcctgggaggagggcggcatcctgtacctgcagaccgagctgtgcggccccagcctgcagcagcactgcgaggcctggggcgccagcctgcccgaggcccaggtgtggggctacctgagagacaccctgctggccctggcccacctgcacagccagggcctggtgcacctggacgtgaagcccgccaacatcttcctgggccccagaggcagatgcaagctgggcgacttcggcctgctggtggagctgggcaccgccggcgccggcgaggtgcaggagggcgaccccagatacatggcccccgagctgctgcagggcagctacggcaccgccgccgacgtgttcagcctgggcctgaccatcctggaggtggcctgcaacatggagctgccccacggcggcgagggctggcagcagctgagacagggctacctgccccccgagttcaccgccggcctgagcagcgagctgagaagcgtgctggtgatgatgctggagcccgaccccaagctgagagccaccgccgaggccctgctggccctgcccgtgctgagacagcccagagcctggggcgtgctgtggtgcatggccgccgaggccctgagcagaggctgggccctgtggcaggccctgctggccctgctgtgctggctgtggcacggcctggcccaccccgccagctggctgcagcccctgggcccccccgccaccccccccggcagccccccctgcagcctgctgctggacagcagcctgagcagcaactgggacgacgacagcctgggccccagcctgagccccgaggccgtgctggccagaaccgtgggcagcaccagcacccccagaagcagatgcacccccagagacgccctggacctgagcgacatcaacagcgagccccccagaggcagcttccccagcttcgagcccagaaacctgctgagcctgttcgaggacaccctggaccccacctag

SEQ ID NO: 9430 - DNA, 486 bp, Homo sapiens
  source 1..486: mol_type = genomic DNA
atggacgtgttcctgatgatcagaagacacaagaccaccatcttcaccgacgccaaggagagcagcaccgtgttcgagctgaagagaatcgtggagggcatcctgaagagaccccccgacgagcagagactgtacaaggacgaccagctgctggacgacggcaagaccctgggcgagtgcggcttcaccagccagaccgccagaccccaggcccccgccaccgtgggcctggccttcagagccgacgacaccttcgaggccctgtgcatcgagcccttcagcagcccccccgagctgcccgacgtgatgaagccccaggacagcggcagcagcgccaacgagcaggccgtgcacctgcacgtgcacagccagaccatggccaagagcagaaacaccagctggagccagtgccccggcctgaccgcctgcagcaccagagagccccaggacggccccacccaggtgcaccccagatggggcctgtag

SEQ ID NO: 9431 - DNA, 1521 bp, Homo sapiens
  source 1..1521: mol_type = genomic DNA
atgaccggcgagaagatcagaagcctgagaagagaccacaagcccagcaaggaggagggcgacctgctggagcccggcgacgaggaggccgccgccgccctgggcggcaccttcaccagaagcagaatcggcaagggcggcaaggcctgccacaagatcttcagcaaccaccaccacagactgcagctgaaggccgcccccgccagcagcaacccccccggcgcccccgccctgcccctgcacaacagcagcgtgaccgccaacagccagagccccgccctgctggccggcaccaaccccgtggccgtggtggccgacggcggcagctgccccgcccactaccccgtgcacgagtgcgtgttcaagggcgacgtgagaagactgagcagcctgatcagaacccacaacatcggccagaaggacaaccacggcaacacccccctgcacctggccgtgatgctgggcaacaaggtgaccgccctgctgagaaagctgaagcagcagagcagagagagcgtggaggagaagagacccagactgctgaaggccctgaaggagctgggcgacttctacctggagctgcactgggacttccagagctgggtgcccctgctgagcagaatcctgcccagcgacgcctgcaagatctacaagcagggcatcaacatcagactggacaccaccctgatcgacttcaccgacatgaagtgccagagaggcgacctgagcttcatcttcaacggcgacgccgcccccagcgagagcttcgtggtgctggacaacgagcagaaggtgtaccagagaatccaccacgaggagagcgagatggagaccgaggaggaggtggacatcctgatgagcagcgacatctacagcgccaccctgagcaccaagagcatcagcttcaccagagcccagaccggctggctgttcagagaggacaagaccgagagagtgggcaacttcctggccgacttctacctggtgaacggcctggtgctggagagcagaaagagaagagagcacctgagcgaggaggacatcctgagaaacaaggccatcatggagagcctgagcaagggcggcaacatcatggagcagaacttcgagcccatcagaagacagagcctgaccccccccccccagaacaccatcacctgggaggagtacatcagcgccgagaacggcaaggccccccacctgggcagagagctggtgtgcaaggagagcaagaagaccttcaaggccaccatcgccatgagccaggagttccccctgggcatcgagctgctgctgaacgtgctggaggtggtggcccccttcaagcacttcaacaagctgagagagttcgtgcagatgaagctgccccccggcttccccgtgaagctggacatccccgtgttccccaccatcaccgccaccgtgaccttccaggagttcagatacgacgagttcgacggcagcatcttcaccatccccgacgactacaaggaggaccccagcagattccccgacctgtag

SEQ ID NO: 9432 - DNA, 699 bp, Homo sapiens
  source 1..699: mol_type = genomic DNA
atgcagccccccgccccccccgccgagctggccgcccccctgcccagccccctgcccgagcagcccctggacagccccgccgcccccgccctgagccccagcggcctgggcctgcagcccggccccgagagaaccagcaccaccaagagcaaggagctgagccccggcagcgcccagaagggcagccccggcagcagccagggcaccgcctgcgccggcacccagcccggcgcccagcccggcgcccagcccggcgccagccccagccccagccagccccccgccgaccagagcccccacaccctgagaaaggtgagcaagaagctggcccccatcccccccaaggtgcccttcggccagcccggcgccatggccgaccagagcgccggccagcccagccccgtgagcctgagccccaccccccccagcacccccagcccctacggcctgagctacccccagggctacagcctggccagcggccagctgagccccgccgccgccccccccctggccagccccagcgtgttcaccagcaccctgagcaagagcagacccacccccaagcccagacagagacccaccctgccccccccccagccccccaccgtgaacctgagcgccagcagcccccagagcaccgaggcccccatgctggacggcatgagccccggcgagagcatgagcaccgccgtgtag

SEQ ID NO: 9433 - DNA, 1221 bp, Homo sapiens
  source 1..1221: mol_type = genomic DNA
atgcaccccgccgtgttcctgagcctgcccgacctgagatgcagcctgctgctgctggtgacctgggtgttcacccccgtgaccaccgagatcaccagcctggacaccgagaacatcgacgagatcctgaacaacgccgacgtggccctggtgaacttctacgccgactggtgcagattcagccagatgctgcaccccatcttcgaggaggccagcgacgtgatcaaggaggagttccccaacgagaaccaggtggtgttcgccagagtggactgcgaccagcacagcgacatcgcccagagatacagaatcagcaagtaccccaccctgaagctgttcagaaacggcatgatgatgaagagagagtacagaggccagagaagcgtgaaggccctggccgactacatcagacagcagaagagcgaccccatccaggagatcagagacctggccgagatcaccaccctggacagaagcaagagaaacatcatcggctacttcgagcagaaggacagcgacaactacagagtgttcgagagagtggccaacatcctgcacgacgactgcgccttcctgagcgccttcggcgacgtgagcaagcccgagagatacagcggcgacaacatcatctacaagccccccggccacagcgcccccgacatggtgtacctgggcgccatgaccaacttcgacgtgacctacaactggatccaggacaagtgcgtgcccctggtgagagagatcaccttcgagaacggcgaggagctgaccgaggagggcctgcccttcctgatcctgttccacatgaaggaggacaccgagagcctggagatcttccagaacgaggtggccagacagctgatcagcgagaagggcaccatcaacttcctgcacgccgactgcgacaagttcagacaccccctgctgcacatccagaagacccccgccgactgccccgtgatcgccatcgacagcttcagacacatgtacgtgttcggcgacttcaaggacgtgctgatccccggcaagctgaagcagttcgtgttcgacctgcacagcggcaagctgcacagagagttccaccacggccccgaccccaccgacaccgcccccggcgagcaggcccaggacgtggccagcagcccccccgagagcagcttccagaagctggcccccagcgagtacagatacaccctgctgagagacagagacgagctgtag

SEQ ID NO: 9434 - DNA, 5601 bp, Homo sapiens
  source 1..5601: mol_type = genomic DNA
atggaccccgtgggcctgcagctgggcaacaagaacctgtggagctgcctggtgagactgctgaccaaggaccccgagtggctgaacgccaagatgaagttcttcctgcccaacaccgacctggacagcagaaacgagaccctggaccccgagcagagagtgatcctgcagctgaacaagctgcacgtgcagggcagcgacacctggcagagcttcatccactgcgtgtgcatgcagctggaggtgcccctggacctggaggtgctgctgctgagcaccttcggctacgacgacggcttcaccagccagctgggcgccgagggcaagagccagcccgagagccagctgcaccacggcctgaagagaccccaccagagctgcggcagcagccccagaagaaagcagtgcaagaagcagcagctggagctggccaagaagtacctgcagctgctgagaaccagcgcccagcagagatacagaagccagatccccggcagcggccagccccacgccttccaccaggtgtacgtgccccccatcctgagaagagccaccgccagcctggacacccccgagggcgccatcatgggcgacgtgaaggtggaggacggcgccgacgtgagcatcagcgacctgttcaacaccagagtgaacaagggccccagagtgaccgtgctgctgggcaaggccggcatgggcaagaccaccctggcccacagactgtgccagaagtgggccgagggccacctgaactgcttccaggccctgttcctgttcgagttcagacagctgaacctgatcaccagattcctgacccccagcgagctgctgttcgacctgtacctgagccccgagagcgaccacgacaccgtgttccagtacctggagaagaacgccgaccaggtgctgctgatcttcgacggcctggacgaggccctgcagcccatgggccccgacggccccggccccgtgctgaccctgttcagccacctgtgcaacggcaccctgctgcccggctgcagagtgatggccaccagcagacccggcaagctgcccgcctgcctgcccgccgaggccgccatggtgcacatgctgggcttcgacggccccagagtggaggagtacgtgaaccacttcttcagcgcccagcccagcagagagggcgccctggtggagctgcagaccaacggcagactgagaagcctgtgcgccgtgcccgccctgtgccaggtggcctgcctgtgcctgcaccacctgctgcccgaccacgcccccggccagagcgtggccctgctgcccaacatgacccagctgtacatgcagatggtgctggccctgagcccccccggccacctgcccaccagcagcctgctggacctgggcgaggtggccctgagaggcctggagaccggcaaggtgatcttctacgccaaggacatcgccccccccctgatcgccttcggcgccacccacagcctgctgaccagcttctgcgtgtgcaccggccccggccaccagcagaccggctacgccttcacccacctgagcctgcaggagttcctggccgccctgcacctgatggccagccccaaggtgaacaaggacaccctgacccagtacgtgaccctgcacagcagatgggtgcagagaaccaaggccagactgggcctgagcgaccacctgcccaccttcctggccggcctggccagctgcacctgcagacccttcctgagccacctggcccagggcaacgaggactgcgtgggcgccaagcaggccgccgtggtgcaggtgctgaagaagctggccaccagaaagctgaccggccccaaggtggtggagctgtgccactgcgtggacgagacccaggagcccgagctggccagcctgaccgcccagagcctgccctaccagctgcccttccacaacttccccctgacctgcaccgacctggccaccctgaccaacatcctggagcacagagaggcccccatccacctggacttcgacggctgccccctggagccccactgccccgaggccctggtgggctgcggccagatcgagaacctgagcttcaagagcagaaagtgcggcgacgccttcgccgaggccctgagcagaagcctgcccaccatgggcagactgcagatgctgggcctggccggcagcaagatcaccgccagaggcatcagccacctggtgaaggccctgcccctgtgcccccagctgaaggaggtgagcttcagagacaaccagctgagcgaccaggtggtgctgaacatcgtggaggtgctgccccacctgcccagactgagaaagctggacctgagcagcaacagcatctgcgtgagcaccctgctgtgcctggccagagtggccgtgacctgccccaccgtgagaatgctgcaggccagagaggccgacctgatcttcctgctgagcccccccaccgagaccaccgccgagctgcagagagcccccgacctgcaggagagcgacggccagagaaagggcgcccagagcagaagcctgaccctgagactgcagaagtgccagctgcaggtgcacgacgccgaggccctgatcgccctgctgcaggagggcccccacctggaggaggtggacctgagcggcaaccagctggaggacgagggctgcagactgatggccgaggccgccagccagctgcacatcgccagaaagctggacctgagcaacaacggcctgagcgtggccggcgtgcactgcgtgctgagagccgtgagcgcctgctggaccctggccgagctgcacatcagcctgcagcacaagaccgtgatcttcatgttcgcccaggagcccgaggagcagaagggcccccaggagagagccgccttcctggacagcctgatgctgcagatgcccagcgagctgcccctgagcagcagaagaatgagactgacccactgcggcctgcaggagaagcacctggagcagctgtgcaaggccctgggcggcagctgccacctgggccacctgcacctggacttcagcggcaacgccctgggcgacgagggcgccgccagactggcccagctgctgcccggcctgggcgccctgcagagcctgaacctgagcgagaacggcctgagcctggacgccgtgctgggcctggtgagatgcttcagcaccctgcagtggctgttcagactggacatcagcttcgagagccagcacatcctgctgagaggcgacaagaccagcagagacatgtgggccaccggcagcctgcccgacttccccgccgccgccaagttcctgggcttcagacagagatgcatccccagaagcctgtgcctgagcgagtgccccctggagccccccagcctgaccagactgtgcgccaccctgaaggactgccccggccccctggagctgcagctgagctgcgagttcctgagcgaccagagcctggagaccctgctggactgcctgccccagctgccccagctgagcctgctgcagctgagccagaccggcctgagccccaagagccccttcctgctggccaacaccctgagcctgtgccccagagtgaagaaggtggacctgagaagcctgcaccacgccaccctgcacttcagaagcaacgaggaggaggagggcgtgtgctgcggcagattcaccggctgcagcctgagccaggagcacgtggagagcctgtgctggctgctgagcaagtgcaaggacctgagccaggtggacctgagcgccaacctgctgggcgacagcggcctgagatgcctgctggagtgcctgccccaggtgcccatcagcggcctgctggacctgagccacaacagcatcagccaggagagcgccctgtacctgctggagaccctgcccagctgccccagagtgagagaggccagcgtgaacctgggcagcgagcagagcttcagaatccacttcagcagagaggaccaggccggcaagaccctgagactgagcgagtgcagcttcagacccgagcacgtgagcagactggccaccggcctgagcaagagcctgcagctgaccgagctgaccctgacccagtgctgcctgggccagaagcagctggccatcctgctgagcctggtgggcagacccgccggcctgttcagcctgagagtgcaggagccctgggccgacagagccagagtgctgagcctgctggaggtgtgcgcccaggccagcggcagcgtgaccgagatcagcatcagcgagacccagcagcagctgtgcgtgcagctggagttccccagacaggaggagaaccccgaggccgtggccctgagactggcccactgcgacctgggcgcccaccacagcctgctggtgggccagctgatggagacctgcgccagactgcagcagctgagcctgagccaggtgaacctgtgcgaggacgacgacgccagcagcctgctgctgcagagcctgctgctgagcctgagcgagctgaagaccttcagactgaccagcagctgcgtgagcaccgagggcctggcccacctggccagcggcctgggccactgccaccacctggaggagctggacctgagcaacaaccagttcgacgaggagggcaccaaggccctgatgagagccctggagggcaagtggatgctgaagagactggacctgagccacctgctgctgaacagcagcaccctggccctgctgacccacagactgagccagatgacctgcctgcagagcctgagactgaacagaaacagcatcggcgacgtgggctgctgccacctgagcgaggccctgagagccgccaccagcctggaggagctggacctgagccacaaccagatcggcgacgccggcgtgcagcacctggccaccatcctgcccggcctgcccgagctgagaaagatcgacctgagcggcaacagcatcagcagcgccggcggcgtgcagctggccgagagcctggtgctgtgcagaagactggaggagctgatgctgggctgcaacgccctgggcgaccccaccgccctgggcctggcccaggagctgccccagcacctgagagtgctgcacctgcccttcagccacctgggccccggcggcgccctgagcctggcccaggccctggacggcagcccccacctggaggagatcagcctggccgagaacaacctggccggcggcgtgctgagattctgcatggagctgcccctgctgagacagatcgacctggtgagctgcaagatcgacaaccagaccgccaagctgctgaccagcagcttcaccagctgccccgccctggaggtgatcctgctgagctggaacctgctgggcgacgaggccgccgccgagctggcccaggtgctgccccagatgggcagactgaagagagtggacctggagaagaaccagatcaccgccctgggcgcctggctgctggccgagggcctggcccagggcagcagcatccaggtgatcagactgtggaacaaccccatcccctgcgacatggcccagcacctgaagagccaggagcccagactggacttcgccttcttcgacaaccagccccaggccccctggggcacctag

SEQ ID NO: 9435 - DNA, 897 bp, Homo sapiens
  source 1..897: mol_type = genomic DNA
atgatgaacgtgaacaccagaggcacctacctggccagcaaggcctgcatcccctacctgaagaagagcaaggtggcccacatcctgaacatcagcccccccctgaacctgaaccccgtgtggttcaagcagcactgcgcctacaccatcgccaagtacggcatgagcatgtacgtgctgggcatggccgaggagttcaagggcgagatcgccgtgaacgccctgtggcccaagaccgccatccacaccgccgccatggacatgctgggcggccccggcatcgagagccagtgcagaaaggtggacatcatcgccgacgccgcctacagcatcttccagaagcccaagagcttcaccggcaacttcgtgatcgacgagaacatcctgaaggaggagggcatcgagaacttcgacgtgtacgccatcaagcccggccaccccctgcagcccgacttcttcctggacgagtaccccgaggccgtgagcaagaaggtggagagcaccggcgccgtgcccgagttcaaggaggagaagctgcagctgcagcccaagcccagaagcggcgccgtggaggagaccttcagaatcgtgaaggacagcctgagcgacgacgtggtgaaggccacccaggccatctacctgttcgagctgagcggcgaggacggcggcacctggttcctggacctgaagagcaagggcggcaacgtgggctacggcgagcccagcgaccaggccgacgtggtgatgagcatgaccaccgacgacttcgtgaagatgttcagcggcaagctgaagcccaccatggccttcatgagcggcaagctgaagatcaagggcaacatggccctggccatcaagctggagaagctgatgaaccagatgaacgccagactgtag

SEQ ID NO: 9436 - DNA, 4026 bp, Homo sapiens
  source 1..4026: mol_type = genomic DNA
atgtggagaagaaagcaccccagaaccagcggcggcaccagaggcgtgctgagcggcaacagaggcgtggagtacggcagcggcagaggccacctgggcaccttcgagggcagatggagaaagctgcccaagatgcccgaggccgtgggcaccgaccccagcaccagcagaaagatggccgagctggaggaggtgaccctggacggcaagcccctgcaggccctgagagtgaccgacctgaaggccgccctggagcagagaggcctggccaagagcggccagaagagcgccctggtgaagagactgaagggcgccctgatgctggagaacctgcagaagcacagcaccccccacgccgccttccagcccaacagccagatcggcgaggagatgagccagaacagcttcatcaagcagtacctggagaagcagcaggagctgctgagacagagactggagagagaggccagagaggccgccgagctggaggaggccagcgccgagagcgaggacgagatgatccaccccgagggcgtggccagcctgctgccccccgacttccagagcagcctggagagacccgagctggagctgagcagacacagccccagaaagagcagcagcatcagcgaggagaagggcgacagcgacgacgagaagcccagaaagggcgagagaagaagcagcagagtgagacaggccagagccgccaagctgagcgagggcagccagcccgccgaggaggaggaggaccaggagacccccagcagaaacctgagagtgagagccgacagaaacctgaagaccgaggaggaggaggaggaggaggaggaggaggaggaggacgacgaggaggaggagggcgacgacgagggccagaagagcagagaggcccccatcctgaaggagttcaaggaggagggcgaggagatccccagagtgaagcccgaggagatgatggacgagagacccaagaccagaagccaggagcaggaggtgctggagagaggcggcagattcaccagaagccaggaggaggccagaaagagccacctggccagacagcagcaggagaaggagatgaagaccaccagccccctggaggaggaggagagagagatcaagagcagccagggcctgaaggagaagagcaagagccccagcccccccagactgaccgaggacagaaagaaggccagcctggtggccctgcccgagcagaccgccagcgaggaggagacccccccccccctgctgaccaaggaggccagcagcccccccccccacccccagctgcacagcgaggaggagatcgagcccatggagggccccgcccccgccgtgctgatccagctgagcccccccaacaccgacgccgacaccagagagctgctggtgagccagcacaccgtgcagctggtgggcggcctgagccccctgagcagccccagcgacaccaaggccgagagccccgccgagaaggtgcccgaggagagcgtgctgcccctggtgcagaagagcaccctggccgactacagcgcccagaaggacctggagcccgagagcgacagaagcgcccagcccctgcccctgaagatcgaggagctggccctggccaagggcatcaccgaggagtgcctgaagcagcccagcctggagcagaaggagggcagaagagccagccacaccctgctgcccagccacagactgaagcagagcgccgacagcagcagcagcagaagcagcagcagcagcagcagcagcagcagaagcagaagcagaagccccgacagcagcggcagcagaagccacagccccctgagaagcaagcagagagacgtggcccaggccagaacccacgccaaccccagaggcagacccaagatgggcagcagaagcaccagcgagagcagaagcagaagcagaagcagaagcagaagcgccagcagcaacagcagaaagagcctgagccccggcgtgagcagagacagcagcaccagctacaccgagaccaaggaccccagcagcggccaggaggtggccaccccccccgtgccccagctgcaggtgtgcgagcccaaggagagaaccagcaccagcagcagcagcgtgcaggccagaagactgagccagcccgagagcgccgagaagcacgtgacccagagactgcagcccgagagaggcagccccaagaagtgcgaggccgaggaggccgagccccccgccgccacccagccccagaccagcgagacccagaccagccacctgcccgagagcgagagaatccaccacaccgtggaggagaaggaggaggtgaccatggacaccagcgagaacagacccgagaacgacgtgcccgagccccccatgcccatcgccgaccaggtgagcaacgacgacagacccgagggcagcgtggaggacgaggagaagaaggagagcagcctgcccaagagcttcaagagaaagatcagcgtggtgagcgccaccaagggcgtgcccgccggcaacagcgacaccgagggcggccagcccggcagaaagagaagatggggcgccagcaccgccaccacccagaagaagcccagcatcagcatcaccaccgagagcctgaagagcctgatccccgacatcaagcccctggccggccaggaggccgtggtggacctgcacgccgacgacagcagaatcagcgaggacgagaccgagagaaacggcgacgacggcacccacgacaagggcctgaagatctgcagaaccgtgacccaggtggtgcccgccgagggccaggagaacggccagagagaggaggaggaggaggagaaggagcccgaggccgagccccccgtgcccccccaggtgagcgtggaggtggccctgcccccccccgccgagcacgaggtgaagaaggtgaccctgggcgacaccctgaccagaagaagcatcagccagcagaagagcggcgtgagcatcaccatcgacgaccccgtgagaaccgcccaggtgcccagcccccccagaggcaagatcagcaacatcgtgcacatcagcaacctggtgagacccttcaccctgggccagctgaaggagctgctgggcagaaccggcaccctggtggaggaggccttctggatcgacaagatcaagagccactgcttcgtgacctacagcaccgtggaggaggccgtggccaccagaaccgccctgcacggcgtgaagtggccccagagcaaccccaagttcctgtgcgccgactacgccgagcaggacgagctggactaccacagaggcctgctggtggacagacccagcgagaccaagaccgaggagcagggcatccccagacccctgcacccccccccccccccccccgtgcagcccccccagcaccccagagccgagcagagagagcaggagagagccgtgagagagcagtgggccgagagagagagagagatggagagaagagagagaaccagaagcgagagagagtgggacagagacaaggtgagagagggccccagaagcagaagcagaagcagagacagaagaagaaaggagagagccaagagcaaggagaagaagagcgagaagaaggagaaggcccaggaggagccccccgccaagctgctggacgacctgttcagaaagaccaaggccgccccctgcatctactggctgcccctgaccgacagccagatcgtgcagaaggaggccgagagagccgagagagccaaggagagagagaagagaagaaaggagcaggaggaggaggagcagaaggagagagagaaggaggccgagagagagagaaacagacagctggagagagagaagagaagagagcacagcagagagagagacagagagagagagagagagagagagagagacagaggcgacagagacagagacagagagagagacagagagagaggcagagagagagacagaagagacaccaagagacacagcagaagcagaagcagaagcacccccgtgagagacagaggcggcagaagatag

SEQ ID NO: 9437 - DNA, 600 bp, Homo sapiens
  source 1..600: mol_type = genomic DNA
atgagcagcggcaacgccaagatcggccaccccgcccccaacttcaaggccaccgccgtgatgcccgacggccagttcaaggacatcagcctgagcgactacaagggcaagtacgtggtgttcttcttctaccccctggacttcaccttcgtgtgccccaccgagatcatcgccttcagcgacagagccgaggagttcaagaagctgaactgccaggtgatcggcgccagcgtggacagccacttctgccacctggcctgggtgaacacccccaagaagcagggcggcctgggccccatgaacatccccctggtgagcgaccccaagagaaccatcgcccaggactacggcgtgctgaaggccgacgagggcatcagcttcagaggcctgttcatcatcgacgacaagggcatcctgagacagatcaccgtgaacgacctgcccgtgggcagaagcgtggacgagaccctgagactggtgcaggccttccagttcaccgacaagcacggcgaggtgtgccccgccggctggaagcccggcagcgacaccatcaagcccgacgtgcagaagagcaaggagtacttcagcaagcagaagtag

SEQ ID NO: 9438 - DNA, 1077 bp, Homo sapiens
  source 1..1077: mol_type = genomic DNA
atggagaagaagaagatggtgacccagggcaaccaggagcccaccaccacccccgacgccatggtgcagcccttcaccaccatccccttccccccccccccccagaacggcatccccaccgagtacggcgtgccccacacccaggactacgccggccagaccggcgagcacaacctgaccctgtacggcagcacccaggcccacggcgagcagagcagcaacagccccagcacccagaacggcagcctgaccaccgagggcggcgcccagaccgacggccagcagagccagacccagagcagcgagaacagcgagagcaagagcacccccaagagactgcacgtgagcaacatccccttcagattcagagaccccgacctgagacagatgttcggcggcttcggcttcgtgaccttcgagaacagcgccgacgccgacagagccagagagaagctgcacggcaccgtggtggagggcagaaagatcgaggtgaacaacgccaccgccagagtgatgaccaacaagaagatggtgaccccctacgccaacggctggaagctgagccccgtggtgggcgccgtgtacggccccgagctgtacgccgccagcagcttccaggccgacgtgagcctgggcaacgacgccgccgtgcccctgagcggcagaggcggcatcaacacctacatccccctgatcatccccggcttcccctaccccaccgccgccaccaccgccgccgccttcagaggcgcccacctgagaggcagaggcagaaccgtgtacggcgccgtgagagccgtgccccccaccgccatccccgcctaccccggcgtggtgtaccaggacggcttctacggcgccgacctgtacggcggctacgccgcctacagatacgcccagcccgccaccgccaccgccgccaccgccgccgccgccgccgccgccgcctacagcgacggctacggcagagtgtacaccgccgacccctaccacgccctggcccccgccgccagctacggcgtgggcgccgtggccagcctgtacagaggcggctacagcagattcgccccctactag

SEQ ID NO: 9439 - DNA, 1596 bp, Homo sapiens
  source 1..1596: mol_type = genomic DNA
atgagctaccccgccgacgactacgagagcgaggccgcctacgacccctacgcctaccccagcgactacgacatgcacaccggcgaccccaagcaggacctggcctacgagagacagtacgagcagcagacctaccaggtgatccccgaggtgatcaagaacttcatccagtacttccacaagaccgtgagcgacctgatcgaccagaaggtgtacgagctgcaggccagcagagtgagcagcgacgtgatcgaccagaaggtgtacgagatccaggacatctacgagaacagctggaccaagctgaccgagagattcttcaagaacaccccctggcccgaggccgaggccatcgccccccaggtgggcaacgacgccgtgttcctgatcctgtacaagatcctgcaggcccacggccccgcccccctggagctgcccaaccagtggctgtgggacatcatcgacgagttcatctaccagttccagagcttcagccagtacagatgcaagaccgccaagaagagcgaggaggagatcgacttcctgagaagcaaccccaagatctggaacgtgcacagcgtgctgaacgtgctgcacagcctggtggacaagagcaacatcaacagacagctggaggtgtacaccagcggcggcgaccccgagagcgtggccggcgagtacggcagacacagcctgtacaagatgctgggctacttcagcctggtgggcctgctgagactgcacagcctgctgggcgactactaccaggccatcaaggtgctggagaacatcgagctgaacaagaagagcatgtacagcagagtgcccgagtgccaggtgaccacctactactacgtgggcttcgcctacctgatgatgagaagataccaggacgccatcagagtgttcgccaacatcctgctgtacatccagagaaccaagagcatgttccagagaaccacctacaagtacgagatgatcaacaagcagaacgagcagatgcacgccctgctggccatcgccctgaccatgtaccccatgagaatcgacgagagcatccacctgcagctgagagagaagtacggcgacaagatgctgagaatgcagaagggcgacccccaggtgtacgaggagctgttcagctacagctgccccaagttcctgagccccgtggtgcccaactacgacaacgtgcaccccaactaccacaaggagcccttcctgcagcagctgaaggtgttcagcgacgaggtgcagcagcaggcccagctgagcaccatcagaagcttcctgaagctgtacaccaccatgcccgtggccaagctggccggcttcctggacctgaccgagcaggagttcagaatccagctgctggtgttcaagcacaagatgaagaacctggtgtggaccagcggcatcagcgccctggacggcgagttccagagcgccagcgaggtggacttctacatcgacaaggacatgatccacatcgccgacaccaaggtggccagaagatacggcgacttcttcatcagacagatccacaagttcgaggagctgaacagaaccctgaagaagatgggccagagaccctag

SEQ ID NO: 9440 - DNA, 5952 bp, synthetic construct
  source 1..5952: mol_type = other DNA; note = Synthetic coding sequence
atgagcggcaacaagagaggcagcagagccagctgcccccacagaggcgccgagtgcctgctgccctgggccgccctgaacctgcagggcttccagctgctgctgctgcaccccagcgccaccgccatgatggacgtgagcgagctgggcgagagcgccagatacctgagacagggctaccaggagatgaccaaggtgcacaccatcccctgggacggcaagaagagagtgtgggtgcccgacgagcaggacgcctacgtggaggccgaggtgaagagcgaggccaccggcggcagagtgaccgtggagaccaaggaccagaaggtgctgatggtgagagaggccgagctgcagcccatgaacccccccagattcgacctgctggaggacatggccatgatgacccacctgaacgaggccagcgtgctgcacaacctgagacagagatacgccagatggatgatctacacctacagcggcctgttctgcgtgaccatcaacccctacaagtggctgcccgtgtacaccgccagcgtggtggccgcctacaagggcaagagaagaagcgacagccccccccacatctacgccgtggccgacaacgcctacaacgacatgctgagaaacagagacaaccagagcatgctgatcaccggcgagagcggcgccggcaagaccgtgaacaccaagagagtgatccagtacttcgccatcgtggccgccctgggcgacggccccggcaagaaggcccagttcctggccaccaagaccggcggcaccctggaggaccagatcatcgaggccaaccccgccatggaggccttcggcaacgccaagaccctgagaaacgacaacagcagcagattcggcaagttcatcagaatccacttcggccccagcggcaagctggccagcgccgacatcgacagctacctgctggagaagagcagagtgatcttccagctgcccggcgagagaagctaccacgtgtactaccagatcctgagcggcagaaagcccgagctgcaggacatgctgctgctgagcatgaacccctacgactaccacttctgcagccagggcgtgatcaccgtggacaacatgaacgacggcgaggagctgatcgccaccgaccacgccatggacatcctgggcttcagcgtggacgagaagtgcgcctgctacaagatcgtgggcgccctgctgcacttcggcaacatgaagttcaagcagaagcagagagaggagcaggccgaggccgacggcaccgagagcgccgacaaggccgcctacctgatgggcgtgagcagcggcgacctgctgaagggcctgctgcaccccagagtgagagtgggcaacgagtacgtgaccaagggccagagcgtggagcaggtggtgttcgccgtgggcgccctggccaaggccacctacgacagactgttcagatggctggtgagcagaatcaaccagaccctggacaccaagctgcccagacagttcttcatcggcgtgctggacatcgccggcttcgagatcttcgagttcaacagcttcgagcagctgtgcatcaacttcaccaacgagaagctgcagcagttcttcaaccagcacatgttcgtgctggagcaggaggagtacaagagagagggcatcgactgggtgttcatcgacttcggcctggacctgcagccctgcatcgacctgatcgagaagcccctgggcatcctgagcatcctggaggaggagtgcatgttccccaaggccagcgacgccagcttcagagccaagctgtacgacaaccacgccggcaagagccccaacttccagcagcccagacccgacaagaagagaaagtaccaggcccacttcgaggtggtgcactacgccggcgtggtgccctacagcatcgtgggctggctggagaagaacaaggaccccctgaacgagaccgtggtgcccatcttccagaagagccagaacagactgctggccaccctgtacgagaactacgccggcagctgcagcaccgagccccccaagagcggcgtgaaggagaagagaaagaaggccgccagcttccagaccgtgagccagctgcacaaggagaacctgaacaagctgatgaccaacctgagagccacccagccccacttcgtgagatgcatcgtgcccaacgagaacaagacccccggcgtgatggacgccttcctggtgctgcaccagctgagatgcaacggcgtgctggagggcatcagaatctgcagacagggcttccccaacagactgctgtacaccgacttcagacagagatacagaatcctgaaccccagcgccatccccgacgacaccttcatggacagcagaaaggccaccgagaagctgctgggcagcctggacctggaccacacccagtaccagttcggccacaccaaggtgttcttcaaggccggcctgctgggcgtgctggaggagctgagagaccagagactggccaaggtgctgaccctgctgcaggccagaagcagaggcagactgatgagactggagtaccagagactgctgggcggcagagacgccctgttcaccatccagtggaacatcagagccttcaacgccgtgaagaactggagctggatgaagctgttcttcaagatgaagcccctgctgagaagcgcccaggccgaggaggagctggccgccctgagagccgagctgagaggcctgagaggcgccctggccgccgccgaggccaagagacaggagctggaggagacccacgtgagcatcacccaggagaagaacgacctggccctgcagctgcaggccgagcaggacaacctggccgacgccgaggagagatgccacctgctgatcaagagcaaggtgcagctggagggcaaggtgaaggagctgagcgagagactggaggacgaggaggaggtgaacgccgacctggccgccagaagaagaaagctggaggacgagtgcaccgagctgaagaaggacatcgacgacctgaagctgaccctggccaaggccgagaaggagaagcaggccaccgagaacaaggtgaagaacctgaccgaggagatggccgccctggacgagagcgtggccagactgaccaaggagaagaaggccctgcaggaggcccaccagcaggccctgggcgacctgcaggccgaggaggacagagtgagcgccctgaccaaggccaagctgagactggagcagcaggtggaggacctggagtgcagcctggagcaggagaagaagctgagaatggacaccgagagagccaagagaaagctggagggcgacctgaagctgacccaggagagcgtggccgacgccgcccaggacaagcagcagctggaggagaagctgaagaagaaggacagcgagctgagccagctgagcctgagagtggaggacgagcagctgctgggcgcccagatgcagaagaagatcaaggagctgcaggccagagccgaggagctggaggaggagctggaggccgagagagccgccagagccagagtggagaagcagagagccgaggccgccagagagctggaggagctgagcgagagactggaggaggccggcggcgccagcgccggccagagagagggctgcagaaagagagaggccgagctgggcagactgagaagagagctggaggaggccgccctgagacacgaggccaccgtggccgccctgagaagaaagcaggccgagggcgccgccgagctgggcgagcaggtggacagcctgcagagagtgagacagaagctggagaaggagaagagcgagctgagaatggaggtggacgacctggccgccaacgtggagaccctgaccagagccaaggccagcgccgagaagctgtgcagaacctacgaggaccagctgagcgaggccaagatcaaggtggaggagctgcagagacagctggccgacgccagcacccagagaggcagactgcagaccgagagcggcgagctgagcagactgctggaggagaaggagtgcctgatcagccagctgagcagaggcaaggccctggccgcccagagcctggaggagctgagaagacagctggaggaggagagcaaggccaagagcgccctggcccacgccgtgcaggccctgagacacgactgcgacctgctgagagagcagcacgaggaggaggccgaggcccaggccgagctgcagagactgctgagcaaggccaacgccgaggtggcccagtggagaagcaagtacgaggccgacgccatccagagaaccgaggagctggaggaggccaagaagaagctggccctgagactgcaggaggccgaggagggcgtggaggccgccaacgccaagtgcagcagcctggagaaggccaagctgagactgcagaccgagagcgaggacgtgaccctggagctggagagagccaccagcgccgccgccgccctggacaagaagcagagacacctggagagagccctggaggagagaagaagacaggaggaggagatgcagagagagctggaggccgcccagagagagagcagaggcctgggcaccgagctgttcagactgagacacggccacgaggaggccctggaggccctggagaccctgaagagagagaacaagaacctgcaggaggagatcagcgacctgaccgaccaggtgagcctgagcggcaagagcatccaggagctggagaagaccaagaaggccctggagggcgagaagagcgagatccaggccgccctggaggaggccgagggcgccctggagctggaggagaccaagaccctgagaatccagctggagctgagccaggtgaaggccgaggtggacagaaagctggccgagaaggacgaggagtgcgccaacctgagaagaaaccaccagagagccgtggagagcctgcaggccagcctggacgccgagaccagagccagaaacgaggccctgagactgaagaagaagatggagggcgacctgaacgacctggagctgcagctgggccacgccaccagacaggccaccgaggcccaggccgccaccagactgatgcaggcccagctgaaggaggagcaggccggcagagacgaggagcagagactggccgccgagctgcacgagcaggcccaggccctggagagaagagccagcctgctggccgccgagctggaggagctgagagccgccctggagcagggcgagagaagcagaagactggccgagcaggagctgctggaggccaccgagagactgaacctgctgcacagccagaacaccggcctgctgaaccagaagaagaagctggaggccgacctggcccagctgagcggcgaggtggaggaggccgcccaggagagaagagaggccgaggagaaggccaagaaggccatcaccgacgccgccatgatggccgaggagctgaagaaggagcaggacaccagcgcccacctggagagaatgaagaagaccctggagcagaccgtgagagagctgcaggccagactggaggaggccgagcaggccgccctgagaggcggcaagaagcaggtgcagaagctggaggccaaggtgagagagctggaggccgagctggacgccgagcagaagaagcacgccgaggccctgaagggcgtgagaaagcacgagagaagagtgaaggagctggcctaccaggccgaggaggacagaaagaacctggccagaatgcaggacctggtggacaagctgcagagcaaggtgaagagctacaagagacagttcgaggaggccgagcagcaggccaacaccaacctggccaagtacagaaaggcccagcacgagctggacgacgccgaggagagagccgacatggccgagacccaggccaacaagctgagagccagaaccagagacgccctgggccccaagcacaaggagtag

SEQ ID NO: 9441 - DNA, 2730 bp, synthetic construct
  source 1..2730: mol_type = other DNA; note = Synthetic coding sequence
atggagagagccatggagcagctgaacagactgaccagaagcctgagaagagccagaaccgtggagctgcccgaggacaacgagaccgccgtgtacaccctgatgcccatggtgatggccgaccagcacagaagcgtgagcgagctgctgagcaacagcaagttcgacgtgaactacgccttcggcagagtgaagagaagcctgctgcacatcgccgccaactgcggcagcgtggagtgcctggtgctgctgctgaagaagggcgccaaccccaactaccaggacatcagcggctgcacccccctgcacctggccgccagaaacggccagaagaagtgcatgagcaagctgctggagtacagcgccgacgtgaacatctgcaacaacgagggcctgaccgccatccactggctggccgtgaacggcagaaccgagctgctgcacgacctggtgcagcacgtgagcgacgtggacgtggaggacgccatgggccagaccgccctgcacgtggcctgccagaacggccacaagaccaccgtgcagtgcctgctggacagcggcgccgacatcaacagacccaacgtgagcggcgccacccccctgtacttcgcctgcagccacggccagagagacaccgcccagatcctgctgctgagaggcgccaagtacctgcccgacaagaacggcgtgacccccctggacctgtgcgtgcagggcggctacggcgagacctgcgaggtgctgatccagtaccaccccagactgttccagaccatcatccagatgacccagaacgaggacctgagagagaacatgctgagacaggtgctggagcacctgagccagcagagcgagagccagtacctgaagatcctgaccagcctggccgaggtggccaccaccaacggccacaagctgctgagcctgagcagcaactacgacgcccagatgaagagcctgctgagaatcgtgagaatgttctgccacgtgttcagaatcggccccagcagccccagcaacggcatcgacatgggctacaacggcaacaagacccccagaagccaggtgttcaagcccctggagctgctgtggcacagcctggacgagtggctggtgctgatcgccaccgagctgatgaagaacaagagagacagcaccgagatcaccagcatcctgctgaagcagaagggccaggaccaggacgccgccagcatcccccccttcgagccccccggccccggcagctacgagaacctgagcaccggcaccagagagagcaagcccgacgccctggccggcagacaggaggccagcgccgactgccaggacgtgatcagcatgaccgccaacagactgagcgccgtgatccaggccttctacatgtgctgcagctgccagatgccccccggcatgaccagccccagattcatcgagttcgtgtgcaagcacgacgaggtgctgaagtgcttcgtgaacagaaaccccaagatcatcttcgaccacttccacttcctgctggagtgccccgagctgatgagcagattcatgcacatcatcaaggcccagcccttcaaggacagatgcgagtggttctacgagcacctgcacagcggccagcccgacagcgacatggtgcacagacccgtgaacgagaacgacatcctgctggtgcacagagacagcatcttcagaagcagctgcgaggtggtgagcaaggccaactgcgccaagctgaagcagggcatcgccgtgagattccacggcgaggagggcatgggccagggcgtggtgagagagtggttcgacatcctgagcaacgagatcgtgaaccccgactacgccctgttcacccagagcgccgacggcaccaccttccagcccaacagcaacagctacgtgaaccccgaccacctgaactacttcagattcgccggccagatcctgggcctggccctgaaccacagacagctggtgaacatctacttcaccagaagcttctacaagcacatcctgggcatccccgtgaactaccaggacgtggccagcatcgaccccgagtacgccaagaacctgcagtggatcctggacaacgacatcagcgacctgggcctggagctgaccttcagcgtggagaccgacgtgttcggcgccatggaggaggtgcccctgaagcccggcggcggcagcatcctggtgacccagaacaacaaggccgagtacgtgcagctggtgaccgagctgagaatgaccagagccatccagccccagatcaacgccttcctgcagggcttccacatgttcatcccccccagcctgatccagctgttcgacgagtacgagctggagctgctgctgagcggcatgcccgagatcgacgtgagcgactggatcaagaacaccgagtacaccagcggctacgagagagaggaccccgtgatccagtggttctgggaggtggtggaggacatcacccaggaggagagagtgctgctgctgcagttcgtgaccggcagcagcagagtgccccacggcggcttcgccaacatcatgggcggcagcggcctgcagaacttcaccatcgccgccgtgccctacacccccaacctgctgcccaccagcagcacctgcatcaacatgctgaagctgcccgagtaccccagcaaggagatcctgaaggacagactgctggtggccctgcactgcggcagctacggctacaccatggcctag

SEQ ID NO: 9442 - DNA, 2679 bp, synthetic construct
  source 1..2679: mol_type = other DNA; note = Synthetic coding sequence
atgagaaaggtgaagaagctgagactggacaaggagaacaccggcagctggagaagcttcagcctgaacagcgagggcgccgagagaatggccaccaccggcacccccaccgccgacagaggcgacgccgccgccaccgacgaccccgccgccagattccaggtgcagaagcacagctgggacggcctgagaagcatcatccacggcagcagaaagtacagcggcctgatcgtgaacaaggccccccacgacttccagttcgtgcagaagaccgacgagagcggcccccacagccacagactgtactacctgggcatgccctacggcagcagagagaacagcctgctgtacagcgagatccccaagaaggtgagaaaggaggccctgctgctgctgagctggaagcagatgctggaccacttccaggccaccccccaccacggcgtgtacagcagagaggaggagctgctgagagagagaaagagactgggcgtgttcggcatcaccagctacgacttccacagcgagagcggcctgttcctgttccaggccagcaacagcctgttccactgcagagacggcggcaagaacggcttcatggtgagccccatgaagcccctggagatcaagacccagtgcagcggccccagaatggaccccaagatctgccccgccgaccccgccttcttcagcttcatcaacaacagcgacctgtgggtggccaacatcgagaccggcgaggagagaagactgaccttctgccaccagggcctgagcaacgtgctggacgaccccaagagcgccggcgtggccaccttcgtgatccaggaggagttcgacagattcaccggctactggtggtgccccaccgccagctgggagggcagcgagggcctgaagaccctgagaatcctgtacgaggaggtggacgagagcgaggtggaggtgatccacgtgcccagccccgccctggaggagagaaagaccgacagctacagataccccagaaccggcagcaagaaccccaagatcgccctgaagctggccgagttccagaccgacagccagggcaagatcgtgagcacccaggagaaggagctggtgcagcccttcagcagcctgttccccaaggtggagtacatcgccagagccggctggaccagagacggcaagtacgcctgggccatgttcctggacagaccccagcagtggctgcagctggtgctgctgccccccgccctgttcatccccagcaccgagaacgaggagcagagactggccagcgccagagccgtgcccagaaacgtgcagccctacgtggtgtacgaggaggtgaccaacgtgtggatcaacgtgcacgacatcttctaccccttcccccagagcgagggcgaggacgagctgtgcttcctgagagccaacgagtgcaagaccggcttctgccacctgtacaaggtgaccgccgtgctgaagagccagggctacgactggagcgagcccttcagccccggcgaggacgagttcaagtgccccatcaaggaggagatcgccctgaccagcggcgagtgggaggtgctggccagacacggcagcaagatctgggtgaacgaggagaccaagctggtgtacttccagggcaccaaggacacccccctggagcaccacctgtacgtggtgagctacgaggccgccggcgagatcgtgagactgaccacccccggcttcagccacagctgcagcatgagccagaacttcgacatgttcgtgagccactacagcagcgtgagcacccccccctgcgtgcacgtgtacaagctgagcggccccgacgacgaccccctgcacaagcagcccagattctgggccagcatgatggaggccgccagctgcccccccgactacgtgccccccgagatcttccacttccacaccagaagcgacgtgagactgtacggcatgatctacaagccccacgccctgcagcccggcaagaagcaccccaccgtgctgttcgtgtacggcggcccccaggtgcagctggtgaacaacagcttcaagggcatcaagtacctgagactgaacaccctggccagcctgggctacgccgtggtggtgatcgacggcagaggcagctgccagagaggcctgagattcgagggcgccctgaagaaccagatgggccaggtggagatcgaggaccaggtggagggcctgcagttcgtggccgagaagtacggcttcatcgacctgagcagagtggccatccacggctggagctacggcggcttcctgagcctgatgggcctgatccacaagccccaggtgttcaaggtggccatcgccggcgcccccgtgaccgtgtggatggcctacgacaccggctacaccgagagatacatggacgtgcccgagaacaaccagcacggctacgaggccggcagcgtggccctgcacgtggagaagctgcccaacgagcccaacagactgctgatcctgcacggcttcctggacgagaacgtgcacttcttccacaccaacttcctggtgagccagctgatcagagccggcaagccctaccagctgcagatctaccccaacgagagacacagcatcagatgccccgagagcggcgagcactacgaggtgaccctgctgcacttcctgcaggagtacctgtag

SEQ ID NO: 9443 - DNA, 1533 bp, synthetic construct
  source 1..1533: mol_type = other DNA; note = Synthetic coding sequence
atggccgccgagctggtggaggccaagaacatggtgatgagcttcagagtgagcgacctgcagatgctgctgggcttcgtgggcagaagcaagagcggcctgaagcacgagctggtgaccagagccctgcagctggtgcagttcgactgcagccccgagctgttcaagaagatcaaggagctgtacgagaccagatacgccaagaagaacagcgagcccgccccccagccccacagacccctggaccccctgaccatgcacagcacctacgacagagccggcgccgtgcccagaacccccctggccggccccaacatcgactaccccgtgctgtacggcaagtacctgaacggcctgggcagactgcccgccaagaccctgaagcccgaggtgagactggtgaagctgcccttcttcaacatgctggacgagctgctgaagcccaccgagctggtgccccagaacaacgagaagctgcaggagagcccctgcatcttcgccctgacccccagacaggtggagctgatcagaaacagcagagagctgcagcccggcgtgaaggccgtgcaggtggtgctgagaatctgctacagcgacaccagctgcccccaggaggaccagtacccccccaacatcgccgtgaaggtgaaccacagctactgcagcgtgcccggctactaccccagcaacaagcccggcgtggagcccaagagaccctgcagacccatcaacctgacccacctgatgtacctgagcagcgccaccaacagaatcaccgtgacctggggcaactacggcaagagctacagcgtggccctgtacctggtgagacagctgaccagcagcgagctgctgcagagactgaagaccatcggcgtgaagcaccccgagctgtgcaaggccctggtgaaggagaagctgagactggaccccgacagcgagatcgccaccaccggcgtgagagtgagcctgatctgccccctggtgaagatgagactgagcgtgccctgcagagccgagacctgcgcccacctgcagtgcttcgacgccgtgttctacctgcagatgaacgagaagaagcccacctggatgtgccccgtgtgcgacaagcccgccccctacgaccagctgatcatcgacggcctgctgagcaagatcctgagcgagtgcgaggacgccgacgagatcgagtacctggtggacggcagctggtgccccatcagagccgagaaggagagaagctgcagcccccagggcgccatcctggtgctgggccccagcgacgccaacggcctgctgcccgcccccagcgtgaacggcagcggcgccctgggcagcaccggcggcggcggccccgtgggcagcatggagaacggcaagcccggcgccgacgtggtggacctgaccctggacagcagcagcagcagcgaggacgaggaggaggaggaggaggaggaggaggacgaggacgaggagggccccagacccaagagaagatgccccttccagaagggcctggtgcccgcctgctag

SEQ ID NO: 9444 - DNA, 684 bp, synthetic construct
  source 1..684: mol_type = other DNA; note = Synthetic coding sequence
atggccgcccagagacccctgagagtgctgtgcctggccggcttcagacagagcgagagaggcttcagagagaagaccggcgccctgagaaaggccctgagaggcagagccgagctggtgtgcctgagcggcccccaccccgtgcccgacccccccggccccgagggcgccagaagcgacttcggcagctgcccccccgaggagcagcccagaggctggtggttcagcgagcaggaggccgacgtgttcagcgccctggaggagcccgccgtgtgcagaggcctggaggagagcctgggcatggtggcccaggccctgaacagactgggccccttcgacggcctgctgggcttcagccagggcgccgccctggccgccctggtgtgcgccctgggccaggccggcgaccccagattccccctgcccagattcatcctgctggtgagcggcttctgccccagaggcatcggcttcaaggagagcatcctgcagagacccctgagcctgcccagcctgcacgtgttcggcgacaccgacaaggtgatccccagccaggagagcgtgcagctggccagccagttccccggcgccatcaccctgacccacagcggcggccacttcatccccgccgccgccccccagagacaggcctacctgaagttcctggaccagttcgccgagtag

SEQ ID NO: 9445 - DNA, 1656 bp, synthetic construct
  source 1..1656: mol_type = other DNA; note = Synthetic coding sequence
atggaggaggccgagctggtgaagggcagactgcaggccatcaccgacaagagaaagatccaggaggagatcagccagaagagactgaagatcgaggaggacaagctgaagcaccagcacctgaagaagaaggccctgagagagaagtggctgctggacggcatcagcagcggcaaggagcaggaggagatgaagaagcagaaccagcaggaccagcaccagatccaggtgctggagcagagcatcctgagactggagaaggagatccaggacctggagaaggccgagctgcagatcagcaccaaggaggaggccatcctgaagaagctgaagagcatcgagagaaccaccgaggacatcatcagaagcgtgaaggtggagagagaggagagagccgaggagagcatcgaggacatctacgccaacatccccgacctgcccaagagctacatccccagcagactgagaaaggagatcaacgaggagaaggaggacgacgagcagaacagaaaggccctgtacgccatggagatcaaggtggagaaggacctgaagaccggcgagagcaccgtgctgagcagcatccccctgcccagcgacgacttcaagggcaccggcatcaaggtgtacgacgacggccagaagagcgtgtacgccgtgagcagcaaccacagcgccgcctacaacggcaccgacggcctggcccccgtggaggtggaggagctgctgagacaggccagcgagagaaacagcaagagccccaccgagtaccacgagcccgtgtacgccaaccccttctacagacccaccaccccccagagagagaccgtgacccccggccccaacttccaggagagaatcaagatcaagaccaacggcctgggcatcggcgtgaacgagagcatccacaacatgggcaacggcctgagcgaggagagaggcaacaacttcaaccacatcagccccatcccccccgtgccccaccccagaagcgtgatccagcaggccgaggagaagctgcacaccccccagaagagactgatgaccccctgggaggagagcaacgtgatgcaggacaaggacgcccccagccccaagcccagactgagccccagagagaccatcttcggcaagagcgagcaccagaacagcagccccacctgccaggaggacgaggaggacgtgagatacaacatcgtgcacagcctgccccccgacatcaacgacaccgagcccgtgaccatgatcttcatgggctaccagcaggccgaggacagcgaggaggacaagaagttcctgaccggctacgacggcatcatccacgccgagctggtggtgatcgacgacgaggaggaggaggacgagggcgaggccgagaagcccagctaccaccccatcgccccccacagccaggtgtaccagcccgccaagcccacccccctgcccagaaagagaagcgaggccagcccccacgagaacaccaaccacaagagcccccacaagaacagcatcagcctgaaggagcaggaggagagcctgggcagccccgtgcaccacagccccttcgacgcccagaccaccggcgacggcaccgaggaccccagcctgaccgccctgagaatgagaatggccaagctgggcaagaaggtgatctag

SEQ ID NO: 9446 - DNA, 1701 bp, synthetic construct
  source 1..1701: mol_type = other DNA; note = Synthetic coding sequence
atgttcgtgagcgacttcagaaaggagttctacgaggtggtgcagagccagagagtgctgctgttcgtggccagcgacgtggacgccctgtgcgcctgcaagatcctgcaggccctgttccagtgcgaccacgtgcagtacaccctggtgcccgtgagcggctggcaggagctggagaccgccttcctggagcacaaggagcagttccactacttcatcctgatcaactgcggcgccaacgtggacctgctggacatcctgcagcccgacgaggacaccatcttcttcgtgtgcgacacccacagacccgtgaacgtggtgaacgtgtacaacgacacccagatcaagctgctgatcaagcaggacgacgacctggaggtgcccgcctacgaggacatcttcagagacgaggaggaggacgaggagcacagcggcaacgacagcgacggcagcgagcccagcgagaagagaaccagactggaggaggagatcgtggagcagaccatgagaagaagacagagaagagagtgggaggccagaagaagagacatcctgttcgactacgagcagtacgagtaccacggcaccagcagcgccatggtgatgttcgagctggcctggatgctgagcaaggacctgaacgacatgctgtggtgggccatcgtgggcctgaccgaccagtgggtgcaggacaagatcacccagatgaagtacgtgaccgacgtgggcgtgctgcagagacacgtgagcagacacaaccacagaaacgaggacgaggagaacaccctgagcgtggactgcaccagaatcagcttcgagtacgacctgagactggtgctgtaccagcactggagcctgcacgacagcctgtgcaacaccagctacaccgccgccagattcaagctgtggagcgtgcacggccagaagagactgcaggagttcctggccgacatgggcctgcccctgaagcaggtgaagcagaagttccaggccatggacatcagcctgaaggagaacctgagagagatgatcgaggagagcgccaacaagttcggcatgaaggacatgagagtgcagaccttcagcatccacttcggcttcaagcacaagttcctggccagcgacgtggtgttcgccaccatgagcctgatggagagccccgagaaggacggcagcggcaccgaccacttcatccaggccctggacagcctgagcagaagcaacctggacaagctgtaccacggcctggagctggccaagaagcagctgagagccacccagcagaccatcgccagctgcctgtgcaccaacctggtgatcagccagggccccttcctgtactgcagcctgatggagggcacccccgacgtgatgctgttcagcagacccgccagcctgagcctgctgagcaagcacctgctgaagagcttcgtgtgcagcaccaagaacagaagatgcaagctgctgcccctggtgatggccgcccccctgagcatggagcacggcaccgtgaccgtggtgggcatcccccccgagaccgacagcagcgacagaaagaacttcttcggcagagccttcgagaaggccgccgagagcaccagcagcagaatgctgcacaaccacttcgacctgagcgtgatcgagctgaaggccgaggacagaagcaagttcctggacgccctgatcagcctgctgagctag

SEQ ID NO: 9447 - DNA, 1461 bp, synthetic construct
  source 1..1461: mol_type = other DNA; note = Synthetic coding sequence
atgagcgtgacctacgacgacagcgtgggcgtggaggtgagcagcgacagcttctgggaggtgggcaactacaagagaaccgtgaagagaatcgacgacggccacagactgtgcagcgacctgatgaactgcctgcacgagagagccagaatcgagaaggcctacgcccagcagctgaccgagtgggccagaagatggagacagctggtggagaagggcccccagtacggcaccgtggagaaggcctggatggccttcatgagcgaggccgagagagtgagcgagctgcacctggaggtgaaggccagcctgatgaacgacgacttcgagaagatcaagaactggcagaaggaggccttccacaagcagatgatgggcggcttcaaggagaccaaggaggccgaggacggcttcagaaaggcccagaagccctgggccaagaagctgaaggaggtggaggccgccaagaaggcccaccacgccgcctgcaaggaggagaagctggccatcagcagagaggccaacagcaaggccgaccccagcctgaaccccgagcagctgaagaagctgcaggacaagatcgagaagtgcaagcaggacgtgctgaagaccaaggagaagtacgagaagagcctgaaggagctggaccagggcaccccccagtacatggagaacatggagcaggtgttcgagcagtgccagcagttcgaggagaagagactgagattcttcagagaggtgctgctggaggtgcagaagcacctggacctgagcaacgtggccggctacaaggccatctaccacgacctggagcagagcatcagagccgccgacgccgtggaggacctgagatggttcagagccaaccacggccccggcatggccatgaactggccccagttcgaggagtggagcgccgacctgaacagaaccctgagcagaagagagaagaagaaggccaccgacggcgtgaccctgaccggcatcaaccagaccggcgaccagagcctgcccagcaagcccagcagcaccctgaacgtgcccagcaaccccgcccagagcgcccagagccagagcagctacaaccccttcgaggacgaggacgacaccggcagcaccgtgagcgagaaggacgacaccaaggccaagaacgtgagcagctacgagaagacccagagctaccccaccgactggagcgacgacgagagcaacaaccccttcagcagcaccgacgccaacggcgacagcaaccccttcgacgacgacgccaccagcggcaccgaggtgagagtgagagccctgtacgactacgagggccaggagcacgacgagctgagcttcaaggccggcgacgagctgaccaagatggaggacgaggacgagcagggctggtgcaagggcagactggacaacggccaggtgggcctgtaccccgccaactacgtggaggccatccagtag

SEQ ID NO: 9448 - DNA, 2262 bp, synthetic construct
  source 1..2262: mol_type = other DNA; note = Synthetic coding sequence
atgatggaggagagagccgccgccgccgtggccgccgccgccagcagctgcagacccctgggcagcggcgccggccccggccccaccggcgccgcccccgtgagcgcccccgcccccggccccggccccgccggcaagggcggcggcggcggcggcagccccggccccaccgccggccccgagcccctgagcctgcccggcatcctgcacttcatccagcacgagtgggccagattcgaggccgagaaggccagatgggaggccgagagagccgagctgcaggcccaggtggccttcctgcagggcgagagaaagggccaggagaacctgaagaccgacctggtgagaagaatcaagatgctggagtacgccctgaagcaggagagagccaagtaccacaagctgaagttcggcaccgacctgaaccagggcgagaagaaggccgacgtgagcgagcaggtgagcaacggccccgtggagagcgtgaccctggagaacagccccctggtgtggaaggagggcagacagctgctgagacagtacctggaggaggtgggctacaccgacaccatcctggacatgagaagcaagagagtgagaagcctgctgggcagaagcctggagctgaacggcgccgtggagcccagcgagggcgcccccagagccccccccggccccgccggcctgagcggcggcgagagcctgctggtgaagcagatcgaggagcagatcaagagaaacgccgccggcaaggacggcaaggagagactgggcggcagcgtgctgggccagatccccttcctgcagaactgcgaggacgaggacagcgacgaggacgacgagctggacagcgtgcagcacaagaagcagagagtgaagctgcccagcaaggccctggtgcccgagatggaggacgaggacgaggaggacgacagcgaggacgccatcaacgagttcgacttcctgggcagcggcgaggacggcgagggcgcccccgaccccagaagatgcaccgtggacggcagcccccacgagctggagagcagaagagtgaagctgcagggcatcctggccgacctgagagacgtggacggcctgccccccaaggtgaccggccccccccccggcaccccccagcccagaccccacgaggacgtgttcatcatggacaccatcggcggcggcgaggtgagcctgggcgacctggccgacctgaccgtgaccaacgacaacgacctgagctgcgacctgagcgacagcaaggacgccttcaagaagacctggaaccccaagttcaccctgagaagccactacgacggcatcagaagcctggccttccaccacagccagagcgccctgctgaccgccagcgaggacggcaccctgaagctgtggaacctgcagaaggccgtgaccgccaagaagaacgccgccctggacgtggagcccatccacgccttcagagcccacagaggccccgtgctggccgtggccatgggcagcaacagcgagtactgctacagcggcggcgccgacgcctgcatccacagctggaagatccccgacctgagcatggacccctacgacggctacgaccccagcgtgctgagccacgtgctggagggccacggcgacgccgtgtggggcctggccttcagccccaccagccagagactggccagctgcagcgccgacggcaccgtgagaatctgggaccccagcagcagcagccccgcctgcctgtgcaccttccccaccgccagcgagcacggcgtgcccaccagcgtggccttcaccagcaccgagcccgcccacatcgtggccagcttcagaagcggcgacaccgtgctgtacgacatggaggtgggcagcgccctgctgaccctggagagcagaggcagcagcggccccacccagatcaaccaggtggtgagccaccccaaccagcccctgaccatcaccgcccacgacgacagaggcatcagattcctggacaacagaaccggcaagcccgtgcacagcatggtggcccacctggacgccgtgacctgcctggccgtggaccccaacggcgccttcctgatgagcggcagccacgactgcagcctgagactgtggagcctggacaacaagacctgcgtgcaggagatcaccgcccacagaaagaagcacgaggaggccatccacgccgtggcctgccaccccagcaaggccctgatcgccagcgccggcgccgacgccctggccaaggtgttcgtgtag

SEQ ID NO: 9449 - DNA, 1596 bp, synthetic construct
  source 1..1596: mol_type = other DNA; note = Synthetic coding sequence
atgagaatgcacaccagactgagcctgcccggccccccccaccacgtgggcgccgcctacccccccgccggcggcaacagaagcgagaacgccggcagctggggcggcgccggcgccagcagcgtggagcccctggccagaagagtggccagcggcgaggccaccctggccatggaccagcccgccggcctgcaggtggactacgtgttcagaggcgtggagcacgccgtgagagtgatggtgagcggccaggtgctggagctggaggtggaggacagaatgaccgccgaccagtggagaggcgagttcgacgccggcttcatcgaggacctgacccacaagaccggcaacttcaagcagttcaacatcttctgccacatgctggagagcgccctgacccagagcagcgagagcgtgaccctggacctgctgacctacaccgacctggagagcctgagaaacagaaagatgggcggcagacccggcagcctggcccccagaagcgcccagctgaacagcaagagatacctgatcctgatctacagcgtggagttcgacagaatccactaccccctgcccctgccctaccagggcaagcccgaccccgtggtgctgcagggcatcatcagaagcctgaaggaggagctgggcagactgcagggcctggacggccagaacaccagagacaccagagagaacgagatctggcacctgagagagcaggtgagcagactggccagcgagaagagagagctggaggcccagctgggcagaagcagagaggaggccctggccggcagagccgccagacaggaggccgaggccctgagaggcctggtgagaggcctggagctggagctgagacaggagagaggcctgggccacagagtggccggcagaagaggccaggactgcagaagactggccaaggagctggaggaggccaaggccagcgagagaagcctgagagccagactgaagaccctgaccagcgagctggccctgtacaagagaggcggcagaggcagcagaggcagaggcagacccgccagacccagccccagccccaccggcggcagagccctgagattcgaccccaccgccttcgtgaaggccaaggagagaaagcagagagagatccagatgaagcagcagcagagaaacagactgggcagcggcggcagcggcgacggccccagcgtgagctggagcagacagacccagccccccgccgccctgaccggcagaggcgacgcccccaacagaagcagaaacagaagcagcagcgtggacagcttcagaagcagatgcagcagcgccagcagctgcagcgacctggaggacttcagcgagagcctgagcagaggcggccacagaagaagaggcaagccccccagccccaccccctggagcggcagcaacatgaagagcccccccgtggagagaagccaccaccagaagagcctggccaacagcggcggctgggtgcccatcaaggagtacagcagcgagcaccaggccgccgacatggccgagatcgacgccagactgaaggccctgcaggagtacatgaacagactggacatgagaagctag

SEQ ID NO: 9450 - DNA, 1452 bp, synthetic construct
  source 1..1452: mol_type = other DNA; note = Synthetic coding sequence
atggccagcctgctgtggggcggcgacgccggcgccgccgagagcgagagactgaacagccacttcagcaacctgagccagcccagaaagaacctgtggggcatcaagagcaccgccgtgagaaacatcgacggcagcatcaacaacatcaacgaggacgacgaggaggacgtggtggacctggccgccaacagcctgctgaacaagctgatccaccagagcctggtggagagcagccacagagtggaggtgctgcagaaggaccccagcagccccctgtacagcgtgaagaccttcgaggagctgagactgaaggaggagctgctgaagggcatctacgccatgggcttcaacagacccagcaagatccaggagatggccctgcccatgatgctggcccaccccccccagaacctgatcgcccagagccagagcggcaccggcaagaccgccgccttcgtgctggccatgctgagcagagtgaacgccctggagctgttcccccagtgcctgtgcctggcccccacctacgagctggccctgcagaccggcagagtggtggagcagatgggcaagttctgcgtggacgtgcaggtgatgtacgccatcagaggcaacagaatccccagaggcaccgacatcaccaagcagatcatcatcggcacccccggcaccgtgctggactggtgcttcaagctgaagctgatcgacctgaccaagatcagagtgttcgtgctggacgaggccgacgtgatgatcgacacccagggcttcagcgaccacagcatcagaatccagagagccctgcccagcgagtgccagatgctgctgttcagcgccaccttcgaggacagcgtgtggcacttcgccgagagaatcatccccgaccccaacgtgatcaagctgagaaaggaggagctgaccctgaacaacatcagacagtactacgtgctgtgcgagcacagaaaggacaagtaccaggccctgtgcaacatctacggcagcatcaccatcggccaggccatcatcttctgccagaccagaagaaacgccaagtggctgaccgtggagatgatccaggacggccaccaggtgagcctgctgagcggcgagctgaccgtggagcagagagccagcatcatccagagattcagagacggcaaggagaaggtgctgatcaccaccaacgtgtgcgccagaggcatcgacgtgaagcaggtgaccatcgtggtgaacttcgacctgcccgtgaagcagggcgaggagcccgactacgagacctacctgcacagaatcggcagaaccggcagattcggcaagaagggcctggccttcaacatgatcgaggtggacgagctgcccagcctgatgaagatccaggaccacttcaacagcagcatcaagcagctgaacgccgaggacatggacgagatcgagaagatcgactactag

SEQ ID NO: 9451 - DNA, 1014 bp, synthetic construct
  source 1..1014: mol_type = other DNA; note = Synthetic coding sequence
atggccgacgccgccccccagctgggcaagagaaagagagagctggacgtggaggaggcccacgccgccagcaccgaggagaaggaggccggcgtgggcaacggcacctgcgcccccgtgagactgcccttcagcggcttcagactgcagaaggtgctgagagagagcgccagagacaagatcatcttcctgcacggcaaggtgaacgaggccagcggcgacggcgacggcgaggacgccgtggtgatcctggagaagacccccttccaggtggagcaggtggcccagctgctgaccggcagccccgagctgcagctgcagttcagcaacgacatctacagcacctaccacctgttcccccccagacagctgaacgacgtgaagaccaccgtggtgtaccccgccaccgagaagcacctgcagaagtacctgagacaggacctgagactgatcagagagaccggcgacgactacagaaacatcaccctgccccacctggagagccagagcctgagcatccagtgggtgtacaacatcctggacaagaaggccgaggccgacagaatcgtgttcgagaaccccgaccccagcgacggcttcgtgctgatccccgacctgaagtggaaccagcagcagctggacgacctgtacctgatcgccatctgccacagaagaggcatcagaagcctgagagacctgacccccgagcacctgcccctgctgagaaacatcctgcaccagggccaggaggccatcctgcagagatacagaatgaagggcgaccacctgagagtgtacctgcactacctgcccagctactaccacctgcacgtgcacttcaccgccctgggcttcgaggcccccggcagcggcgtggagagagcccacctgctggccgaggtgatcgagaacctggagtgcgaccccagacactaccagcagagaaccctgaccttcgccctgagagccgacgaccccctgctgaagctgctgcaggaggcccagcagagctag

SEQ ID NO: 9452 - DNA, 1782 bp, synthetic construct
  source 1..1782: mol_type = other DNA; note = Synthetic coding sequence
atgaagctgcaggccgtgatggagaccctgctgcagagacagcagagagccagacaggagctggaggccagacagcagctgccccccgacccccccgccgccccccccggcagagccagagccgcccccgacgaggacagagagcccgagagcgccagaatgcagagagcccagatggccgccctggccgccatgagagccgccgccgccggcctgggccaccccgccagccccggcggcagcgaggacggcccccccggcagcgaggaggaggacgccgccagagagggcacccccggcagccccggcagaggcagagagggccccggcgaggagcacttcgaggacatggccagcgacgaggacatgaagcccaagtgggaggaggaggagatggaggaggacctgggcgaggacgaggaggaggaggaggaggactacgaggacgaggaggaggaggaggacgaggagggcctgggcccccccggccccgccagcctgggcaccaccgccctgttccccagaaaggcccagcccccccaggccttcagaggcgacggcgtgcccagagtgctgggcggccaggagagacccggccccggccccgcccaccccggcggcgccgcccacgtggccccccagctgcagccccccgaccacggcgactggacctacgaggagcagttcaagcagctgtacgagctggacggcgaccccaagagaaaggagttcctggacgacctgttcagcttcatgcagaagagaggcacccccgtgaacagaatccccatcatggccaagcaggtgctggacctgttcatgctgtacgtgctggtgaccgagaagggcggcctggtggaggtgatcaacaagaagctgtggagagagatcaccaagggcctgaacctgcccaccagcatcaccagcgccgccttcaccctgagaacccagtacatgaagtacctgtacccctacgagtgcgagaagagaggcctgagcaaccccaacgagctgcaggccgccatcgacagcaacagaagagagggcagaagacagagcttcggcggcagcctgttcgcctacagccccggcggcgcccacggcatgctgagcagccccaagctgcccgtgagcagcctgggcctggccgccagcaccaacggcagcagcatcacccccgcccccaagatcaagaaggaggaggacagcgccatccccatcaccgtgcccggcagactgcccgtgagcctggccggccaccccgtggtggccgcccaggccgccgccgtgcaggccgccgccgcccaggccgccgtggccgcccaggccgccgccctggagcagctgagagagaagctggagagcgccgagccccccgagaagaagatggccctggtggccgacgagcagcagagactgatgcagagagccctgcagcagaacttcctggccatggccgcccagctgcccatgagcatcagaatcaacagccaggccagcgagagcagacaggacagcgccgtgaacctgaccggcaccaacggcagcaacagcatcagcatgagcgtggagatcaacggcatcatgtacaccggcgtgctgttcgcccagccccccgcccccacccccaccagcgcccccaacaagggcggcggcggcggcggcggcagcagcagcaacgccggcggcagaggcggcaacaccggcaccagcggcggccaggccggccccgccggcctgagcacccccagcaccagcaccagcaacaacagcctgccctag

SEQ ID NO: 9453 - DNA, 6192 bp, synthetic construct
  source 1..6192: mol_type = other DNA; note = Synthetic coding sequence
atggccgacggcgcccccagaccccagctgtacagaagcgtgagcttcaagctgctggagagatggagcggcggccccggcctgagagaggaggacaccgacacccccggcctgagaagaagagccagctgcagacccaccaccgccgccagaggccagcccagcagaagagtgagcaagctggccagcggccccctggccgcccccgcccagcccagacccctgagaagcctgagccccagcgtgagacagctgagcagaagattcgacgcccccagactggacgacggcagcgccggcaccagagacggcggcgtgctgcccgccgccgccgaggaggccgccgagggccccgccagaggcgcctggcccagcgtgaccgagatgagaaagctgttcggcggccccggcagcagaagacccagcgccgacagcgagagccccggcacccccagccccgacggcgccgcctgggagccccccgccagagagagcagacagccccccacccccccccccagaacctgcttccccctggccggcctgagaagcgccagacccctgaccggccccgagaccgagggcagactgagaagaccccagcagcagcaggagagagcccagagacccgccgacggcctgcacagctggcacatcttcagccagccccaggccggcgccagagccagctgcagcagcagcagcatcgccgccagctaccccgtgagcagaagcagagccgccagcagcagcgaggaggaggaggagggccccccccagctgcccggcgcccagagccccgcctaccacggcggccacagcagcggcagcgacgacgacagagacggcgagggcggccacagatggggcggcagacccggcctgagacccggcagcagcctgctggaccaggactgcagacccgacagcgacggcctgaacctgagcagcatgaacagcgccggcgtgagcggcagccccgagccccccaccagccccagagcccccagagaggagggcctgagagagtggggcagcggcagccccccctgcgtgcccggcccccaggagggcctgagacccatgagcgacagcgtgggcggcgccttcagagtggccaaggtgagcttccccagctacctggccagccccgccggcagcagaggcagcagcagatacagcagcaccgagaccctgaaggacgacgacctgtggagcagcagaggcagcggcggctggggcgtgtacagaagccccagcttcggcgccggcgagggcctgctgagaagccaggccagaaccagagccaagggccccggcggcaccagcagagccctgagagacggcggcttcgagcccgagaagagcagacagagaaagagcctgagcaaccccgacatcgccagcgagaccctgaccctgctgagcttcctgagaagcgacctgagcgagctgagagtgagaaagcccggcggcagcagcggcgacagaggcagcaaccccctggacggcagagacagccccagcgccggcggccccgtgggccagctggagcccatccccatccccgcccccgccagccccggcaccagacccaccctgaaggacctgaccgccaccctgagaagagccaagagcttcacctgcagcgagaagcccatggccagaagactgcccagaaccagcgccctgaagagcagcagcagcgagctgctgctgaccggccccggcgccgaggaggaccccctgcccctgatcgtgcaggaccagtacgtgcaggaggccagacaggtgttcgagaagatccagagaatgggcgcccagcaggacgacggcagcgacgccccccccggcagccccgactgggccggcgacgtgaccagaggccagagaagccaggaggagctgagcggccccgagagcagcctgaccgacgagggcatcggcgccgaccccgagccccccgtggccgccttctgcggcctgggcaccaccggcatgtggagacccctgagcagcagcagcgcccagaccaaccaccacggccccggcaccgaggacagcctgggcggctgggccctggtgagccccgagaccccccccacccccggcgccctgagaagaagaagaaaggtgccccccagcggcagcggcggcagcgagctgagcaacggcgaggccggcgaggcctacagaagcctgagcgaccccatcccccagagacacagagccgccaccagcgaggagcccaccggcttcagcgtggacagcaacctgctgggcagcctgagccccaagaccggcctgcccgccaccagcgccatggacgagggcctgaccagcggccacagcgactggagcgtgggcagcgaggagagcaagggctaccaggaggtgatccagagcatcgtgcagggccccggcaccctgggcagagtggtggacgacagaatcgccggcaaggcccccaagaagaagagcctgagcgaccccagcagaagaggcgagctggccggccccggcttcgagggccccggcggcgagcccatcagagaggtggagcccatgctgccccccagcagcagcgagcccatcctggtggagcagagagccgagcccgaggagcccggcgccaccagaagcagagcccagagcgagagagccctgcccgaggccctgcccccccccgccaccgcccacagaaacttccacctggaccccaagctggccgacatcctgagccccagactgatcagaagaggcagcaagaagagacccgccagaagcagccaccaggagctgagaagagacgagggcagccaggaccagaccggcagcctgagcagagccagacccagcagcagacacgtgagacacgccagcgtgcccgccaccttcatgcccatcgtggtgcccgagccccccaccagcgtgggcccccccgtggccgtgcccgagcccatcggcttccccaccagagcccaccccaccctgcaggcccccagcctggaggacgtgaccaagcagtacatgctgaacctgcacagcggcgaggtgcccgcccccgtgcccgtggacatgccctgcctgcccctggccgccccccccagcgccgaggccaagccccccgaggccgccagacccgccgacgagcccacccccgccagcaagtgctgcagcaagccccaggtggacatgagaaagcacgtggccatgaccctgctggacaccgagcagagctacgtggagagcctgagaaccctgatgcagggctacatgcagcccctgaagcagcccgagaacagcgtgctgtgcgaccccagcctggtggacgagatcttcgaccagatccccgagctgctggagcaccacgagcagttcctggagcaggtgagacactgcatgcagacctggcacgcccagcagaaggtgggcgccctgctggtgcagagcttcagcaaggacgtgctggtgaacatctacagcgcctacatcgacaacttcctgaacgccaaggacgccgtgagagtggccaaggaggccagacccgccttcctgaagttcctggagcagagcatgagagagaacaaggagaagcaggccctgagcgacctgatgatcaagcccgtgcagagaatccccagatacgagctgctggtgaaggacctgctgaagcacacccccgaggaccaccccgaccaccccctgctgctggaggcccagagaaacatcaagcaggtggccgagagaatcaacaagggcgtgagaagcgccgaggaggccgagagacacgccagagtgctgcaggagatcgaggcccacatcgagggcatggaggacctgcaggcccccctgagaagattcctgagacaggagatggtgatcgaggtgaaggccatcggcggcaagaaggacagaagcctgttcctgttcaccgacctgatcgtgtgcaccaccctgaagagaaagagcggcagcctgagaagaagcagcatgagcctgtacaccgccgccagcgtgatcgacaccgccagcaagtacaagatgctgtggaagctgcccctggaggacgccgacatcatcaagggcgccagccaggccaccaacagagagaacatccagaaggccatcagcagactggacgaggacctgaccaccctgggccagatgagcaagctgagcgagagcctgggcttcccccaccagagcctggacgacgccctgagagacctgagcgccgccatgcacagagacctgagcgagaagcaggccctgtgctacgccctgagcttcccccccaccaagctggagctgtgcgccaccagacccgagggcaccgacagctacatcttcgagttcccccaccccgacgccagactgggcttcgagcaggccttcgacgaggccaagagaaagctggccagcagcaagagctgcctggaccccgagttcctgaaggccatccccatcatgaagaccagaagcggcatgcagttcagctgcgccgcccccaccctgaacagctgccccgagcccagccccgaggtgtgggtgtgcaacagcgacggctacgtgggccaggtgtgcctgctgagcctgagagccgagcccgacgtggaggcctgcatcgccgtgtgcagcgccagaatcctgtgcatcggcgccgtgcccggcctgcagcccagatgccacagagagcccccccccagcctgagaagcccccccgagaccgcccccgagcccgccggccccgagctggacgtggaggccgccgccgacgaggaggccgccaccctggccgagcccggcccccagccctgcctgcacatcagcatcgccggcagcggcctggagatgacccccggcctgggcgagggcgaccccagacccgagctggtgcccttcgacagcgacagcgacgacgagagcagccccagccccagcggcaccctgcagagccaggccagcagaagcaccatcagcagcagcttcggcaacgaggagacccccagcagcaaggaggccaccgccgagaccaccagcagcgaggaggagcaggagcccggcttcctgcccctgagcggcagcttcggccccggcggcccctgcggcaccagccccatggacggcagagccctgagaagaagcagccacggcagcttcaccagaggcagcctggaggacctgctgagcgtggaccccgaggcctaccagagcagcgtgtggctgggcaccgaggacggctgcgtgcacgtgtaccagagcagcgacagcatcagagacagaagaaacagcatgaagctgcagcacgccgccagcgtgacctgcatcctgtacctgaacaaccaggtgttcgtgagcctggccaacggcgagctggtggtgtaccagagagaggccggccacttctgggacccccagaacttcaagagcgtgaccctgggcacccagggcagccccatcaccaagatggtgagcgtgggcggcagactgtggtgcggctgccagaacagagtgctggtgctgagccccgacaccctgcagctggagcacatgttctacgtgggccaggacagcagcagatgcgtggcctgcatggtggacagcagcctgggcgtgtgggtgaccctgaagggcagcgcccacgtgtgcctgtaccaccccgacaccttcgagcagctggccgaggtggacgtgaccccccccgtgcacagaatgctggccggcagcgacgccatcatcagacagcacaaggccgcctgcctgagaatcaccgccctgctggtgtgcgaggagctgctgtgggtgggcaccagcgccggcgtggtgctgaccatgcccaccagccccggcaccgtgagctgccccagagcccccctgagccccaccggcctgggccagggccacaccggccacgtgagattcctggccgccgtgcagctgcccgacggcttcaacctgctgtgccccacccccccccccccccccgacaccggccccgagaagctgcccagcctggagcacagagacagcccctggcacagaggccccgcccccgccagacccaagatgctggtgatcagcggcggcgacggctacgaggacttcagactgagcagcggcggcggcagcagcagcgagaccgtgggcagagacgacagcaccaaccacctgctgctgtggagagtgtag

SEQ ID NO: 9454 - DNA, 2499 bp, synthetic construct
  source 1..2499: mol_type = other DNA; note = Synthetic coding sequence
atgagcgaggccggcggcgccggccccggcggctgcggcgccggcgccggcgccggcgccggccccggcgccctgcccccccagcccgccgccctgccccccgcccccccccagggcagcccctgcgccgccgccgccggcggcagcggcgcctgcggccccgccaccgccgtggccgccgccggcaccgccgagggccccggcggcggcggcagcgccagaatcgccgtgaagaaggcccagctgagaagcgcccccagagccaagaagctggagaagctgggcgtgtacagcgcctgcaaggccgaggagagctgcaagtgcaacggctggaagaaccccaaccccagccccaccccccccagagccgacctgcagcagatcatcgtgagcctgaccgagagctgcagaagctgcagccacgccctggccgcccacgtgagccacctggagaacgtgagcgaggaggagatgaacagactgctgggcatcgtgctggacgtggagtacctgttcacctgcgtgcacaaggaggaggacgccgacaccaagcaggtgtacttctacctgttcaagctgctgagaaagagcatcctgcagagaggcaagcccgtggtggagggcagcctggagaagaagccccccttcgagaagcccagcatcgagcagggcgtgaacaacttcgtgcagtacaagttcagccacctgcccgccaaggagagacagaccatcgtggagctggccaagatgttcctgaacagaatcaactactggcacctggaggcccccagccagagaagactgagaagccccaacgacgacatcagcggctacaaggagaactacaccagatggctgtgctactgcaacgtgccccagttctgcgacagcctgcccagatacgagaccacccaggtgttcggcagaaccctgctgagaagcgtgttcaccgtgatgagaagacagctgctggagcaggccagacaggagaaggacaagctgcccctggagaagagaaccctgatcctgacccacttccccaagttcctgagcatgctggaggaggaggtgtacagccagaacagccccatctgggaccaggacttcctgagcgccagcagcagaaccagccagctgggcatccagaccgtgatcaaccccccccccgtggccggcaccatcagctacaacagcaccagcagcagcctggagcagcccaacgccggcagcagcagccccgcctgcaaggccagcagcggcctggaggccaaccccggcgagaagagaaagatgaccgacagccacgtgctggaggaggccaagaagcccagagtgatgggcgacatccccatggagctgatcaacgaggtgatgagcaccatcaccgaccccgccgccatgctgggccccgagaccaacttcctgagcgcccacagcgccagagacgaggccgccagactggaggagagaagaggcgtgatcgagttccacgtggtgggcaacagcctgaaccagaagcccaacaagaagatcctgatgtggctggtgggcctgcagaacgtgttcagccaccagctgcccagaatgcccaaggagtacatcaccagactggtgttcgaccccaagcacaagaccctggccctgatcaaggacggcagagtgatcggcggcatctgcttcagaatgttccccagccagggcttcaccgagatcgtgttctgcgccgtgaccagcaacgagcaggtgaagggctacggcacccacctgatgaaccacctgaaggagtaccacatcaagcacgacatcctgaacttcctgacctacgccgacgagtacgccatcggctacttcaagaagcagggcttcagcaaggagatcaagatccccaagaccaagtacgtgggctacatcaaggactacgagggcgccaccctgatgggctgcgagctgaaccccagaatcccctacaccgagttcagcgtgatcatcaagaagcagaaggagatcatcaagaagctgatcgagagaaagcaggcccagatcagaaaggtgtaccccggcctgagctgcttcaaggacggcgtgagacagatccccatcgagagcatccccggcatcagagagaccggctggaagcccagcggcaaggagaagagcaaggagcccagagaccccgaccagctgtacagcaccctgaagagcatcctgcagcaggtgaagagccaccagagcgcctggcccttcatggagcccgtgaagagaaccgaggcccccggctactacgaggtgatcagattccccatggacctgaagaccatgagcgagagactgaagaacagatactacgtgagcaagaagctgttcatggccgacctgcagagagtgttcaccaactgcaaggagtacaacccccccgagagcgagtactacaagtgcgccaacatcctggagaagttcttcttcagcaagatcaaggaggccggcctgatcgacaagtag

SEQ ID NO: 9455 - DNA, 4950 bp, synthetic construct
  source 1..4950: mol_type = other DNA; note = Synthetic coding sequence
atggccggcggcagaggcgcccccggcagaggcagagacgagccccccgagagctacccccagagacaggaccacgagctgcaggccctggaggccatctacggcgccgacttccaggacctgagacccgacgcctgcggccccgtgaaggagccccccgagatcaacctggtgctgtacccccagggcctgaccggcgaggaggtgtacgtgaaggtggacctgagagtgaagtgcccccccacctaccccgacgtggtgcccgagatcgagctgaagaacgccaagggcctgagcaacgagagcgtgaacctgctgaagagcagactggaggagctggccaagaagcactgcggcgaggtgatgatcttcgagctggcctaccacgtgcagagcttcctgagcgagcacaacaagcccccccccaagagcttccacgaggagatgctggagagaagagcccaggaggagcagcagagactgctggaggccaagagaaaggaggagcaggagcagagagagatcctgcacgagatccagagaagaaaggaggagatcaaggaggagaagaagagaaaggagatggccaagcaggagagactggagatcgccagcctgagcaaccaggaccacaccagcaagaaggaccccggcggccacagaaccgccgccatcctgcacggcggcagccccgacttcgtgggcaacggcaagcacagagccaacagcagcggcagaagcagaagagagagacagtacagcgtgtgcaacagcgaggacagccccggcagctgcgagatcctgtacttcaacatgggcagccccgaccagctgatggtgcacaagggcaagtgcatcggcagcgacgagcagctgggcaagctggtgtacaacgccctggagaccgccaccggcggcttcgtgctgctgtacgagtgggtgctgcagtggcagaagaagatgggccccttcctgaccagccaggagaaggagaagatcgacaagtgcaagaagcagatccagggcaccgagaccgagttcaacagcctggtgaagctgagccaccccaacgtggtgagatacctggccatgaacctgaaggagcaggacgacagcatcgtggtggacatcctggtggagcacatcagcggcgtgagcctggccgcccacctgagccacagcggccccatccccgtgcaccagctgagaagatacaccgcccagctgctgagcggcctggactacctgcacagcaacagcgtggtgcacaaggtgctgagcgccagcaacgtgctggtggacgccgagggcaccgtgaagatcaccgactacagcatcagcaagagactggccgacatctgcaaggaggacgtgttcgagcagaccagagtgagattcagcgacaacgccctgccctacaagaccggcaagaagggcgacgtgtggagactgggcctgctgctgctgagcctgagccagggccaggagtgcggcgagtaccccgtgaccatccccagcgacctgcccgccgacttccaggacttcctgaagaagtgcgtgtgcctggacgacaaggagagatggagcccccagcagctgctgaagcacagcttcatcaacccccagcccaagatgcccctggtggagcagagccccgaggacagcgagggccaggactacgtggagaccgtgatccccagcaacagactgcccagcgccgccttcttcagcgagacccagagacagttcagcagatacttcatcgagttcgaggagctgcagctgctgggcaagggcgccttcggcgccgtgatcaaggtgcagaacaagctggacggctgctgctacgccgtgaagagaatccccatcaaccccgccagcagacagttcagaagaatcaagggcgaggtgaccctgctgagcagactgcaccacgagaacatcgtgagatactacaacgcctggatcgagagacacgagagacccgccggccccggcacccccccccccgacagcggccccctggccaaggacgacagagccgccagaggccagcccgccagcgacaccgacggcctggacagcgtggaggccgccgcccccccccccatcctgagcagcagcgtggagtggagcaccagcggcgagagaagcgccagcgccagattccccgccaccggccccggcagcagcgacgacgaggacgacgacgaggacgagcacggcggcgtgttcagccagagcttcctgcccgccagcgacagcgagagcgacatcatcttcgacaacgaggacgagaacagcaagagccagaaccaggacgaggactgcaacgagaagaacggctgccacgagagcgagcccagcgtgaccaccgaggccgtgcactacctgtacatccagatggagtactgcgagaagagcaccctgagagacaccatcgaccagggcctgtacagagacaccgtgagactgtggagactgttcagagagatcctggacggcctggcctacatccacgagaagggcatgatccacagagacctgaagcccgtgaacatcttcctggacagcgacgaccacgtgaagatcggcgacttcggcctggccaccgaccacctggccttcagcgccgacagcaagcaggacgaccagaccggcgacctgatcaagagcgaccccagcggccacctgaccggcatggtgggcaccgccctgtacgtgagccccgaggtgcagggcagcaccaagagcgcctacaaccagaaggtggacctgttcagcctgggcatcatcttcttcgagatgagctaccaccccatggtgaccgccagcgagagaatcttcgtgctgaaccagctgagagaccccaccagccccaagttccccgaggacttcgacgacggcgagcacgccaagcagaagagcgtgatcagctggctgctgaaccacgaccccgccaagagacccaccgccaccgagctgctgaagagcgagctgctgccccccccccagatggaggagagcgagctgcacgaggtgctgcaccacaccctgaccaacgtggacggcaaggcctacagaaccatgatggcccagatcttcagccagagaatcagccccgccatcgactacacctacgacagcgacatcctgaagggcaacttcagcatcagaaccgccaagatgcagcagcacgtgtgcgagaccatcatcagaatcttcaagagacacggcgccgtgcagctgtgcacccccctgctgctgcccagaaacagacagatctacgagcacaacgaggccgccctgttcatggaccacagcggcatgctggtgatgctgcccttcgacctgagaatccccttcgccagatacgtggccagaaacaacatcctgaacctgaagagatactgcatcgagagagtgttcagacccagaaagctggacagattccaccccaaggagctgctggagtgcgccttcgacatcgtgaccagcaccaccaacagcttcctgcccaccgccgagatcatctacaccatctacgagatcatccaggagttccccgccctgcaggagagaaactacagcatctacctgaaccacaccatgctgctgaaggccatcctgctgcactgcggcatccccgaggacaagctgagccaggtgtacatcatcctgtacgacgccgtgaccgagaagctgaccagaagagaggtggaggccaagttctgcaacctgagcctgagcagcaacagcctgtgcagactgtacaagttcatcgagcagaagggcgacctgcaggacctgatgcccaccatcaacagcctgatcaagcagaagaccggcatcgcccagctggtgaagtacggcctgaaggacctggaggaggtggtgggcctgctgaagaagctgggcatcaagctgcaggtgctgatcaacctgggcctggtgtacaaggtgcagcagcacaacggcatcatcttccagttcgtggccttcatcaagagaagacagagagccgtgcccgagatcctggccgccggcggcagatacgacctgctgatcccccagttcagaggcccccaggccctgggccccgtgcccaccgccatcggcgtgagcatcgccatcgacaagatcagcgccgccgtgctgaacatggaggagagcgtgaccatcagcagctgcgacctgctggtggtgagcgtgggccagatgagcatgagcagagccatcaacctgacccagaagctgtggaccgccggcatcaccgccgagatcatgtacgactggagccagagccaggaggagctgcaggagtactgcagacaccacgagatcacctacgtggccctggtgagcgacaaggagggcagccacgtgaaggtgaagagcttcgagaaggagagacagaccgagaagagagtgctggagaccgagctggtggaccacgtgctgcagaagctgagaaccaaggtgaccgacgagagaaacggcagagaggccagcgacaacctggccgtgcagaacctgaagggcagcttcagcaacgccagcggcctgttcgagatccacggcgccaccgtggtgcccatcgtgagcgtgctggcccccgagaagctgagcgccagcaccagaagaagatacgagacccaggtgcagaccagactgcagaccagcctggccaacctgcaccagaagagcagcgagatcgagatcctggccgtggacctgcccaaggagaccatcctgcagttcctgagcctggagtgggacgccgacgagcaggccttcaacaccaccgtgaagcagctgctgagcagactgcccaagcagagatacctgaagctggtgtgcgacgagatctacaacatcaaggtggagaagaaggtgagcgtgctgttcctgtacagctacagagacgactactacagaatcctgttctag

SEQ ID NO: 9456 - DNA, 5652 bp, synthetic construct
  source 1..5652: mol_type = other DNA; note = Synthetic coding sequence
atgcccgtgggcagaatcgagtgccccagcagccccagcttccccagagacatcagccacgagtgcagagtgtgcggcgtgaccgaggtgggcctgagcgcctacgccaagcacatcagcggccagctgcacaaggacaacgtggacgcccaggagagagaggacgacggcaagggcgaggaggaggaggaggactacttcgacaaggagctgatccagctgatcaagcagagaaaggagcagagcagacaggacgagcccagcaacagcaaccaggagatcaacagcgacgacagaagaccccagtggagaagagaggacagaatcccctaccaggacagagagagctacagccagcccgcctggcaccacagaggccccccccagagagactggaagtgggagaaggacggcttcaacaacaccagaaagaacagcttcccccacagcctgagaaacggcggcggccccagaggcagaagcggctggcacaagggcgtggccggcggcagcagcacctggttccacaaccacagcaacagcggcggcggctggctgagcaacagcggcgccgtggactggaaccacaacggcaccggcagaaacagcagctggctgagcgagggcaccggcggcttcagcagctggcacatgaacaacagcaacggcaactggaagagcagcgtgagaagcaccaacaactggaactacagcggccccggcgacaagttccagcccggcagaaacagaaacagcaactgccagatggaggacatgaccatgctgtggaacaagaagagcaacaagagcaacaagtacagccacgacagatacaactggcagagacaggagaacgacaagctgggcaccgtggccacctacagaggccccagcgagggcttcaccagcgacaagttccccagcgagggcctgctggacttcaacttcgagcagctggagagccagaccaccaagcaggccgacaccgccaccagcaaggtgagcggcaagaacggcagcgccgccagagagaagcccagaagatggaccccctaccccagccagaagaccctggacctgcagagcggcctgaaggacatcaccggcaacaagagcgagatgatcgagaagcccctgttcgacttcagcctgatcaccaccggcatccaggagccccagaccgacgagaccagaaacagccccacccagaagacccagaaggagatccacaccggcagcctgaaccacaaggccagcagcgacagcgccgccagcttcgaggtggtgagacagtgccccaccgccgagaagcccgagcaggagcacacccccaacaagatgcccagcctgaagagccccctgctgccctgccccgccaccaagagcctgagccagaagcaggaccccaagaacatcagcaagaacaccaagaccaacttcttcagccccggcgagcacagcaaccccagcaacaagcccaccgtggaggacaaccacggcccctacatcagcaagctgagaagcagctgcccccacgtgctgaagggcaacaagagcaccttcggcagccagaagcagagcggcgacaacctgaacgacaccctgagaaaggccaaggaggtgctgcagtgccacgagagcctgcagaaccccctgctgagcaccagcaagagcaccagaaactacgccaaggccagcagaaacgtggaggagagcgagaagggcagcctgaagatcgagttccaggtgcacgccctggaggacgagagcgacggcgagaccagcgacaccgagaagcacggcaccaagatcggcaccctgggcagcgccaccaccgagctgctgagcggcagcaccagaaccgccgacgagaaggaggaggacgacagaatcctgaagaccagcagagagctgagcaccagcccctgcaaccccatcgtgagacagaaggagagcgagctgcagatgaccagcgccgccagcccccaccccggcctgctgctggacctgaagaccagcctggaggacgcccaggtggacgacagcatcaagagccacgtgagctacgagaccgagggcttcgagagcgccagcctggacgccgagctgcagaagagcgacatcagccagcccagcggccccctgctgcccgagctgagcaagctgggcttccccgccagcctgcagagagacctgaccagacacatcagcctgaagagcaagaccggcgtgcacctgcccgagcccaacctgaacagcgccagaagaatcagaaacatcagcggccacagaaagagcgagaccgagaaggagagcggcctgaagcccaccctgagacagatcctgaacgccagcagaagaaacgtgaactgggagcaggtgatccagcaggtgaccaagaagaagcaggagctgggcaagggcctgcccagattcggcatcgagatggtgcccctggtgcagaacgagcaggaggccctggacctggacggcgagcccgacctgagcagcctggagggcttccagtgggagggcgtgagcatcagcagcagccccggcctggccagaaagagaagcctgagcgagagcagcgtgatcatggacagagcccccagcgtgtacagcttcttcagcgaggagggcaccggcaaggagaacgagccccagcagatggtgagccccagcaacagcctgagagccggccagagccagaaggccaccatgcacctgaagcaggaggtgacccccagagccgccagcctgagaaccggcgagagagccgagaacgtggccacccagagaagacacagcgcccagctgagcagcgaccacatcatccccctgatgcacctggccaaggacctgaacagccaggagagaagcatcccccccagcgagaaccagaacagccaggagagcaacggcgagggcaactgcctgagcagcagcgccagcagcgccctggccatcagcagcctggccgacgccgccaccgacagcagctgcaccagcggcgccgagcagaacgacggccagagcatcagaaagaagagaagagccaccggcgacggcagcagccccgagctgcccagcctggagagaaagaacaagagaagaaagatcaagggcaagaaggagagaagccaggtggaccagctgctgaacatcagcctgagagaggaggagctgagcaagagcctgcagtgcatggacaacaacctgctgcaggccagagccgccctgcagaccgcctacgtggaggtgcagagactgctgatgctgaagcagcagatcaccatggagatgagcgccctgagaacccacagaatccagatcctgcagggcctgcaggagacctacgagcccagcgagcaccccgaccaggtgccctgcagcctgaccagagagagaagaaacagcagaagccagaccagcatcgacgccgccctgctgcccacccccttcttccccctgttcctggagccccccagcagccacgtgagccccagccccaccggcgccagcctgcagatcaccaccagccccaccttccagacccacggcagcgtgcccgcccccgacagcagcgtgcagatcaagcaggagcccatgagccccgagcaggacgagaacgtgaacgccgtgccccccagcagcgcctgcaacgtgagcaaggagctgctggaggccaacagagagatcagcgacagctgccccgtgtaccccgtgatcaccgccagactgagcctgcccgagagcaccgagagcttccacgagcccagccaggagctgaagttcagcgtggagcagagaaacaccagaaacagagagaacagccccagcagccagagcgccggcctgagcagcatcaacaaggagggcgaggagcccaccaagggcaacagcggcagcgaggcctgcaccagcagcttcctgagactgagcttcgccagcgagacccccctggagaaggagccccacagccccgccgaccagcccgagcagcaggccgagagcaccctgaccagcgccgagaccagaggcagcaagaagaagaagaagctgagaaagaagaagagcctgagagccgcccacgtgcccgagaacagcgacaccgagcaggacgtgctgaccgtgaagcccgtgagaaaggtgaaggccggcaagctgatcaagggcggcaaggtgaccaccagcacctgggaggacagcagaaccggcagagagcaggagagcgtgagagacgagcccgacagcgacagcagcctggaggtgctggagatccccaacccccagctggaggtggtggccatcgacagcagcgagagcggcgaggagaagcccgacagccccagcaagaaggacatctggaacagcaccgagcagaaccccctggagaccagcagaagcggctgcgacgaggtgagcagcaccagcgagatcggcaccagatacaaggacggcatccccgtgagcgtggccgagacccagaccgtgatcagcagcatcaagggcagcaagaacagcagcgagatcagcagcgagcccggcgacgacgacgagcccaccgagggcagcttcgagggccaccaggccgccgtgaacgccatccagatcttcggcaacctgctgtacacctgcagcgccgacaagaccgtgagagtgtacaacctggtgagcagaaagtgcatcggcgtgttcgagggccacaccagcaaggtgaactgcctgctggtgacccagaccagcggcaagaacgccgccctgtacaccggcagcagcgaccacaccatcagatgctacaacgtgaagagcagagagtgcgtggagcagctgcagctggaggacagagtgctgtgcctgcacagcagatggagaatcctgtacgccggcctggccaacggcaccgtggtgaccttcaacatcaagaacaacaagagactggagatcttcgagtgccacggccccagagccgtgagctgcctggccaccgcccaggagggcgccagaaagctgctggtggtgggcagctacgactgcaccatcagcgtgagagacgccagaaacggcctgctgctgagaaccctggagggccacagcaagaccatcctgtgcatgaaggtggtgaacgacctggtgttcagcggcagcagcgaccagagcgtgcacgcccacaacatccacaccggcgagctggtgagaatctacaagggccacaaccacgccgtgaccgtggtgaacatcctgggcaaggtgatggtgaccgcctgcctggacaagttcgtgagagtgtacgagctgcagagccacgacagactgcaggtgtacggcggccacaaggacatgatcatgtgcatgaccatccacaagagcatgatctacaccggctgctacgacggcagcatccaggccgtgagactgaacctgatgcagaactacagatgctggtggcacggctgcagcctgatcttcggcgtggtggaccacctgaagcagcacctgctgaccgaccacaccaaccccaacttccagaccctgaagtgcagatggaagaactgcgacgccttcttcaccgccagaaagggcagcaagcaggacgccgccggccacatcgagagacacgccgaggacgacagcaagatcgacagctag

SEQ ID NO: 9457 - DNA, 588 bp, synthetic construct
  source 1..588: mol_type = other DNA; note = Synthetic coding sequence
atggccgagcccgtgcaggaggagctgagcgtgctggccgccatcttctgcagaccccacgagtgggaggtgctgagcagaagcgagaccgacggcaccgtgttcagaatccacaccaaggccgagggcttcatggacgtggacatccccctggagctggtgttccacctgcccgtgaactaccccagctgcctgcccggcatcagcatcaacagcgagcagctgaccagagcccagtgcgtgaccgtgaaggagaacctgctggagcaggccgagagcctgctgagcgagcccatggtgcacgagctggtgctgtggatccagcagaacctgagacacatcctgagccagcccgagaccggcagcggcagcgagaagtgcaccttcagcaccagcaccaccatggacgacggcctgtggatcaccctgctgcacctggaccacatgagagccaagaccaagtacgtgaagatcgtggagaagtgggccagcgacctgagactgaccggcagactgatgttcatgggcaagatcatcctgatcctgctgcagggcgacagaaacaacctgaaggtgcccaagagctag

SEQ ID NO: 9458 - DNA, 1119 bp, synthetic construct
  source 1..1119: mol_type = other DNA; note = Synthetic coding sequence
atgagcagaagaagattcgactgcagaagcatcagcggcctgctgaccaccaccccccagatccccatcaagatggagaacttcaacaacttctacatcctgaccagcaaggagctgggcagaggcaagttcgccgtggtgagacagtgcatcagcaagagcaccggccaggagtacgccgccaagttcctgaagaagagaagaagaggccaggactgcagagccgagatcctgcacgagatcgccgtgctggagctggccaagagctgccccagagtgatcaacctgcacgaggtgtacgagaacaccagcgagatcatcctgatcctggagtacgccgccggcggcgagatcttcagcctgtgcctgcccgagctggccgagatggtgagcgagaacgacgtgatcagactgatcaagcagatcctggagggcgtgtactacctgcaccagaacaacatcgtgcacctggacctgaagccccagaacatcctgctgagcagcatctaccccctgggcgacatcaagatcgtggacttcggcatgagcagaaagatcggccacgcctgcgagctgagagagatcatgggcacccccgagtacctggcccccgagatcctgaactacgaccccatcaccaccgccaccgacatgtggaacatcggcatcatcgcctacatgctgctgacccacaccagccccttcgtgggcgaggacaaccaggagacctacctgaacatcagccaggtgaacgtggactacagcgaggagaccttcagcagcgtgagccagctggccaccgacttcatccagagcctgctggtgaagaaccccgagaagagacccaccgccgagatctgcctgagccacagctggctgcagcagtgggacttcgagaacctgttccaccccgaggagaccagcagcagcagccagacccaggaccacagcgtgagaagcagcgaggacaagaccagcaagagcagctgcaacggcacctgcggcgacagagaggacaaggagaacatccccgaggacagcagcatggtgagcaagagattcagattcgacgacagcctgcccaacccccacgagctggtgagcgacctgctgtgctag

SEQ ID NO: 9459 - DNA, 930 bp, synthetic construct
  source 1..930: mol_type = other DNA; note = Synthetic coding sequence
atggaggccgccagaaccgccgtgctgagagtgaagagaaagagaagcgccgagcccgccgaggccctggtgctggcctgcaagagactgagaagcgacgccgtggagagcgccgcccagaagaccagcgagggcctggagagagccgccgagaacaacgtgttccacctggtggccaccgtgtgcagccaggaggagcccgtgcagcccctgctgagagaggtgctgagacccagcagagacagccagcagagagtgagaagaaacctgagagccagcgccagagaggtgagacaggagggcagatacagagtgctgagcagcagaagaagcctgggcaccaccagcagcggccaggagagcgagtacacccccggcaaccccgaggccgccggcaacagcggcttccagctgctggacctggtgcacgaggagggcgagcccgaggccgccagcgccggcagctgcaagaccagcgaccccgacgtgatcctgtgcaacagcgtggagctgatcagagagagactgaccgtgagcgaggacggccccggcgtgagaagacaggaggagcagaagcacgacgactacgtgtacgacatctactacctggagaccgccacccccggctggatcgagaacatcctgagcgtgcagccctacagccaggagtgggagctggtgaacgacgaccaggagcccgaggacatctacgacgacgaggacgacgagaacagcgagaacaactggagaaacgagtaccccgaggaggagagcagcgacggcgacgaggacagcagaggcagcgccgactacaacagcctgagcgaggaggagagaggcagcagcagacagagaatgtggagcaagtaccccctggacgtgcagaaggagttcggctacgacagcccccacgacctggacagcgactag

SEQ ID NO: 9460 - DNA, 1068 bp, synthetic construct
  source 1..1068: mol_type = other DNA; note = Synthetic coding sequence
atggccgacaacagcagcgacgagtgcgaggaggagaacaacaaggtgctgagagagggcatgccccaggcccccggccacagaggcaaggacatggaccccgtgccccccgcccccgccagcctgaagtgccaccagacccccagccacgtgctggagagagtgggctggtacagagagagccagaagcacagaaaggagaagaagaagaccagccagctgaccccccagagaggcttcagcgagaacgaggacgacgacgacgacgacgacgacagcagcgagaccgacagcgacagcgacgacgacgacgaggagcacggcgcccccctggagggcgcctacgaccccgccgactacgagcacctgcccgtgagcgccgagatcaaggagctgttccagtacatcagcagatacaccccccagctgatcgacctggaccacaagctgaagcccttcatccccgacttcatccccgccgtgggcgacatcgacgccttcctgaaggtgcccagacccgacggcaagcccgacaacctgggcctgctggtgctggacgagcccagcaccaagcagagcgaccccaccgtgctgagcctgtggctgaccgagaacagcaagcagcacaacatcacccagcacatgaaggtgaagagcctggaggacgccgagaagaaccccaaggccatcgacacctggatcgagagcatcagcgagctgcacagaagcaagccccccgccaccgtgcactacaccagacccatgcccgacatcgacaccctgatgcaggagtggagccccgagttcgaggagctgctgggcaaggtgagcctgcccaccgccgagatcgactgcagcctggccgagtacatcgacatgatctgcgccatcctggacatccccgtgtacaagagcagaatccagagcctgcacctgctgttcagcctgtacagcgagttcaagaacagccagcacttcaaggccctggccgagggcaagaaggccttcacccccagcagcaacagcaccagccaggccggcgacatggagaccctgaccttcagctag

SEQ ID NO: 9461 - DNA, 915 bp, synthetic construct
  source 1..915: mol_type = other DNA; note = Synthetic coding sequence
atggccgacaacagcagcgacgagtgcgaggaggagaacaacaaggagaagaagaagaccagccagctgaccccccagagaggcttcagcgagaacgaggacgacgacgacgacgacgacgacagcagcgagaccgacagcgacagcgacgacgacgacgaggagcacggcgcccccctggagggcgcctacgaccccgccgactacgagcacctgcccgtgagcgccgagatcaaggagctgttccagtacatcagcagatacaccccccagctgatcgacctggaccacaagctgaagcccttcatccccgacttcatccccgccgtgggcgacatcgacgccttcctgaaggtgcccagacccgacggcaagcccgacaacctgggcctgctggtgctggacgagcccagcaccaagcagagcgaccccaccgtgctgagcctgtggctgaccgagaacagcaagcagcacaacatcacccagcacatgaaggtgaagagcctggaggacgccgagaagaaccccaaggccatcgacacctggatcgagagcatcagcgagctgcacagaagcaagccccccgccaccgtgcactacaccagacccatgcccgacatcgacaccctgatgcaggagtggagccccgagttcgaggagctgctgggcaaggtgagcctgcccaccgccgagatcgactgcagcctggccgagtacatcgacatgatctgcgccatcctggacatccccgtgtacaagagcagaatccagagcctgcacctgctgttcagcctgtacagcgagttcaagaacagccagcacttcaaggccctggccgagggcaagaaggccttcacccccagcagcaacagcaccagccaggccggcgacatggagaccctgaccttcagctag

SEQ ID NO: 9462 - DNA, 1335 bp, synthetic construct
  source 1..1335: mol_type = other DNA; note = Synthetic coding sequence
atgagagagatcgtgcacctgcaggccggccagtgcggcaaccagatcggcgccaagttctgggaggtgatcagcgacgagcacggcatcgaccccaccggcacctaccacggcgacagcgacctgcagctggagagaatcaacgtgtactacaacgaggccaccggcggcaactacgtgcccagagccgtgctggtggacctggagcccggcaccatggacagcgtgagaagcggccccttcggccagatcttcagacccgacaacttcgtgttcggccagagcggcgccggcaacaactgggccaagggccactacaccgagggcgccgagctggtggacgccgtgctggacgtggtgagaaaggaggccgagagctgcgactgcctgcagggcttccagctgacccacagcctgggcggcggcaccggcagcggcatgggcaccctgctgatcagcaagatcagagaggagttccccgacagaatcatgaacaccttcagcgtggtgcccagccccaaggtgagcgacaccgtggtggagccctacaacgccaccctgagcgtgcaccagctggtggagaacaccgacgagacctactgcatcgacaacgaggccctgtacgacatctgcttcagaaccctgaagctgaccacccccacctacggcgacctgaaccacctggtgagcgccaccatgagcggcgtgaccacctgcctgagattccccggccagctgaacgccgacctgagaaagctggccgtgaacatggtgcccttccccagactgcacttcttcatgcccggcttcgcccccctgaccagcagaggcagccagcagtacagagccctgaccgtgcccgagctgacccagcagatgttcgacgccaagaacatgatggccgcctgcgaccccagacacggcagatacctgaccgtggccgccgtgttcagaggcagaatgagcatgaaggaggtggacgagcagatgctgagcgtgcagagcaagaacagcagctacttcgtggagtggatccccaacaacgtgaagaccgccgtgtgcgacatcccccccagaggcctgaagatggccgccaccttcatcggcaacagcaccgccatccaggagctgttcaagagaatcagcgagcagttcaccgccatgttcagaagaaaggccttcctgcactggtacaccggcgagggcatggacgagatggagttcaccgaggccgagagcaacatgaacgacctggtgagcgagtaccagcagtaccaggacgccaccgccgaggagggcgagttcgaggaggaggccgaggaggaggtggcctag

SEQ ID NO: 9463 - DNA, 1398 bp, synthetic construct
  source 1..1398: mol_type = other DNA; note = Synthetic coding sequence
atggagcccagcagcctggagctgcccgccgacaccgtgcagagaatcgccgccgagctgaagtgccaccccaccgacgagagagtggccctgcacctggacgaggaggacaagctgagacacttcagagagtgcttctacatccccaagatccaggacctgccccccgtggacctgagcctggtgaacaaggacgagaacgccatctacttcctgggcaacagcctgggcctgcagcccaagatggtgaagacctacctggaggaggagctggacaagtgggccaagatcgccgcctacggccacgaggtgggcaagagaccctggatcaccggcgacgagagcatcgtgggcctgatgaaggacatcgtgggcgccaacgagaaggagatcgccctgatgaacgccctgaccgtgaacctgcacctgctgatgctgagcttcttcaagcccacccccaagagatacaagatcctgctggaggccaaggccttccccagcgaccactacgccatcgagagccagctgcagctgcacggcctgaacatcgaggagagcatgagaatgatcaagcccagagagggcgaggagaccctgagaatcgaggacatcctggaggtgatcgagaaggagggcgacagcatcgccgtgatcctgttcagcggcgtgcacttctacaccggccagcacttcaacatccccgccatcaccaaggccggccaggccaagggctgctacgtgggcttcgacctggcccacgccgtgggcaacgtggagctgtacctgcacgactggggcgtggacttcgcctgctggtgcagctacaagtacctgaacgccggcgccggcggcatcgccggcgccttcatccacgagaagcacgcccacaccatcaagcccgccctggtgggctggttcggccacgagctgagcaccagattcaagatggacaacaagctgcagctgatccccggcgtgtgcggcttcagaatcagcaacccccccatcctgctggtgtgcagcctgcacgccagcctggagatcttcaagcaggccaccatgaaggccctgagaaagaagagcgtgctgctgaccggctacctggagtacctgatcaagcacaactacggcaaggacaaggccgccaccaagaagcccgtggtgaacatcatcacccccagccacgtggaggagagaggctgccagctgaccatcaccttcagcgtgcccaacaaggacgtgttccaggagctggagaagagaggcgtggtgtgcgacaagagaaaccccaacggcatcagagtggcccccgtgcccctgtacaacagcttccacgacgtgtacaagttcaccaacctgctgaccagcatcctggacagcgccgagaccaagaactag

SEQ ID NO: 9464 - DNA, 4758 bp, synthetic construct
  source 1..4758: mol_type = other DNA; note = Synthetic coding sequence
atgaacagccagccccagaccagaagccccttcttccagagaccccagatccagccccccagagccaccatccccaacagcagccccagcatcagacccggcgcccagacccccaccgccgtgtaccaggccaaccagcacatcatgatggtgaaccacctgcccatgccctaccccgtgccccagggcccccagtactgcatcccccagtacagacacagcggccccccctacgtgggccccccccagcagtaccccgtgcagccccccggccccggccccttctaccccggccccggccccggcgacttccccaacgcctacggcacccccttctaccccagccagcccgtgtaccagagcgcccccatcatcgtgcccacccagcagcagcccccccccgccaagagagagaagaagaccatcagaatcagagaccccaaccagggcggcaaggacatcaccgaggagatcatgagcggcggcggcagcagaaaccccaccccccccatcggcagacccaccagcacccccacccccccccagcagctgcccagccaggtgcccgagcacagccccgtggtgtacggcaccgtggagagcgcccacctggccgccagcacccccgtgaccgccgccagcgaccagaagcaggaggagaagcccaagcccgaccccgtgctgaagagccccagccccgtgctgagactggtgctgagcggcgagaagaaggagcaggagggccagaccagcgagaccaccgccatcgtgagcatcgccgagctgcccctgccccccagccccaccaccgtgagcagcgtggccagaagcaccatcgccgcccccaccagcagcgccctgagcagccagcccatcttcaccaccgccatcgacgacagatgcgagctgagcagccccagagaggacaccatccccatccccagcctgaccagctgcaccgagaccagcgaccccctgcccaccaacgagaacgacgacgacatctgcaagaagccctgcagcgtggcccccaacgacatccccctggtgagcagcaccaacctgatcaacgagatcaacggcgtgagcgagaagctgagcgccaccgagagcatcgtggagatcgtgaagcaggaggtgctgcccctgaccctggagctggagatcctggagaacccccccgaggagatgaagctggagtgcatccccgcccccatcacccccagcaccgtgcccagcttcccccccaccccccccaccccccccgccagccccccccacacccccgtgatcgtgcccgccgccgccaccaccgtgagcagccccagcgccgccatcaccgtgcagagagtgctggaggaggacgagagcatcagaacctgcctgagcgaggacgccaaggagatccagaacaagatcgaggtggaggccgacggccagaccgaggagatcctggacagccagaacctgaacagcagaagaagccccgtgcccgcccagatcgccatcaccgtgcccaagacctggaagaagcccaaggacagaaccagaaccaccgaggagatgctggaggccgagctggagctgaaggccgaggaggagctgagcatcgacaaggtgctggagagcgagcaggacaagatgagccagggcttccaccccgagagagaccccagcgacctgaagaaggtgaaggccgtggaggagaacggcgaggaggccgagcccgtgagaaacggcgccgagagcgtgagcgagggcgagggcatcgacgccaacagcggcagcaccgacagcagcggcgacggcgtgaccttccccttcaagcccgagagctggaagcccaccgacaccgagggcaagaagcagtacgacagagagttcctgctggacttccagttcatgcccgcctgcatccagaagcccgagggcctgccccccatcagcgacgtggtgctggacaagatcaaccagcccaagctgcccatgagaaccctggaccccagaatcctgcccagaggccccgacttcacccccgccttcgccgacttcggcagacagacccccggcggcagaggcgtgcccctgctgaacgtgggcagcagaagaagccagcccggccagagaagagagcccagaaagatcatcaccgtgagcgtgaaggaggacgtgcacctgaagaaggccgagaacgcctggaagcccagccagaagagagacagccaggccgacgaccccgagaacatcaagacccaggagctgttcagaaaggtgagaagcatcctgaacaagctgaccccccagatgttcaaccagctgatgaagcaggtgagcggcctgaccgtggacaccgaggagagactgaagggcgtgatcgacctggtgttcgagaaggccatcgacgagcccagcttcagcgtggcctacgccaacatgtgcagatgcctggtgaccctgaaggtgcccatggccgacaagcccggcaacaccgtgaacttcagaaagctgctgctgaacagatgccagaaggagttcgagaaggacaaggccgacgacgacgtgttcgagaagaagcagaaggagctggaggccgccagcgcccccgaggagagaaccagactgcacgacgagctggaggaggccaaggacaaggccagaagaagaagcatcggcaacatcaagttcatcggcgagctgttcaagctgaagatgctgaccgaggccatcatgcacgactgcgtggtgaagctgctgaagaaccacgacgaggagagcctggagtgcctgtgcagactgctgaccaccatcggcaaggacctggacttcgagaaggccaagcccagaatggaccagtacttcaaccagatggagaagatcgtgaaggagagaaagaccagcagcagaatcagattcatgctgcaggacgtgatcgacctgagactgtgcaactgggtgagcagaagagccgaccagggccccaagaccatcgagcagatccacaaggaggccaagatcgaggagcaggaggagcagagaaaggtgcagcagctgatgaccaaggagaagagaagacccggcgtgcagagagtggacgagggcggctggaacaccgtgcagggcgccaagaacagcagagtgctggaccccagcaagttcctgaagatcaccaagcccaccatcgacgagaagatccagctggtgcccaaggcccagctgggcagctggggcaagggcagcagcggcggcgccaaggccagcgagaccgacgccctgagaagcagcgccagcagcctgaacagattcagcgccctgcagccccccgcccccagcggcagcacccccagcacccccgtggagttcgacagcagaagaaccctgaccagcagaggcagcatgggcagagagaagaacgacaagcccctgcccagcgccaccgccagacccaacaccttcatgagaggcggcagcagcaaggacctgctggacaaccagagccaggaggagcagagaagagagatgctggagaccgtgaagcagctgaccggcggcgtggacgtggagagaaacagcaccgaggccgagagaaacaagaccagagagagcgccaagcccgagatcagcgccatgagcgcccacgacaaggccgccctgagcgaggaggagctggagagaaagagcaagagcatcatcgacgagttcctgcacatcaacgacttcaaggaggccatgcagtgcgtggaggagctgaacgcccagggcctgctgcacgtgttcgtgagagtgggcgtggagagcaccctggagagaagccagatcaccagagaccacatgggccagctgctgtaccagctggtgcagagcgagaagctgagcaagcaggacttcttcaagggcttcagcgagaccctggagctggccgacgacatggccatcgacatcccccacatctggctgtacctggccgagctggtgacccccatgctgaaggagggcggcatcagcatgagagagctgaccatcgagttcagcaagcccctgctgcccgtgggcagagccggcgtgctgctgagcgagatcctgcacctgctgtgcaagcagatgagccacaagaaggtgggcgccctgtggagagaggccgacctgagctggaaggacttcctgcccgagggcgaggacgtgcacaacttcctgctggagcagaagctggacttcatcgagagcgacagcccctgcagcagcgaggccctgagcaagaaggagctgagcgccgaggagctgtacaagagactggagaagctgatcatcgaggacaaggccaacgacgagcagatcttcgactgggtggaggccaacctggacgagatccagatgagcagccccaccttcctgagagccctgatgaccgccgtgtgcaaggccgccatcatcgccgacagcagcaccttcagagtggacaccgccgtgatcaagcagagagtgcccatcctgctgaagtacctggacagcgacaccgagaaggagctgcaggccctgtacgccctgcaggccagcatcgtgaagctggaccagcccgccaacctgctgagaatgttcttcgactgcctgtacgacgaggaggtgatcagcgaggacgccttctacaagtgggagagcagcaaggaccccgccgagcagaacggcaagggcgtggccctgaagagcgtgaccgccttcttcacctggctgagagaggccgaggaggagagcgaggacaactag

SEQ ID NO: 9465 - DNA, 378 bp, synthetic construct
  source 1..378: mol_type = other DNA; note = Synthetic coding sequence
atggcccccgccaagaagggcggcgagaagaagaagggcagaagcgccatcaacgaggtggtgaccagagagtacaccatcaacatccacaagagaatccacggcgtgggcttcaagaagagagcccccagagccctgaaggagatcagaaagttcgccatgaaggagatgggcacccccgacgtgagaatcgacaccagactgaacaaggccgtgtgggccaagggcatcagaaacgtgccctacagaatcagagtgagactgagcagaaagagaaacgaggacgaggacagccccaacaagctgtacaccctggtgacctacgtgcccgtgaccaccttcaagaacctgcagaccgtgaacgtggacgagaactag

SEQ ID NO: 9466 - DNA, 1590 bp, synthetic construct
  source 1..1590: mol_type = other DNA; note = Synthetic coding sequence
atgctggtgctgttcgagaccagcgtgggctacgccatcttcaaggtgctgaacgagaagaagctgcaggaggtggacagcctgtggaaggagttcgagacccccgagaaggccaacaagatcgtgaagctgaagcacttcgagaagttccaggacaccgccgaggccctggccgccttcaccgccctgatggagggcaagatcaacaagcagctgaagaaggtgctgaagaagatcgtgaaggaggcccacgagcccctggccgtggccgacgccaagctgggcggcgtgatcaaggagaagctgaacctgagctgcatccacagccccgtggtgaacgagctgatgagaggcatcagaagccagatggacggcctgatccccggcgtggagcccagagagatggccgccatgtgcctgggcctggcccacagcctgagcagatacagactgaagttcagcgccgacaaggtggacaccatgatcgtgcaggccatcagcctgctggacgacctggacaaggagctgaacaactacatcatgagatgcagagagtggtacggctggcacttccccgagctgggcaagatcatcagcgacaacctgacctactgcaagtgcctgcagaaggtgggcgacagaaagaactacgccagcgccaagctgagcgagctgctgcccgaggaggtggaggccgaggtgaaggccgccgccgagatcagcatgggcaccgaggtgagcgaggaggacatctgcaacatcctgcacctgtgcacccaggtgatcgagatcagcgagtacagaacccagctgtacgagtacctgcagaacagaatgatggccatcgcccccaacgtgaccgtgatggtgggcgagctggtgggcgccagactgatcgcccacgccggcagcctgctgaacctggccaagcacgccgccagcaccgtgcagatcctgggcgccgagaaggccctgttcagagccctgaagagcagaagagacacccccaagtacggcctgatctaccacgccagcctggtgggccagaccagccccaagcacaagggcaagatcagcagaatgctggccgccaagaccgtgctggccatcagatacgacgccttcggcgaggacagcagcagcgccatgggcgtggagaacagagccaagctggaggccagactgagaaccctggaggacagaggcatcagaaagatcagcggcaccggcaaggccctggccaagaccgagaagtacgagcacaagagcgaggtgaagacctacgaccccagcggcgacagcaccctgcccacctgcagcaagaagagaaagatcgagcaggtggacaaggaggacgagatcaccgagaagaaggccaagaaggccaagatcaaggtgaaggtggaggaggaggaggaggagaaggtggccgaggaggaggagaccagcgtgaagaagaagaagaagagaggcaagaagaagcacatcaaggaggagcccctgagcgaggaggagccctgcaccagcaccgccatcgccagccccgagaagaagaagaagaagaagaagaagagagagaacgaggactag

SEQ ID NO: 9467 - DNA, 738 bp, synthetic construct
  source 1..738: mol_type = other DNA; note = Synthetic coding sequence
atgaacggcagagccgacttcagagagcccaacgccgaggtgcccagacccatcccccacatcggccccgactacatccccaccgaggaggagagaagagtgttcgccgagtgcaacgacgagagcttctggttcagaagcgtgcccctggccgccaccagcatgctgatcacccagggcctgatcagcaagggcatcctgagcagccaccccaagtacggcagcatccccaagctgatcctggcctgcatcatgggctacttcgccggcaagctgagctacgtgaagacctgccaggagaagttcaagaagctggagaacagccccctgggcgaggccctgagaagcggccaggccagaagaagcagcccccccggccactactaccagaagagcaagtacgacagcagcgtgagcggccagagcagcttcgtgaccagccccgccgccgacaacatcgagatgctgccccactacgagcccatccccttcagcagcagcatgaacgagagcgcccccaccggcatcaccgaccacatcgtgcagggccccgaccccaacctggaggagagccccaagagaaagaacatcacctacgaggagctgagaaacaagaacagagagagctacgaggtgagcctgacccagaagaccgaccccagcgtgagacccatgcacgagagagtgcccaagaaggaggtgaaggtgaacaagtacggcgacacctgggacgagtag

SEQ ID NO: 9468 - DNA, 1746 bp, synthetic construct
  source 1..1746: mol_type = other DNA; note = Synthetic coding sequence
atggaggacgtgaacagcaacgtgaacgccgaccaggaggtgagaaagctgcaggagctggtgaagaagctggagaagcagaacgagcagctgagaagcagaagcggcgccgtgcagggcgccggcagcctgggccccggcagccccgtgagagccggcgccagcatccccagcagcggcgccgccagccccagaggcttccccctgggcctgagcgccaagagcggcggcggccccggcagcggccccagaagaaccagcagcgaggagctgagagacgccaccagcctgctggccgccggcgagggcggcctgctggacgaggtggagcccctgagacccgacgagctggagagactgagcggctgggaggaggaggaggagagctggctgtacagcagccccaagaagaagctgacccccatgcagaagagcgtgagccccctggtgtggtgcagacaggtgctggactaccccagccccgacgtggagtgcgccaagaagagcctgatccacaagctggaccagaccatgagcgccctgaagagacagaacctgtacaacaaccccttcaacagcatgagctacaccagcccctacagccccaacgccagcagcccctacagcagcggcttcaacagccccagcagcacccccgtgagaccccccatcgtgaagcagctgatcctgcccggcaacagcggcaacctgaagagcagcgacagaaacccccccctgagcccccagagcagcatcgacagcgagctgagcgccagcgagctggacgaggacagcatcggcagcaactacaagctgaacgacgtgaccgacgtgcagatcctggccagaatgcaggaggagagcctgagacaggagtacgccgccaccaccagcagaagaagcagcggcagcagctgcaacagcaccagaagaggcaccttcagcgaccaggagctggacgcccagagcctggacgacgaggacgacaacatgcaccacgccgtgtaccccgccgtgaacagattcagccccagccccagaaacagccccagacccagccccaagcagagccccagaaacagccccagaagcagaagccccgccagaggcatcgagtacagcagagtgagcccccagcccatgatcagcagactgcagcagcccagactgagcctgcagggccaccccaccgacctgcagaccagcaacgtgaagaacgaggagaagctgagaagaagcctgcccaacctgagcagaaccagcaacacccaggtggacagcgtgaagagcagcagaagcgacagcaacttccaggtgcccaacggcggcatccccagaatgcagccccaggccagcgccatccccagccccggcaagttcagaagccccgccgcccccagccccctggccctgagacagcccgtgaaggccttcagcaaccacggcagcggcagccccggcagccaggagatcacccagctgacccagaccaccagcagccccggcccccccatggtgcagagcaccgtgagcgccaacccccccagcaacatcaacagcgccaccctgaccagacccgccggcaccaccgccatgagaagcggcctgcccagacccagcgcccccagcgccggcggcatccccgtgcccagaagcaagctggcccagcccgtgagaagaagcctgcccgcccccaagacctacggcagcatgaaggacgacagctggaaggacggctgctactag

SEQ ID NO: 9469 - DNA, 3153 bp, synthetic construct
  source 1..3153: mol_type = other DNA; note = Synthetic coding sequence
atgctgtgctggggctactggagcctgggccagcccggcatcagcaccaacctgcagggcatcgtggccgagccccaggtgtgcggcttcatcagcgacagaagcgtgaaggaggtggcctgcggcggcaaccacagcgtgttcctgctggaggacggcgaggtgtacacctgcggcctgaacaccaagggccagctgggccacgagagagagggcaacaagcccgagcagatcggcgccctggccgaccagcacatcatccacgtggcctgcggcgagagccacagcctggccctgagcgacagaggccagctgttcagctggggcgccggcagcgacggccagctgggcctgatgaccaccgaggacagcgtggccgtgcccagactgatccagaagctgaaccagcagaccatcctgcaggtgagctgcggcaactggcactgcctggccctggccgccgacggccagttcttcacctggggcaagaacagccacggccagctgggcctgggcaaggagttccccagccaggccagcccccagagagtgagaagcctggagggcatccccctggcccaggtggccgccggcggcgcccacagcttcgccctgagcctgagcggcgccgtgttcggctggggcatgaacaacgccggccagctgggcctgagcgacgagaaggacagagagagcccctgccacgtgaagctgctgagaacccagaaggtggtgtacatcagctgcggcgaggagcacaccgccgtgctgaccaagagcggcggcgtgttcaccttcggcgccggcagctgcggccagctgggccacgacagcatgaacgacgaggtgaaccccagaagagtgctggagctgatgggcagcgaggtgacccagatcgcctgcggcagacagcacaccctggccttcgtgcccagcagcggcctgatctacgccttcggctgcggcgccagaggccagctgggcaccggccacacctgcaacgtgaagtgccccagccccgtgaagggctactgggccgcccacagcggccagctgagcgccagagccgacagattcaagtaccacatcgtgaagcagatcttcagcggcggcgaccagaccttcgtgctgtgcagcaagtacgagaactacagccccgccgtggacttcagaaccatgaaccaggcccactacaccagcctgatcaacgacgagaccatcgccgtgtggagacagaagctgagcgagcacaacaacgccaacaccatcaacggcgtggtgcagatcctgagcagcgccgcctgctggaacggcagcttcctggagaagaagatcgacgagcacttcaagaccagccccaagatccccggcatcgacctgaacagcaccagagtgctgttcgagaagctgatgaacagccagcacagcatgatcctggagcagatcctgaacagcttcgagagctgcctgatcccccagctgagcagcagcccccccgacgtggaggccatgagaatctacctgatcctgcccgagttccccctgctgcaggacagcaagtactacatcaccctgaccatccccctggccatggccatcctgagactggacaccaaccccagcaaggtgctggacaactggtggagccaggtgtgccccaagtacttcatgaagctggtgaacctgtacaagggcgccgtgctgtacctgctgagaggcagaaagaccttcctgatccccgtgctgttcaacaactacatcaccgccgccctgaagctgctggagaagctgtacaaggtgaacctgaaggtgaagcacgtggagtacgacaccttctacatccccgagatcagcaacctggtggacatccaggaggactacctgatgtggttcctgcaccaggccggcatgaaggccagacccagcatcatccaggacaccgtgaccctgtgcagctaccccttcatcttcgacgcccaggccaagaccaagatgctgcagaccgacgccgagctgcagatgcaggtggccgtgaacggcgccaacctgcagaacgtgttcatgctgctgaccctggagcccctgctggccagaagccccttcctggtgctgcacgtgagaagaaacaacctggtgggcgacgccctgagagagctgagcatccacagcgacatcgacctgaagaagcccctgaaggtgatcttcgacggcgaggaggccgtggacgccggcggcgtgaccaaggagttcttcctgctgctgctgaaggagctgctgaaccccatctacggcatgttcacctactaccaggacagcaacctgctgtggttcagcgacacctgcttcgtggagcacaactggttccacctgatcggcatcacctgcggcctggccatctacaacagcaccgtggtggacctgcacttccccctggccctgtacaagaagctgctgaacgtgaagcccggcctggaggacctgaaggagctgagccccaccgagggcagaagcctgcaggagctgctggactaccccggcgaggacgtggaggagaccttctgcctgaacttcaccatctgcagagagagctacggcgtgatcgagcagaagaagctgatccccggcggcgacaacgtgaccgtgtgcaaggacaacagacaggagttcgtggacgcctacgtgaactacgtgttccagatcagcgtgcacgagtggtacaccgccttcagcagcggcttcctgaaggtgtgcggcggcaaggtgctggagctgttccagcccagcgagctgagagccatgatggtgggcaacagcaactacaactgggaggagctggaggagaccgccatctacaagggcgactacagcgccacccaccccaccgtgaagctgttctgggagaccttccacgagttccccctggagaagaagaagaagttcctgctgttcctgaccggcagcgacagaatccccatctacggcatggccagcctgcagatcgtgatccagagcaccgccagcggcgaggagtacctgcccgtggcccacacctgctacaacctgctggacctgcccaagtacagcagcaaggagatcctgagcgccagactgacccaggccctggacaactacgagggcttcagcctggcctag

SEQ ID NO: 9470 - DNA, 3069 bp, synthetic construct
  source 1..3069: mol_type = other DNA; note = Synthetic coding sequence
atgtacttctgctggggcgccgacagcagagagctgcagagaagaagaaccgccggcagccccggcgccgagctgctgcaggccgccagcggcgagagacacagcctgctgctgctgaccaaccacagagtgctgagctgcggcgacaacagcagaggccagctgggcagaagaggcgcccagagaggcgagctgcccgagcccatccaggccctggagaccctgatcgtggacctggtgagctgcggcaaggagcacagcctggccgtgtgccacaagggcagagtgttcgcctggggcgccggcagcgagggccagctgggcatcggcgagttcaaggagatcagcttcacccccaagaagatcatgaccctgaacgacatcaagatcatccaggtgagctgcggccactaccacagcctggccctgagcaaggacagccaggtgttcagctggggcaagaacagccacggccagctgggcctgggcaaggagttccccagccaggccagcccccagagagtgagaagcctggagggcatccccctggcccaggtggccgccggcggcgcccacagcttcgccctgagcctgtgcggcaccagcttcggctggggcagcaacagcgccggccagctggccctgagcggcagaaacgtgcccgtgcagagcaacaagcccctgagcgtgggcgccctgaagaacctgggcgtggtgtacatcagctgcggcgacgcccacaccgccgtgctgacccaggacggcaaggtgttcaccttcggcgacaacagaagcggccagctgggctacagccccacccccgagaagagaggcccccagctggtggagagaatcgacggcctggtgagccagatcgactgcggcagctaccacaccctggcctacgtgcacaccaccggccaggtggtgagcttcggccacggccccagcgacaccagcaagcccacccaccccgaggccctgaccgagaacttcgacatcagctgcctgatcagcgccgaggacttcgtggacgtgcaggtgaagcacatcttcgccggcacctacgccaacttcgtgaccacccaccaggacaccagcagcaccagagcccccggcaagaccctgcccgagatcagcagaatcagccagagcatggccgagaagtggatcgccgtgaagagaagaagcaccgagcacgagatggccaagagcgagatcagaatgatcttcagcagccccgcctgcctgaccgccagcttcctgaagaagagaggcaccggcgagaccaccagcatcgacgtggacctggagatggccagagacaccttcaagaagctgaccaagaaggagtggatcagcagcatgatcaccacctgcctggaggacgacctgctgagagccctgccctgccacagcccccaccaggaggccctgagcgtgttcctgctgctgcccgagtgccccgtgatgcacgacagcaagaactggaagaacctggtggtgcccttcgccaaggccgtgtgcgagatgagcaagcagagcctgcaggtgctgaagaagtgctgggccttcctgcaggagagcagcctgaaccccctgatccagatgctgaaggccgccatcatcagccagctgctgcaccagaccaagaccgagcaggaccactgcaacgtgaaggccctgctgggcatgatgaaggagctgcacaaggtgaacaaggccaactgcagactgcccgagaacaccttcaacatcaacgagctgagcaacctgctgaacttctacatcgacagaggcagacagctgttcagagacaaccacctgatccccgccgagacccccagccccgtgatcttcagcgacttccccttcatcttcaacagcctgagcaagatcaagctgctgcaggccgacagccacatcaagatgcagatgagcgagaagaaggcctacatgctgatgcacgagaccatcctgcagaagaaggacgagttcccccccagccccagattcatcctgagagtgagaagaagcagactggtgaaggacgccctgagacagctgagccaggccgaggccaccgacttctgcaaggtgctggtggtggagttcatcaacgagatctgccccgagagcggcggcgtgagcagcgagttcttccactgcatgttcgaggagatgaccaagcccgagtacggcatgttcatgtaccccgagatgggcagctgcatgtggttccccgccaagcccaagcccgagaagaagagatacttcctgttcggcatgctgtgcggcctgagcctgttcaacctgaacgtggccaacctgcccttccccctggccctgtacaagaagctgctggaccagaagcccagcctggaggacctgaaggagctgagccccagactgggcaagagcctgcaggaggtgctggacgacgccgccgacgacatcggcgacgccctgtgcatcagattcagcatccactgggaccagaacgacgtggacctgatccccaacggcatcagcatccccgtggaccagaccaacaagagagactacgtgagcaagtacatcgactacatcttcaacgtgagcgtgaaggccgtgtacgaggagttccagagaggcttctacagagtgtgcgagaaggagatcctgagacacttctaccccgaggagctgatgaccgccatcatcggcaacaccgactacgactggaagcagttcgagcagaacagcaagtacgagcagggctaccagaagagccaccccaccatccagctgttctggaaggccttccacaagctgaccctggacgagaagaagaagttcctgttcttcctgaccggcagagacagactgcacgccagaggcatccagaagatggagatcgtgttcagatgccccgagaccttcagcgagagagaccaccccaccagcatcacctgccacaacatcctgagcctgcccaagtacagcaccatggagagaatggaggaggccctgcaggtggccatcaacaacaacagaggcttcgtgagccccatgctgacccagagctag

SEQ ID NO: 9471 - DNA, 1221 bp, synthetic construct
  source 1..1221: mol_type = other DNA; note = Synthetic coding sequence
atggccgccgccgtgagacaggacctggcccagctgatgaacagcagcggcagccacaaggacctggccggcaagtacagacagatcctggagaaggccatccagctgagcggcgccgagcagctggaggccctgaaggccttcgtggaggccatggtgaacgagaacgtgagcctggtgatcagcagacagctgctgaccgacttctgcacccacctgcccaacctgcccgacagcaccgccaaggagatctaccacttcaccctggagaagatccagcccagagtgatcagcttcgaggagcaggtggccagcatcagacagcacctggccagcatctacgagaaggaggaggactggagaaacgccgcccaggtgctggtgggcatccccctggagaccggccagaagcagtacaacgtggactacaagctggagacctacctgaagatcgccagactgtacctggaggacgacgaccccgtgcaggccgaggcctacatcaacagagccagcctgctgcagaacgagagcaccaacgagcagctgcagatccactacaaggtgtgctacgccagagtgctggactacagaagaaagttcatcgaggccgcccagagatacaacgagctgagctacaagaccatcgtgcacgagagcgagagactggaggccctgaagcacgccctgcactgcaccatcctggccagcgccggccagcagagaagcagaatgctggccaccctgttcaaggacgagagatgccagcagctggccgcctacggcatcctggagaagatgtacctggacagaatcatcagaggcaaccagctgcaggagttcgccgccatgctgatgccccaccagaaggccaccaccgccgacggcagcagcatcctggacagagccgtgatcgagcacaacctgctgagcgccagcaagctgtacaacaacatcaccttcgaggagctgggcgccctgctggagatccccgccgccaaggccgagaagatcgccagccagatgatcaccgagggcagaatgaacggcttcatcgaccagatcgacggcatcgtgcacttcgagaccagagaggccctgcccacctgggacaagcagatccagagcctgtgcttccaggtgaacaacctgctggagaagatcagccagaccgcccccgagtggaccgcccaggccatggaggcccagatggcccagtag

SEQ ID NO: 9472 - DNA, 1578 bp, synthetic construct
  source 1..1578: mol_type = other DNA; note = Synthetic coding sequence
atggccgccggcctgctgggcagcgaggaccccccctggagctggaacctgacctgcagagccctgagaacctgccaggtgagaaacatcagagtgctgcagctgctgctgaagccctggtgcatcagcagagccgtgtaccagatgaccgagggcagaagatgccaggtgcacctgctggacgacagaaagctggagctgctggtgcagcccaagctgctggccaaggagctgctggacctggtggccagccacttcaacctgaaggagaaggagtacttcggcatcgccttcaccgacgagaccggccacctgaactggctgcagctggacagaagagtgctggagcacgacttccccaagaagagcggccccgtggtgctgtacttctgcgtgagattctacatcgagagcatcagctacctgaaggacaacgccaccatcgagctgttcttcctgaacgccaagagctgcatctacaaggagctgatcgacgtggacagcgaggtggtgttcgagctggccagctacatcctgcaggaggccaagggcgacttcagcagcaacgaggtggtgagaagcgacctgaagaagctgcccgccctgcccacccaggccctgaaggagcaccccagcctggcctactgcgaggacagagtgatcgagcactacaagaagctgaacggccagaccagaggccaggccatcgtgaactacatgagcatcgtggagagcctgcccacctacggcgtgcactactacgccgtgaaggacaagcagggcatcccctggtggctgggcctgagctacaagggcatcttccagtacgactaccacgacaaggtgaagcccagaaagatcttccagtggagacagctggagaacctgtacttcagagagaagaagttcagcgtggaggtgcacgaccccagaagagccagcgtgaccagaagaaccttcggccacagcggcatcgccgtgcacacctggtacgcctgccccgccctgatcaagagcatctgggccatggccatcagccagcaccagttctacctggacagaaagcagagcaagagcaagatccacgccgccagaagcctgagcgagatcgccatcgacctgaccgagaccggcaccctgaagaccagcaagctggccaacatgggcagcaagggcaagatcatcagcggcagcagcggcagcctgctgagcagcggcagccaggagagcgacagcagccagagcgccaagaaggacatgctggccgccctgaagagcagacaggaggccctggaggagaccctgagacagagactggaggagctgaagaagctgtgcctgagagaggccgagctgaccggcaagctgcccgtggagtaccccctggaccccggcgaggagccccccatcgtgagaagaagaatcggcaccgccttcaagctggacgagcagaagatcctgcccaagggcgaggaggccgagctggagagactggagagagagttcgccatccagagccagatcaccgaggccgccagaagactggccagcgaccccaacgtgagcaagaagctgtag

SEQ ID NO: 9473 - DNA, 1605 bp, synthetic construct
  source 1..1605: mol_type = other DNA; note = Synthetic coding sequence
atgaagcaggagggcagcgccagaagaagaggcgccgacaaggccaagcccccccccggcggcggcgagcaggagcccccccccccccccgccccccaggacgtggagatgaaggaggaggccgccaccggcggcggcagcaccggcgaggccgacggcaagaccgccgccgccgccgccgagcacagccagagagagctggacaccgtgaccctggaggacatcaaggagcacgtgaagcagctggagaaggccgtgagcggcaaggagcccagattcgtgctgagagccctgagaatgctgcccagcaccagcagaagactgaaccactacgtgctgtacaaggccgtgcagggcttcttcaccagcaacaacgccaccagagacttcctgctgcccttcctggaggagcccatggacaccgaggccgacctgcagttcagacccagaaccggcaaggccgccagcacccccctgctgcccgaggtggaggcctacctgcagctgctggtggtgatcttcatgatgaacagcaagagatacaaggaggcccagaagatcagcgacgacctgatgcagaagatcagcacccagaacagaagagccctggacctggtggccgccaagtgctactactaccacgccagagtgtacgagttcctggacaagctggacgtggtgagaagcttcctgcacgccagactgagaaccgccaccctgagacacgacgccgacggccaggccaccctgctgaacctgctgctgagaaactacctgcactacagcctgtacgaccaggccgagaagctggtgagcaagagcgtgttccccgagcaggccaacaacaacgagtgggccagatacctgtactacaccggcagaatcaaggccatccagctggagtacagcgaggccagaagaaccatgaccaacgccctgagaaaggccccccagcacaccgccgtgggcttcaagcagaccgtgcacaagctgctgatcgtggtggagctgctgctgggcgagatccccgacagactgcagttcagacagcccagcctgaagagaagcctgatgccctacttcctgctgacccaggccgtgagaaccggcaacctggccaagttcaaccaggtgctggaccagttcggcgagaagttccaggccgacggcacctacaccctgatcatcagactgagacacaacgtgatcaagaccggcgtgagaatgatcagcctgagctacagcagaatcagcctggccgacatcgcccagaagctgcagctggacagccccgaggacgccgagttcatcgtggccaaggccatcagagacggcgtgatcgaggccagcatcaaccacgagaagggctacgtgcagagcaaggagatgatcgacatctacagcaccagagagccccagctggccttccaccagagaatcagcttctgcctggacatccacaacatgagcgtgaaggccatgagattcccccccaagagctacaacaaggacctggagagcgccgaggagagaagagagagagagcagcaggacctggagttcgccaaggagatggccgaggacgacgacgacagcttcccctag

SEQ ID NO: 9474 - DNA, 1311 bp, synthetic construct
  source 1..1311: mol_type = other DNA; note = Synthetic coding sequence
atgagaagagacgtgaacggcgtgaccaagagcagattcgagatgttcagcaacagcgacgaggccgtgatcaacaagaagctgcccaaggagctgctgctgagaatcttcagcttcctggacgtggtgaccctgtgcagatgcgcccaggtgagcagagcctggaacgtgctggccctggacggcagcaactggcagagaatcgacctgttcgacttccagagagacatcgagggcagagtggtggagaacatcagcaagagatgcggcggcttcctgagaaagctgagcctgagaggctgcctgggcgtgggcgacaacgccctgagaaccttcgcccagaactgcagaaacatcgaggtgctgaacctgaacggctgcaccaagaccaccgacgccacctgcaccagcctgagcaagttctgcagcaagctgagacacctggacctggccagctgcaccagcatcaccaacatgagcctgaaggccctgagcgagggctgccccctgctggagcagctgaacatcagctggtgcgaccaggtgaccaaggacggcatccaggccctggtgagaggctgcggcggcctgaaggccctgttcctgaagggctgcacccagctggaggacgaggccctgaagtacatcggcgcccactgccccgagctggtgaccctgaacctgcagacctgcctgcagatcaccgacgagggcctgatcaccatctgcagaggctgccacaagctgcagagcctgtgcgccagcggctgcagcaacatcaccgacgccatcctgaacgccctgggccagaactgccccagactgagaatcctggaggtggccagatgcagccagctgaccgacgtgggcttcaccaccctggccagaaactgccacgagctggagaagatggacctggaggagtgcgtgcagatcaccgacagcaccctgatccagctgagcatccactgccccagactgcaggtgctgagcctgagccactgcgagctgatcaccgacgacggcatcagacacctgggcaacggcgcctgcgcccacgaccagctggaggtgatcgagctggacaactgccccctgatcaccgacgccagcctggagcacctgaagagctgccacagcctggagagaatcgagctgtacgactgccagcagatcaccagagccggcatcaagagactgagaacccacctgcccaacatcaaggtgcacgcctacttcgcccccgtgacccccccccccagcgtgggcggcagcagacagagattctgcagatgctgcatcatcctgtag

SEQ ID NO: 9475 - DNA, 1167 bp, synthetic construct
  source 1..1167: mol_type = other DNA; note = Synthetic coding sequence
atgagatgcctgtacggcagagtgggcggcgccagaagaaagatggccgccagcgccgccgccgccgagctgcaggccagcggcggccccagacaccccgtgtgcctgctggtgctgggcatggccggcagcggcaagaccaccttcgtgcagagactgaccggccacctgcacgcccagggcacccccccctacgtgatcaacctggaccccgccgtgcacgaggtgcccttccccgccaacatcgacatcagagacaccgtgaagtacaaggaggtgatgaagcagtacggcctgggccccaacggcggcatcgtgaccagcctgaacctgttcgccaccagattcgaccaggtgatgaagttcatcgagaaggcccagaacatgagcaagtacgtgctgatcgacacccccggccagatcgaggtgttcacctggagcgccagcggcaccatcatcaccgaggccctggccagcagcttccccaccgtggtgatctacgtgatggacaccagcagaagcaccaaccccgtgaccttcatgagcaacatgctgtacgcctgcagcatcctgtacaagaccaagctgcccttcatcgtggtgatgaacaagaccgacatcatcgaccacagcttcgccgtggagtggatgcaggacttcgaggccttccaggacgccctgaaccaggagaccacctacgtgagcaacctgaccagaagcatgagcctggtgctggacgagttctacagcagcctgagagtggtgggcgtgagcgccgtgctgggcaccggcctggacgagctgttcgtgcaggtgaccagcgccgccgaggagtacgagagagagtacagacccgagtacgagagactgaagaagagcctggccaacgccgagagccagcagcagagagagcagctggagagactgagaaaggacatgggcagcgtggccctggacgccggcaccgccaaggacagcctgagccccgtgctgcaccccagcgacctgatcctgaccagaggcaccctggacgaggaggacgaggaggccgacagcgacaccgacgacatcgaccacagagtgaccgaggagagccacgaggagcccgccttccagaacttcatgcaggagagcatggcccagtactggaagagaaacaacaagtag

SEQ ID NO: 9476 - DNA, 1668 bp, synthetic construct
  source 1..1668: mol_type = other DNA; note = Synthetic coding sequence
atgagactgatcggcatgcccaaggagaagtacgacccccccgaccccagaagaatctacaccatcatgagcgccgaggaggtggccaacggcaagaagagccactgggccgagctggagatcagcggcagagtgagaagcctgagcaccagcctgtggagcctgacccacctgaccgccctgcacctgaacgacaactacctgagcagaatcccccccgacatcgccaagctgcacaacctggtgtacctggacctgagcagcaacaagctgagaagcctgcccgccgagctgggcaacatggtgagcctgagagagctgctgctgaacaacaacctgctgagagtgctgccctacgagctgggcagactgttccagctgcagaccctgggcctgaagggcaaccccctgagccaggacatcctgaacctgtaccaggaccccgacggcaccagaaagctgctgaacttcatgctggacaacctggccgtgcaccccgagcagctgccccccagaccctggatcaccctgaaggagagagaccagatcctgcccagcgccagcttcaccgtgatgtgctacaacgtgctgtgcgacaagtacgccaccagacagctgtacggctactgccccagctgggccctgaactgggagtacagaaagaagggcatcatggaggagatcgtgaactgcgacgccgacatcatcagcctgcaggaggtggagaccgagcagtacttcaccctgttcctgcccgccctgaaggagagaggctacgacggcttcttcagccccaagagcagagccaagatcatgagcgagcaggagagaaagcacgtggacggctgcgccatcttcttcaagaccgagaagttcaccctggtgcagaagcacaccgtggagttcaaccaggtggccatggccaacagcgacggcagcgaggccatgctgaacagagtgatgaccaaggacaacatcggcgtggccgtggtgctggaggtgcacaaggagctgttcggcgccggcatgaagcccatccacgccgccgacaagcagctgctgatcgtggccaacgcccacatgcactgggaccccgagtacagcgacgtgaagctgatccagaccatgatgttcgtgagcgaggtgaagaacatcctggagaaggccagcagcagacccggcagccccaccgccgaccccaacagcatccccctggtgctgtgcgccgacctgaacagcctgcccgacagcggcgtggtggagtacctgagcaacggcggcgtggccgacaaccacaaggacttcaaggagctgagatacaacgagtgcctgatgaacttcagctgcaacggcaagaacggcagcagcgagggcagaatcacccacggcttccagctgaagagcgcctacgagaacaacctgatgccctacaccaactacaccttcgacttcaagggcgtgatcgactacatcttctacagcaagacccacatgaacgtgctgggcgtgctgggccccctggacccccagtggctggtggagaacaacatcaccggctgcccccacccccacatccccagcgaccacttcagcctgctgacccagctggagctgcacccccccctgctgcccctggtgaacggcgtgcacctgcccaacagaagatag

SEQ ID NO: 9477 - DNA, 2673 bp, synthetic construct
  source 1..2673: mol_type = other DNA; note = Synthetic coding sequence
agcagcgacagcgagatcatcggctacgccctggacaccctgtacaacatcatcagcaacgaggaggaggaggaggtggaggagaacagcaccagacagagcgaggacctgggcagccagttcaccgagatcttcatcaagcagcaggagaacgtgaccctgctgctgagcctgctggaggagttcgacttccacgtgagatggcccggcgtgaagctgctgaccagcctgctgaagcagctgggcccccaggtgcagcagatcatcctggtgagccccatgggcgtgagcagactgatggacctgctggccgacagcagagaggtgatcagaaacgacggcgtgctgctgctgcaggccctgaccagaagcaacggcgccatccagaagatcgtggccttcgagaacgccttcgagagactgctggacatcatcagcgaggagggcaacagcgacggcggcatcgtggtggaggactgcctgatcctgctgcagaacctgctgaagaacaacaacagcaaccagaacttcttcaaggagggcagctacatccagagaatgaagccctggttcgaggtgggcgacgagaacagcggctggagcgcccagaaggtgaccaacctgcacctgatgctgcagctggtgagagtgctggtgagccccaccaacccccccggcgccaccagcagctgccagaaggccatgttccagtgcggcctgctgcagcagctgtgcaccatcctgatggccaccggcgtgcccgccgacatcctgaccgagaccatcaacaccgtgagcgaggtgatcagaggctgccaggtgaaccaggactacttcgccagcgtgaacgcccccagcaacccccccagacccgccatcgtggtgctgctgatgagcatggtgaacgagagacagcccttcgtgctgagatgcgccgtgctgtactgcttccagtgcttcctgtacaagaaccagaagggccagggcgagatcgtgagcaccctgctgcccagcaccatcgacgccaccggcaacagcgtgagcgccggccagctgctgtgcggcggcctgttcagcaccgacagcctgagcaactggtgcgccgccgtggccctggcccacgccctgcaggagaacgccacccagaaggagcagctgctgagagtgcagctggccaccagcatcggcaacccccccgtgagcctgctgcagcagtgcaccaacatcctgagccagggcagcaagatccagaccagagtgggcctgctgatgctgctgtgcacctggctgagcaactgccccatcgccgtgacccacttcctgcacaacagcgccaacgtgcccttcctgaccggccagatcgccgagaacctgggcgaggaggagcagctggtgcagggcctgtgcgccctgctgctgggcatcagcatctacttcaacgacaacagcctggagagctacatgaaggagaagctgaagcagctgatcgagaagagaatcggcaaggagaacttcatcgagaagctgggcttcatcagcaagcacgagctgtacagcagagccagccagaagccccagcccaacttccccagccccgagtacatgatcttcgaccacgagttcaccaagctggtgaaggagctggagggcgtgatcaccaaggccatctacaagagcagcgaggaggacaagaaggaggaggaggtgaagaagaccctggagcagcacgacaacatcgtgacccactacaagaacatgatcagagagcaggacctgcagctggaggagctgagacagcaggtgagcaccctgaagtgccagaacgagcagctgcagaccgccgtgacccagcaggtgagccagatccagcagcacaaggaccagtacaacctgctgaagatccagctgggcaaggacaaccagcaccagggcagctacagcgagggcgcccagatgaacggcatccagcccgaggagatcggcagactgagagaggagatcgaggagctgaagagaaaccaggagctgctgcagagccagctgaccgagaaggacagcatgatcgagaacatgaagagcagccagaccagcggcaccaacgagcagagcagcgccatcgtgagcgccagagacagcgagcaggtggccgagctgaagcaggagctggccaccctgaagagccagctgaacagccagagcgtggagatcaccaagctgcagaccgagaagcaggagctgctgcagaagaccgaggccttcgccaagagcgtggaggtgcagggcgagaccgagaccatcatcgccaccaagaccaccgacgtggagggcagactgagcgccctgctgcaggagaccaaggagctgaagaacgagatcaaggccctgagcgaggagagaaccgccatcaaggagcagctggacagcagcaacagcaccatcgccatcctgcagaccgagaaggacaagctggagctggagatcaccgacagcaagaaggagcaggacgacctgctggtgctgctggccgaccaggaccagaagatcctgagcctgaagaacaagctgaaggacctgggccaccccgtggaggaggaggacgagctggagagcggcgaccaggaggacgaggacgacgagagcgaggaccccggcaaggacctggaccacatctag

SEQ ID NO: 9478 - DNA, 1944 bp, synthetic construct
  source 1..1944: mol_type = other DNA; note = Synthetic coding sequence
atggccagagccggccccagactggtgctgagcgaggaggccgtgagagccaagagcggcctgggcccccacagagacctggccgagctgcagagcctgagcatccccggcacctaccaggagaagatcacccacctgggccacagcctgatgagcctgaccggcctgaagagcctggacctgagcagaaacagcctggtgagcctggagggcatccagtacctgaccgccctggagagcctgaacctgtactacaactgcatcagcagcctggccgaggtgttcagactgcacgccctgaccgagctggtggacgtggacttcagactgaaccccgtggtgaaggtggagcccgactacagactgttcgtggtgcacctgctgcccaagctgcagcagctggacgacagacccgtgagagccagcgagagaaaggccagcagactgcacttcgccagcgaggacagcctggacagcaaggagagcgtgcccgccagcctgaaggagggcagaccccaccaccccagagccaagtgcaccgaggccctggccaagcagagcctggtgatggacgccgacgacgaggccgtgctgaacctgatcgccgagtgcgagtgggacctgggcagaccccccggcagcaccagcttcagccagaagggcagagaggccgacagcagaggcagccaggagagcagacacctgctgagcccccagctggtgcagtaccagtgcggcgacagcggcaagcagggcagagagaccagaagaagcagctgcagaggctgctgcctggagaagatgccctggagccagctgtgcggcgagctgccccccctgtacggcgccgagcccgaggccagcagagcccccagaccccacacctacttcaccccccaccccgacagcatggacaccgaggacagcgccagcagccagaagctggacctgagcggcgagatggtgcccggccccctgcccgcccccggcaagtgcagaaagagaagaatgcccgtgggcagattccagaccttcagcgaccaggagggcctgggctgccccgagagaacccacggcagcagcgtgcccaaggagagcctgagcagacaggacagcagcgagagcagaaacggcagaaccctgagccagcccgaggccagcgagaccgaggagcagagaagcagaggcgtgaccgacaccagagagcccagccccggcagccacagcgccctgcccggcaagaagaccgccctgcaggccgccctgctggagaccctgctggacctggtggacagaagctggggcggctgcagaagcctgcacagcaacgaggccttcctggcccaggccagacacatcctgagcagcgtggaggagttcaccgccgcccaggacagcagcgccatggtgggcgaggacgtgggcagcctggccctggagagcaagagcctgcagagcagactggccgagcagcagcagcagcacgccagagagatgagcgaggtgaccgccgagctgcaccacacccacaaggagctggacgacctgagacagcacctggacaagagcctggaggagaacagcagactgaagagcctgctgctgagcatgaagaaggaggtgaagagcgccgacaccgccgccaccctgaacctgcagatcgccggcctgcagaccagcgtgaagagactgtgcggcgagatcgtggagctgaagcagcacctggagcactacgacaagatccaggagctgacccagatgctgcaggagagccacagcagcctggtgagcaccaacgagcacctgctgcaggagctgagccaggtgagagcccagcacagagccgaggtggagcagatgcactggagctaccaggagctgaagaagaccatggccctgttcccccacagcagcgccagccacggcggctgccaggcctgctag

SEQ ID NO: 9479 - DNA, 777 bp, synthetic construct
  source 1..777: mol_type = other DNA; note = Synthetic coding sequence
atggccgagaccgaggagagaagcctggacaacttcttcgccaagagagacaagaagaagaagaaggagagaagcaacagagccgccagcgccgccggcgccgccggcagcgccggcggcagcagcggcgccgccggcgccgccggcggcggcgccggcgccggcaccagacccggcgacggcggcaccgccagcgccggcgccgccggccccggcgccgccaccaaggccgtgaccaaggacgaggacgagtggaaggagctggagcagaaggaggtggactacagcggcctgagagtgcaggccatgcagatcagcagcgagaaggaggaggacgacaacgagaagagacaggaccccggcgacaactgggaggagggcggcggcggcggcggcggcatggagaagagcagcggcccctggaacaagaccgcccccgtgcaggccccccccgcccccgtgatcgtgaccgagacccccgagcccgccatgaccagcggcgtgtacagaccccccggcgccagactgaccaccaccagaaagaccccccagggcccccccgagatctacagcgacacccagttccccagcctgcagagcaccgccaagcacgtggagagcagaaaggacaaggagatggagaagagcttcgaggtggtgagacacaagaacagaggcagagacgaggtgagcaagaaccaggccctgaagctgcagctggacaaccagtacgccgtgctggagaaccagaagagcagccacagccagtacaactag

SEQ ID NO: 9480 - DNA, 1077 bp, synthetic construct
  source 1..1077: mol_type = other DNA; note = Synthetic coding sequence
atggccccccagaacctgagcaccttctgcctgctgctgctgtacctgatcggcgccgtgatcgccggcagagacttctacaagatcctgggcgtgcccagaagcgccagcatcaaggacatcaagaaggcctacagaaagctggccctgcagctgcaccccgacagaaaccccgacgacccccaggcccaggagaagttccaggacctgggcgccgcctacgaggtgctgagcgacagcgagaagagaaagcagtacgacacctacggcgaggagggcctgaaggacggccaccagagcagccacggcgacatcttcagccacttcttcggcgacttcggcttcatgttcggcggcacccccagacagcaggacagaaacatccccagaggcagcgacatcatcgtggacctggaggtgaccctggaggaggtgtacgccggcaacttcgtggaggtggtgagaaacaagcccgtggccagacaggcccccggcaagagaaagtgcaactgcagacaggagatgagaaccacccagctgggccccggcagattccagatgacccaggaggtggtgtgcgacgagtgccccaacgtgaagctggtgaacgaggagagaaccctggaggtggagatcgagcccggcgtgagagacggcatggagtaccccttcatcggcgagggcgagccccacgtggacggcgagcccggcgacctgagattcagaatcaaggtggtgaagcaccccatcttcgagagaagaggcgacgacctgtacaccaacgtgaccatcagcctggtggagagcctggtgggcttcgagatggacatcacccacctggacggccacaaggtgcacatcagcagagacaagatcaccagacccggcgccaagctgtggaagaagggcgagggcctgcccaacttcgacaacaacaacatcaagggcagcctgatcatcaccttcgacgtggacttccccaaggagcagctgaccgaggaggccagagagggcatcaagcagctgctgaagcagggcagcgtgcagaaggtgtacaacggcctgcagggctactag

SEQ ID NO: 9481 - DNA, 624 bp, synthetic construct
  source 1..624: mol_type = other DNA; note = Synthetic coding sequence
atgaccagcagaaagaaggtgctgctgaaggtgatcatcctgggcgacagcggcgtgggcaagaccagcctgatgaaccagtacgtgaacaagaagttcagcaaccagtacaaggccaccatcggcgccgacttcctgaccaaggaggtgatggtggacgacagactggtgaccatgcagatctgggacaccgccggccaggagagattccagagcctgggcgtggccttctacagaggcgccgactgctgcgtgctggtgttcgacgtgaccgcccccaacaccttcaagaccctggacagctggagagacgagttcctgatccaggccagccccagagaccccgagaacttccccttcgtggtgctgggcaacaagatcgacctggagaacagacaggtggccaccaagagagcccaggcctggtgctacagcaagaacaacatcccctacttcgagaccagcgccaaggaggccatcaacgtggagcaggccttccagaccatcgccagaaacgccctgaagcaggagaccgaggtggagctgtacaacgagttccccgagcccatcaagctggacaagaacgacagagccaaggccagcgccgagagctgcagctgctag

SEQ ID NO: 9482 - DNA, 3225 bp, synthetic construct
  source 1..3225: mol_type = other DNA; note = Synthetic coding sequence
atgatccccatctgccccgtggtgagcttcacctacgtgcccagcagactgggcgaggacgccaagatggccaccggcaactacttcggcttcacccacagcggcgccgccgccgccgccgccgccgcccagtacagccagcagcccgccagcggcgtggcctacagccaccccaccaccgtggccagctacaccgtgcaccaggcccccgtggccgcccacaccgtgaccgccgcctacgcccccgccgccgccaccgtggccgtggccagacccgcccccgtggccgtggccgccgccgccaccgccgccgcctacggcggctaccccaccgcccacaccgccaccgactacggctacacccagagacagcaggaggccccccccccccccccccccgccaccacccagaactaccaggacagctacagctacgtgagaagcaccgcccccgccgtggcctacgacagcaagcagtactaccagcagcccaccgccaccgccgccgccgtggccgccgccgcccagccccagcccagcgtggccgagacctactaccagaccgcccccaaggccggctacagccagggcgccacccagtacacccaggcccagcagaccagacaggtgaccgccatcaagcccgccacccccagccccgccaccaccaccttcagcatctaccccgtgagcagcaccgtgcagcccgtggccgccgccgccaccgtggtgcccagctacacccagagcgccacctacagcaccaccgccgtgacctacagcggcaccagctacagcggctacgaggccgccgtgtacagcgccgccagcagctactaccagcagcagcagcagcagcagaagcaggccgccgccgccgccgccgccgccgccgccaccgccgcctggaccggcaccaccttcaccaagaaggcccccttccagaacaagcagctgaagcccaagcagccccccaagcccccccagatccactactgcgacgtgtgcaagatcagctgcgccggcccccagacctacaaggagcacctggagggccagaagcacaagaagaaggaggccgccctgaaggccagccagaacaccagcagcagcaacagcagcaccagaggcacccagaaccagctgagatgcgagctgtgcgacgtgagctgcaccggcgccgacgcctacgccgcccacatcagaggcgccaagcaccagaaggtggtgaagctgcacaccaagctgggcaagcccatccccagcaccgagcccaacgtggtgagccaggccaccagcagcaccgccgtgagcgccagcaagcccaccgccagccccagcagcatcgccgccaacaactgcaccgtgaacaccagcagcgtggccaccagcagcatgaagggcctgaccaccaccggcaacagcagcctgaacagcaccagcaacaccaaggtgagcgccgtgcccaccaacatggccgccaagaagaccagcacccccaagatcaacttcgtgggcggcaacaagctgcagagcaccggcaacaaggccgaggacatcaagggcaccgagtgcgtgaagagcacccccgtgaccagcgccgtgcagatccccgaggtgaagcaggacaccgtgagcgagcccgtgacccccgccagcctggccgccctgcagagcgacgtgcagcccgtgggccacgactacgtggaggaggtgagaaacgacgagggcaaggtgatcagattccactgcaagctgtgcgagtgcagcttcaacgaccccaacgccaaggagatgcacctgaagggcagaagacacagactgcagtacaagaagaaggtgaaccccgacctgcaggtggaggtgaagcccagcatcagagccagaaagatccaggaggagaagatgagaaagcagatgcagaaggaggagtactggagaagaagagaggaggaggagagatggagaatggagatgagaagatacgaggaggacatgtactggagaagaatggaggaggagcagcaccactgggacgacagaagaagaatgcccgacggcggctacccccacggcccccccggccccctgggcctgctgggcgtgagacccggcatgcccccccagccccagggccccgcccccctgagaagacccgacagcagcgacgacagatacgtgatgaccaagcacgccaccatctaccccaccgaggaggagctgcaggccgtgcagaagatcgtgagcatcaccgagagagccctgaagctggtgagcgacagcctgagcgagcacgagaagaacaagaacaaggagggcgacgacaagaaggagggcggcaaggacagagccctgaagggcgtgctgagagtgggcgtgctggccaagggcctgctgctgagaggcgacagaaacgtgaacctggtgctgctgtgcagcgagaagcccagcaagaccctgctgagcagaatcgccgagaacctgcccaagcagctggccgtgatcagccccgagaagtacgacatcaagtgcgccgtgagcgaggccgccatcatcctgaacagctgcgtggagcccaagatgcaggtgaccatcaccctgaccagccccatcatcagagaggagaacatgagagagggcgacgtgaccagcggcatggtgaaggacccccccgacgtgctggacagacagaagtgcctggacgccctggccgccctgagacacgccaagtggttccaggccagagccaacggcctgcagagctgcgtgatcatcatcagaatcctgagagacctgtgccagagagtgcccacctggagcgacttccccagctgggccatggagctgctggtggagaaggccatcagcagcgccagcagcccccagagccccggcgacgccctgagaagagtgttcgagtgcatcagcagcggcatcatcctgaagggcagccccggcctgctggacccctgcgagaaggaccccttcgacaccctggccaccatgaccgaccagcagagagaggacatcaccagcagcgcccagttcgccctgagactgctggccttcagacagatccacaaggtgctgggcatggaccccctgccccagatgagccagagattcaacatccacaacaacagaaagagaagaagagacagcgacggcgtggacggcttcgaggccgagggcaagaaggacaagaaggactacgacaacttctag

SEQ ID NO: 9483 - DNA, 438 bp, synthetic construct
  source 1..438: mol_type = other DNA; note = Synthetic coding sequence
atgaagttcaaccccttcgtgaccagcgacagaagcaagaacagaaagagacacttcaacgcccccagccacgtgagaagaaagatcatgagcagccccctgagcaaggagctgagacagaagtacaacgtgagaagcatgcccatcagaaaggacgacgaggtgcaggtggtgagaggccactacaagggccagcagatcggcaaggtggtgcaggtgtacagaaagaagtacgtgatctacatcgagagagtgcagagagagaaggccaacggcaccaccgtgcacgtgggcatccaccccagcaaggtggtgatcaccagactgaagctggacaaggacagaaagaagatcctggagagaaaggccaagagcagacaggtgggcaaggagaagggcaagtacaaggaggagctgatcgagaagatgcaggagtag

SEQ ID NO: 9484 - DNA, 3177 bp, synthetic construct
  source 1..3177: mol_type = other DNA; note = Synthetic coding sequence
atggaggacggcacccccaagcacatcatccagatgaccggcttcaagatggaggagaaggaggccctggtgaagctgctgctgaagctggactgcaccttcatcaagagcgagaagtacaagaactgcacccacctgatcgccgagagactgtgcaagagcgagaagttcctggccgcctgcgccgccggcaagtggatcctgaccaaggactacatcatccacagcgccaagagcggcagatggctggacgagaccacctacgagtggggctacaagatcgagaaggacagcagatacagcccccagatgcagagcgcccccaagagatggagagaggagctgaagagaaccggcgcccccggcgccttccacagatggaaggtggtgctgctggtgagaaccgacaagagaagcgacagcctgatcagagtgctggaggccggcaaggccaacgtgatcctgcccaagagcagccccagcggcatcacccacgtgatcgccagcaacgccagaatcaaggccgagaaggagaaggacaacttcaaggcccccttctaccccatccagtacctgggcgacttcctgctggagaaggagatccagaacgacgaggacagccagaccaacagcgtgtggaccgagcacagcaacgaggagaccaacaaggacttcagaaaggacgccggcttcctggagatgaagggcgccctgagagagaccatgtacagaacccagaaggagatgcagaaccacgaggacgtgaacgtgggcagcatcctgatccagcaccacaagaaggagaagttcagcggcagcagcaaggacctgaagttcgtgaagatgagaaacaccttcggcagccacacctacgagaaccagaaggagatcaagaagaaggacgaggacatccagagaagctacaccctgagaagaaagagaaagaagggcaaggagagcaactgcaagaagggcgtggagcacgagaagatcaagagcaccctgagaagacacatctacaacagagaccagaaggagatgaagaacagcatcttcgccgagtacgccaaggagagcaaggccatggccatcaagaccgacgtggacgtggtggagatcaagaacaccctgagaaagcacatctacagagcccaggccgtgagatacaactgcatcagaatcgacaagcagcccgtgtacaacgtggaggtgaagaacgccgagttccccagaggcgtgctgaacctgatcgagagcctgatcgagggccacttcttcaaggaggccatcgaggagctgagcaccctgcaggcccactacatcccccccgtgtgcgtgctgcacgccctgctggagaacgtgctgcaggacaacatcgacaccttcagcggcagatacttccacatcctgagcgccctgctgcacctgcaccccccctggaagagccccgccatgagcagatactacctggagctgttccagtgccccacctgcatgaagggcgcctggagcctggtggaggtgctgatcagaagctgcctgttcaacgagagcttctgccaccagatcagcgagaacatcggcagcaaggtgctgcacctgaccctgctgaagttcttcttcaacctgatcgagagcgaggtgcagcacctgagccagaagctgtacgactggagcgacagccagaacctgaagatcaccggcaaggccatgctgctggagatcttctggagcggcagcgagaccagcggcctgctgaccaagcccgtgaacatgctgctggagtggaccatctacagccacaaggagaagttcaagagcaacgacgtgttcaagcacgagctggcctacctgctggccggcatcctgggcgccgccatcgactactggatcttcctgggcctgaagatgggcagaaacgtgatgagacacatgagcgacgacctgggcagctacgtgagcctgagctgcgacgacttcagcagccaggagctggagatcttcatctgcagcttcagcagcagctggctgcagatgttcgtggccgaggccgtgttcaagaagctgtgcctgcagagcagcggcagcgtgagcagcgagcccctgagcctgcagaagatggtgtacagctacctgcccgccctgggcaagaccggcgtgctgggcagcggcaagatccaggtgagcaagaagatcggccagagaccctgcttcgacagccagagaaccctgctgatgctgaacggcaccaagcagaagcaggtggagggcctgcccgagctgctggacctgaacctggccaagtgcagcagcagcctgaagaagctgaagaagaagagcgagggcgagctgagctgcagcaaggagaactgccccagcgtggtgaagaagatgaacttccacaagaccaacctgaagggcgagaccgccctgcacagagcctgcatcaacaaccaggtggagaagctgatcctgctgctgagcctgcccggcatcgacatcaacgtgaaggacaacgccggctggacccccctgcacgaggcctgcaactacggcaacaccgtgtgcgtgcaggagatcctgcagagatgccccgaggtggacctgctgacccaggtggacggcgtgacccccctgcacgacgccctgagcaacggccacgtggagatcggcaagctgctgctgcagcacggcggccccgtgctgctgcagcagagaaacgccaagggcgagctgcccctggactacgtggtgagcccccagatcaaggaggagctgttcgccatcaccaagatcgaggacaccgtggagaacttccacgcccaggccgagaagcacttccactaccagcagctggagttcggcagcttcctgctgagcagaatgctgctgaacttctgcagcatcttcgacctgagcagcgagttcatcctggccagcaagggcctgacccacctgaacgagctgctgatggcctgcaagagccacaaggagaccaccagcgtgcacaccgactggctgctggacctgtacgccggcaacatcaagaccctgcagaagctgccccacatcctgaaggagctgcccgagaacctgaaggtgtgccccggcgtgcacaccgaggccctgatgatcaccctggagatgatgtgcagaagcgtgatggagttcagctag

SEQ ID NO: 9485 - DNA, 660 bp, synthetic construct
  source 1..660: mol_type = other DNA; note = Synthetic coding sequence
atggagcccaaggaggccaccggcaaggagaacatggtgaccaagaagaagaacctggccttcctgagaagcagactgtacatgctggagagaagaaagaccgacaccgtggtggagagcagcgtgagcggcgaccacagcggcaccctgagaagaagccagagcgacagaaccgagtacaaccagaagctgcaggagaagatgaccccccagggcgagtgcagcgtggccgagaccctgacccccgaggaggagcaccacatgaagagaatgatggccaagagagagaagatcatcaaggagctgatccagaccgagaaggactacctgaacgacctggagctgtgcgtgagagaggtggtgcagcccctgagaaacaagaagaccgacagactggacgtggacagcctgttcagcaacatcgagagcgtgcaccagatcagcgccaagctgctgagcctgctggaggaggccaccaccgacgtggagcccgccatgcaggtgatcggcgaggtgttcctgcagatcaagggccccctggaggacatctacaagatctactgctaccaccacgacgaggcccacagcatcctggagagctacgagaaggaggaggagctgaaggagcacctgagccactgcatccagagcctgaagtag

SEQ ID NO: 9486 - DNA, 3183 bp, synthetic construct
  source 1..3183: mol_type = other DNA; note = Synthetic coding sequence
atgctgatcgaggacgtggacgccctgaagagctggctggccaagctgctggagcccatctgcgacgccgaccccagcgccctggccaactacgtggtggccctggtgaagaaggacaagcccgagaaggagctgaaggccttctgcgccgaccagctggacgtgttcctgcagaaggagaccagcggcttcgtggacaagctgttcgagagcctgtacaccaagaactacctgcccctgctggagcccgtgaagcccgagcccaagcccctggtgcaggagaaggaggagatcaaggaggaggtgttccaggagcccgccgaggaggagagagacggcagaaagaagaagtaccccagcccccagaagaccagaagcgagagcagcgagagaagaaccagagagaagaagagagaggacggcaagtggagagactacgacagatactacgagagaaacgagctgtacagagagaagtacgactggagaagaggcagaagcaagagcagaagcaagagcagaggcctgagcagaagcagaagcagaagcagaggcagaagcaaggacagagaccccaacagaaacgtggagcacagagagagaagcaagttcaagagcgagagaaacgacctggagagcagctacgtgcccgtgagcgcccccccccccaacagcagcgagcagtacagcagcggcgcccagagcatccccagcaccgtgaccgtgatcgcccccgcccaccacagcgagaacaccaccgagagctggagcaactactacaacaaccacagcagcagcaacagcttcggcagaaacctgccccccaagagaagatgcagagactacgacgagagaggcttctgcgtgctgggcgacctgtgccagttcgaccacggcaacgaccccctggtggtggacgaggtggccctgcccagcatgatccccttccccccccccccccccggcctgccccccccccccccccccggcatgctgatgccccccatgcccggccccggccccggccccggccccggccccggccccggccccggccccggccccggccccggccacagcatgagactgcccgtgccccagggccacggccagcccccccccagcgtggtgctgcccatccccagaccccccatcacccagagcagcctgatcaacagcagagaccagcccggcaccagcgccgtgcccaacctggccagcgtgggcaccagactgcccccccccctgccccagaacctgctgtacaccgtgagcgagagacagcccatgtacagcagagagcacggcgccgccgccagcgagagactgcagctgggcacccccccccccctgctggccgccagactggtgccccccagaaacctgatgggcagcagcatcggctaccacaccagcgtgagcagccccacccccctggtgcccgacacctacgagcccgacggctacaaccccgaggcccccagcatcaccagcagcggcagaagccagtacagacagttcttcagcagaacccagacccagagacccaacctgatcggcctgaccagcggcgacatggacgtgaaccccagagccgccaacatcgtgatccagaccgagccccccgtgcccgtgagcatcaacagcaacatcaccagagtggtgctggagcccgacagcagaaagagagccatgagcggcctggagggccccctgaccaagaagccctggctgggcaagcagggcaacaacaaccagaacaagcccggcttcctgagaaagaaccagtacaccaacaccaagctggaggtgaagaagatcccccaggagctgaacaacatcaccaagctgaacgagcacttcagcaagttcggcaccatcgtgaacatccaggtggccttcaagggcgaccccgaggccgccctgatccagtacctgaccaacgaggaggccagaaaggccatcagcagcaccgaggccgtgctgaacaacagattcatcagagtgctgtggcacagagagaacaacgagcagcccaccctgcagagcagcgcccagctgctgctgcagcagcagcagaccctgagccacctgagccagcagcaccaccacctgccccagcacctgcaccagcagcaggtgctggtggcccagagcgcccccagcaccgtgcacggcggcatccagaagatgatgagcaagccccagaccagcggcgcctacgtgctgaacaaggtgcccgtgaagcacagactgggccacgccggcggcaaccagagcgacgccagccacctgctgaaccagagcggcggcgccggcgaggactgccagatcttcagcacccccggccaccccaagatgatctacagcagcagcaacctgaagacccccagcaagctgtgcagcggcagcaagagccacgacgtgcaggaggtgctgaagaagaagcaggaggccatgaagctgcagcaggacatgagaaagaagagacaggaggtgctggagaagcagatcgagtgccagaagatgctgatcagcaagctggagaagaacaagaacatgaagcccgaggagagagccaacatcatgaagaccctgaaggagctgggcgagaagatcagccagctgaaggacgagctgaagaccagcagcgccgtgagcacccccagcaaggtgaagaccaagaccgaggcccagaaggagctgctggacaccgagctggacctgcacaagagactgagcagcggcgaggacaccaccgagctgagaaagaagctgagccagctgcaggtggaggccgccagactgggcatcctgcccgtgggcagaggcaagaccatgagcagccagggcagaggcagaggcagaggcagaggcggcagaggcagaggcagcctgaaccacatggtggtggaccacagacccaaggccctgaccgtgggcggcttcatcgaggaggagaaggaggacctgctgcagcacttcagcaccgccaaccagggccccaagttcaaggacagaagactgcagatcagctggcacaagcccaaggtgcccagcatcagcaccgagaccgaggaggaggaggtgaaggaggaggagaccgagaccagcgacctgttcctgcccgacgacgacgacgaggacgaggacgagtacgagagcagaagctggagaagatag

SEQ ID NO: 9487 - DNA, 1818 bp, synthetic construct
  source 1..1818: mol_type = other DNA; note = Synthetic coding sequence
atggaggccgacatcatcaccaacctgagatgcagactgaaggaggccgaggaggagagactgaaggccgcccagtacggcctgcagctggtggagagccagaacgagctgcagaaccagctggacaagtgcagaaacgagatgatgaccatgaccgagagctacgagcaggagaagtacaccctgcagagagaggtggagctgaagagcagaatgctggagagcctgagctgcgagtgcgaggccatcaagcagcagcagaagatgcacctggagaagctggaggagcagctgagcagaagccacggccaggaggtgaacgagctgaagaccaagatcgagaagctgaaggtggagctggacgaggccagactgagcgagaagcagctgaagcaccaggtggaccaccagaaggagctgctgagctgcaagagcgaggagctgagagtgatgagcgagagagtgcaggagagcatgagcagcgagatgctggccctgcagatcgagctgaccgagatggagagcatgaagaccaccctgaaggaggaggtgaacgagctgcagtacagacaggagcagctggagctgctgatcaccaacctgatgagacaggtggacagactgaaggaggagaaggaggagagagagaaggaggccgtgagctactacaacgccctggagaaggccagagtggccaaccaggacctgcaggtgcagctggaccaggccctgcagcaggccctggaccccaacagcaagggcaacagcctgttcgccgaggtggaggacagaagagccgccatggagagacagctgatcagcatgaaggtgaagtaccagagcctgaagaagcagaacgtgttcaacagagagcagatgcagagaatgaagctgcagatcgccaccctgctgcagatgaagggcagccagaccgagttcgagcagcaggagagactgctggccatgctggagcagaagaacggcgagatcaagcacctgctgggcgagatcagaaacctggagaagttcaagaacctgtacgacagcatggagagcaagcccagcgtggacagcggcaccctggaggacaacacctactacaccgacctgctgcagatgaagctggacaacctgaacaaggagatcgagagcaccaagggcgagctgagcatccagagaatgaaggccctgttcgagagccagagagccctggacatcgagagaaagctgttcgccaacgagagatgcctgcagctgagcgagagcgagaacatgaagctgagagccaagctggacgagctgaagctgaagtacgagcccgaggagaccgtggaggtgcccgtgctgaagaagagaagagaggtgctgcccgtggacatcaccaccgccaaggacgcctgcgtgaacaacagcgccctgggcggcgaggtgtacagactgcccccccagaaggaggagacccagagctgccccaacagcctggaggacaacaacctgcagctggagaagagcgtgagcatctacacccccgtggtgagcctgagcccccacaagaacctgcccgtggacatgcagctgaagaaggagaagaagtgcgtgaagctgatcggcgtgcccgccgacgccgaggccctgagcgagagaagcggcaacacccccaacagccccagactggccgccgagagcaagctgcagaccgaggtgaaggagggcaaggagaccagcagcaagctggagaaggagacctgcaagaagctgcaccccatcctgtacgtgagcagcaagagcacccccgagacccagtgcccccagcagtag

SEQ ID NO: 9488 - DNA, 888 bp, synthetic construct
  source 1..888: mol_type = other DNA; note = Synthetic coding sequence
atgatggccaagaagccccccaagcccgcccccagaagaatcttccaggagagactgaagatcaccgccctgcccctgtacttcgagggcttcctgctgatcaagagaagcggctacagagagtacgagcactactggaccgagctgagaggcaccaccctgttcttctacaccgacaagaagagcatcatctacgtggacaagctggacatcgtggacctgacctgcctgaccgagcagaacagcaccgagaagaactgcgccaagttcaccctggtgctgcccaaggaggaggtgcagctgaagaccgagaacaccgagagcggcgaggagtggagaggcttcatcctgaccgtgaccgagctgagcgtgccccagaacgtgagcctgctgcccggccaggtgatcaagctgcacgaggtgctggagagagagaagaagagaagaatcgagaccgagcagagcaccagcgtggagaaggagaaggagcccaccgaggactacgtggacgtgctgaaccccatgcccgcctgcttctacaccgtgagcagaaaggaggccaccgagatgctgcagaagaaccccagcctgggcaacatgatcctgagacccggcagcgacagcagaaactacagcatcaccatcagacaggagatcgacatccccagaatcaagcactacaaggtgatgagcgtgggccagaactacaccatcgagctggagaagcccgtgaccctgcccaacctgttcagcgtgatcgactacttcgtgaaggagaccagaggcaacctgagacccttcatctgcagcaccgacgagaacaccggccaggagcccagcatggagggcagaagcgagaagctgaagaagaacccccacatcgcctag

SEQ ID NO: 9489 - DNA, 4821 bp, synthetic construct
  source 1..4821: mol_type = other DNA; note = Synthetic coding sequence
atgttccacatctgccccgccgagaacctgtaccagaacagattcctgggcctggccgccatggccagccccagcagaaacagccagagcagaagaagatgcaaggagcccctgagatacagctacaaccccgaccagttccacaacatggacctgagaggcggcccccacgacggcgtgaccatccccagaagcaccagcgacaccgacctggtgaccagcgacagcagaagcaccctgatggtgagcagcagctactacagcatcggccacagccaggacctggtgatccactgggacatcaaggaggaggtggacgccggcgactggatcggcatgtacctgatcgacgaggtgctgagcgagaacttcctggactacaagaacagaggcgtgaacggcagccacagaggccagatcatctggaagatcgacgccagcagctacttcgtggagcccgagaccaagatctgcttcaagtactaccacggcgtgagcggcgccctgagagccaccacccccagcgtgaccgtgaagaacagcgccgcccccatcttcaagagcatcggcgccgacgagaccgtgcagggccagggcagcagaagactgatcagcttcagcctgagcgacttccaggccatgggcctgaagaagggcatgttcttcaaccccgacccctacctgaagatcagcatccagcccggcaagcacagcatcttccccgccctgccccaccacggccaggagagaagaagcaagatcatcggcaacaccgtgaaccccatctggcaggccgagcagttcagcttcgtgagcctgcccaccgacgtgctggagatcgaggtgaaggacaagttcgccaagagcagacccatcatcaagagattcctgggcaagctgagcatgcccgtgcagagactgctggagagacacgccatcggcgacagagtggtgagctacaccctgggcagaagactgcccaccgaccacgtgagcggccagctgcagttcagattcgagatcaccagcagcatccaccccgccgacgacgaggagatcagcctgagcaccgagcccgagagcgcccagatccaggacagccccatgaacaacctgatggagagcggcagcggcgagcccagaagcgaggcccccgagagcagcgagagctggaagcccgagcagctgggcgagggcagcgtgcccgacggccccggcaaccagagcatcgagctgagcagacccgccgaggaggccgccgtgatcaccgaggccggcgaccagggcatggtgagcgtgggccccgagggcgccggcgagctgctggcccaggtgcagaaggacatccagcccgcccccagcgccgaggagctggccgagcagctggacctgggcgaggaggccagcgccctgctgctggaggacggcgaggcccccgccagcaccaaggaggagcccctggaggaggaggccaccacccagagcagagccggcagagaggaggaggagaaggagcaggaggaggagggcgacgtgagcaccctggagcagggcgagggcagactgcagctgagagccagcgtgaagagaaagagcagaccctgcagcctgcccgtgagcgagctggagaccgtgatcgccagcgcctgcggcgaccccgagacccccagaacccactacatcagaatccacaccctgctgcacagcatgcccagcgcccagggcggcagcgccgccgaggaggaggacggcgccgaggaggagagcaccctgaaggacagcagcgagaaggacggcctgagcgaggtggacaccgtggccgccgaccccagcgccctggaggaggacagagaggagcccgagggcgccacccccggcaccgcccaccccggccacagcggcggccacttccccagcctggccaacggcgccgcccaggacggcgacacccaccccagcaccggcagcgagagcgacagcagccccagacagggcggcgaccacagctgcgagggctgcgacgccagctgctgcagccccagctgctacagcagcagctgctacagcaccagctgctacagcagcagctgctacagcgccagctgctacagccccagctgctacaacggcaacagattcgccagccacaccagattcagcagcgtggacagcgccaagatcagcgagagcaccgtgttcagcagccaggacgacgaggaggaggagaacagcgccttcgagagcgtgcccgacagcatgcagagccccgagctggaccccgagagcaccaacggcgccggcccctggcaggacgagctggccgcccccagcggccacgtggagagaagccccgagggcctggagagccccgtggccggccccagcaacagaagagagggcgagtgccccatcctgcacaacagccagcccgtgagccagctgcccagcctgagacccgagcaccaccactaccccaccatcgacgagcccctgccccccaactgggaggccagaatcgacagccacggcagagtgttctacgtggaccacgtgaacagaaccaccacctggcagagacccaccgccgccgccacccccgacggcatgagaagaagcggcagcatccagcagatggagcagctgaacagaagataccagaacatccagagaaccatcgccaccgagagaagcgaggaggacagcggcagccagagctgcgagcaggcccccgccggcggcggcggcggcggcggcagcgacagcgaggccgagagcagccagagcagcctggacctgagaagagagggcagcctgagccccgtgaacagccagaagatcaccctgctgctgcagagccccgccgtgaagttcatcaccaaccccgagttcttcaccgtgctgcacgccaactacagcgcctacagagtgttcaccagcagcacctgcctgaagcacatgatcctgaaggtgagaagagacgccagaaacttcgagagataccagcacaacagagacctggtgaacttcatcaacatgttcgccgacaccagactggagctgcccagaggctgggagatcaagaccgaccagcagggcaagagcttcttcgtggaccacaacagcagagccaccaccttcatcgaccccagaatccccctgcagaacggcagactgcccaaccacctgacccacagacagcacctgcagagactgagaagctacagcgccggcgaggccagcgaggtgagcagaaacagaggcgccagcctgctggccagacccggccacagcctggtggccgccatcagaagccagcaccagcacgagagcctgcccctggcctacaacgacaagatcgtggccttcctgagacagcccaacatcttcgagatgctgcaggagagacagcccagcctggccagaaaccacaccctgagagagaagatccactacatcagaaccgagggcaaccacggcctggagaagctgagctgcgacgccgacctggtgatcctgctgagcctgttcgaggaggagatcatgagctacgtgcccctgcaggccgccttccaccccggctacagcttcagccccagatgcagcccctgcagcagcccccagaacagccccggcctgcagagagccagcgccagagcccccagcccctacagaagagacttcgaggccaagctgagaaacttctacagaaagctggaggccaagggcttcggccagggccccggcaagatcaagctgatcatcagaagagaccacctgctggagggcaccttcaaccaggtgatggcctacagcagaaaggagctgcagagaaacaagctgtacgtgaccttcgtgggcgaggagggcctggactacagcggccccagcagagagttcttcttcctgctgagccaggagctgttcaacccctactacggcctgttcgagtacagcgccaacgacacctacaccgtgcagatcagccccatgagcgccttcgtggagaaccacctggagtggttcagattcagcggcagaatcctgggcctggccctgatccaccagtacctgctggacgccttcttcaccagacccttctacaaggccctgctgagactgccctgcgacctgagcgacctggagtacctggacgaggagttccaccagagcctgcagtggatgaaggacaacaacatcaccgacatcctggacctgaccttcaccgtgaacgaggaggtgttcggccaggtgaccgagagagagctgaagagcggcggcgccaacacccaggtgaccgagaagaacaagaaggagtacatcgagagaatggtgaagtggagagtggagagaggcgtggtgcagcagaccgaggccctggtgagaggcttctacgaggtggtggacagcagactggtgagcgtgttcgacgccagagagctggagctggtgatcgccggcaccgccgagatcgacctgaacgactggagaaacaacaccgagtacagaggcggctaccacgacggccacctggtgatcagatggttctgggccgccgtggagagattcaacaacgagcagagactgagactgctgcagttcgtgaccggcaccagcagcgtgccctacgagggcttcgccgccctgagaggcagcaacggcctgagaagattctgcatcgagaagtggggcaagatcaccagcctgcccagagcccacacctgcttcaacagactggacctgcccccctaccccagctacagcatgctgtacgagaagctgctgaccgccgtggaggagaccagcaccttcggcctggagtag

SEQ ID NO: 9490 - DNA, 2373 bp, synthetic construct
  source 1..2373: mol_type = other DNA; note = Synthetic coding sequence
atgggcaccagaaagaaggtgcacgccttcgtgagagtgaagcccaccgacgacttcgcccacgagatgatcagatacggcgacgacaagagaagcatcgacatccacctgaagaaggacatcagaagaggcgtggtgaacaaccagcagaccgactggagcttcaagctggacggcgtgctgcacgacgccagccaggacctggtgtacgagaccgtggccaaggacgtggtgagccaggccctggacggctacaacggcaccatcatgtgctacggccagaccggcgccggcaagacctacaccatgatgggcgccaccgagaactacaagcacagaggcatcctgcccagagccctgcagcaggtgttcagaatgatcgaggagagacccacccacgccatcaccgtgagagtgagctacctggagatctacaacgagagcctgttcgacctgctgagcaccctgccctacgtgggccccagcgtgacccccatgaccatcgtggagaacccccagggcgtgttcatcaagggcctgagcgtgcacctgaccagccaggaggaggacgccttcagcctgctgttcgagggcgagaccaacagaatcatcgccagccacaccatgaacaagaacagcagcagaagccactgcatcttcaccatctacctggaggcccacagcagaaccctgagcgaggagaagtacatcaccagcaagatcaacctggtggacctggccggcagcgagagactgggcaagagcggcagcgagggccaggtgctgaaggaggccacctacatcaacaagagcctgagcttcctggagcaggccatcatcgccctgggcgaccagaagagagaccacatccccttcagacagtgcaagctgacccacgccctgaaggacagcctgggcggcaactgcaacatggtgctggtgaccaacatctacggcgaggccgcccagctggaggagaccctgagcagcctgagattcgccagcagaatgaagctggtgaccaccgagcccgccatcaacgagaagtacgacgccgagagaatggtgaagaacctggagaaggagctggccctgctgaagcaggagctggccatccacgacagcctgaccaacagaaccttcgtgacctacgaccccatggacgagatccagatcgccgagatcaacagccaggtgagaagatacctggagggcaccctggacgagatcgacatcatcagcctgagacagatcaaggaggtgttcaaccagttcagagtggtgctgagccagcaggagcaggaggtggagagcaccctgagaagaaagtacaccctgatcgacagaaacgacttcgccgccatcagcgccatccagaaggccggcctggtggacgtggacggccacctggtgggcgagcccgagggccagaacttcggcctgggcgtggcccccttcagcaccaagcccggcaagaaggccaagagcaagaagaccttcaaggagcccctgagcagcctggccagaaaggagggcgccagcagccccgtgaacggcaaggacctggactacgtgagcaccagcaagacccagctggtgcccagcagcaaggacggcgacgtgaaggacatgctgagcagagacagagagaccagcagcatcgagcccctgcccagcgacagccccaaggaggagctgagacccatcagacccgacaccccccccagcaagcccgtggccttcgaggagttcaagaacgagcagggcagcgagatcaacagaatcttcaaggagaacaagagcatcctgaacgagagaagaaagagagccagcgagaccacccagcacatcaacgccatcaagagagagatcgacgtgaccaaggaggccctgaacttccagaagagcctgagagagaagcagggcaagtacgagaacaagggcctgatgatcatcgacgaggaggagttcctgctgatcctgaagctgaaggacctgaagaagcagtacagaagcgagtaccaggacctgagagacctgagagccgagatccagtactgccagcacctggtggaccagtgcagacacagactgctgatggagttcgacatctggtacaacgagagcttcgtgatccccgaggacatgcagatggccctgaagcccggcggcagcatcagacccggcatggtgcccgtgaacagaatcgtgagcctgggcgaggacgaccaggacaagttcagccagctgcagcagagagtgctgcccgagggccccgacagcatcagcttctacaacgccaaggtgaagatcgagcagaagcacaactacctgaagaccatgatgggcctgcagcaggcccacagaaagtag

SEQ ID NO: 9491 - DNA, 876 bp, synthetic construct
  source 1..876: mol_type = other DNA; note = Synthetic coding sequence
atggccagcgtgaccctgagcgaggccgagaaggtgtacatcgtgcacggcgtgcaggaggacctgagagtggacggcagaggctgcgaggactacagatgcgtggaggtggagaccgacgtggtgagcaacaccagcggcagcgccagagtgaagctgggccacaccgacatcctggtgggcgtgaaggccgagatgggcacccccaagctggagaagcccaacgagggctacctggagttcttcgtggactgcagcgccagcgccacccccgagttcgagggcagaggcggcgacgacctgggcaccgagatcgccaacaccctgtacagaatcttcaacaacaagagcagcgtggacctgaagaccctgtgcatcagccccagagagcactgctgggtgctgtacgtggacgtgctgctgctggagtgcggcggcaacctgttcgacgccatcagcatcgccgtgaaggccgccctgttcaacaccagaatccccagagtgagagtgctggaggacgaggagggcagcaaggacatcgagctgagcgacgacccctacgactgcatcagactgagcgtggagaacgtgccctgcatcgtgaccctgtgcaagatcggctacagacacgtggtggacgccaccctgcaggaggaggcctgcagcctggccagcctgctggtgagcgtgaccagcaagggcgtggtgacctgcatgagaaaggtgggcaagggcagcctggaccccgagagcatcttcgagatgatggagaccggcaagagagtgggcaaggtgctgcacgccagcctgcagagcgtggtgcacaaggaggagagcctgggccccaagagacagaaggtgggcttcctgggctag

SEQ ID NO: 9492 - DNA, 2382 bp, synthetic construct
  source 1..2382: mol_type = other DNA; note = Synthetic coding sequence
atgttctggaagttcgacctgcacagcagcagccacatcgacaccctgctggagagagaggacgtgaccctgaaggagctgatggacgaggaggacgtgctgcaggagtgcaaggcccagaacagaaagctgatcgagttcctgctgaaggccgagtgcctggaggacctggtgagcttcatcatcgaggagcccccccaggacatggacgagaagatcagatacaagtaccccaacatcagctgcgagctgctgaccagcgacgtgagccagatgaacgacagactgggcgaggacgagagcctgctgatgaagctgtacagcttcctgctgaacgacagccccctgaaccccctgctggccagcttcttcagcaaggtgctgagcatcctgatcagcagaaagcccgagcagatcgtggacttcctgaagaagaagcacgacttcgtggacctgatcatcaagcacatcggcaccagcgccatcatggacctgctgctgagactgctgacctgcatcgagcccccccagcccagacaggacgtgctgaactggctgaacgaggagaagatcatccagagactggtggagatcgtgcaccccagccaggaggaggacagacacagcaacgccagccagagcctgtgcgagatcgtgagactgagcagagaccagatgctgcagatccagaacagcaccgagcccgaccccctgctggccaccctggagaagcaggagatcatcgagcagctgctgagcaacatcttccacaaggagaagaacgagagcgccatcgtgagcgccatccagatcctgctgaccctgctggagaccagaagacccaccttcgagggccacatcgagatctgcccccccggcatgagccacagcgcctgcagcgtgaacaagagcgtgctggaggccatcagaggcagactgggcagcttccacgagctgctgctggagccccccaagaacatgttcttcaagtacacctggaacaacttcctgcacacccaggtggagatctgcatcgccctgatcctggccagccccttcgagaacaccgagaacgccaccatcaccgaccaggacagcaccggcgacaacctgctgctgaagcacctgttccagaagtgccagctgatcgagagaatcctggaggcctgggagatgaacgagaagaagcaggccgagggcggcagaagacacggctacatgggccacctgaccagaatcgccaactgcatcgtgcacagcaccgacaagggccccaacagcgccctggtgcagcagctgatcaaggacctgcccgacgaggtgagagagagatgggagaccttctgcaccagcagcctgggcgagaccaacaagagaaacaccgtggacctggccttcagcgactaccagatgcagcagatgaccagcaacttcatcgaccagttcggcttcaacgacgagaagttcgccgaccaggacgacatcggcaacgtgagcttcgacagagtgagcgacatcaacttcaccctgaacaccaacgagagcggcaacatcgccctgttcgaggcctgctgcaaggagagaatccagcagttcgacgacggcggcagcgacgaggaggacatctgggaggagaagcacatcgccttcacccccgagagccagagaagaagcagcagcggcagcaccgacagcgaggagagcaccgacagcgaggaggaggacggcgccaagcaggacctgttcgagcccagcagcgccaacaccgaggacaagatggaggtggacctgagcgagccccccaactggagcgccaacttcgacgtgcccatggagaccacccacggcgcccccctggacagcgtgggcagcgacgtgtggagcaccgaggagcccatgcccaccaaggagaccggctgggccagcttcagcgagttcaccagcagcctgagcaccaaggacagcctgagaagcaacagccccgtggagatggagaccagcaccgagcccatggaccccctgacccccagcgccgccgccctggccgtgcagcccgaggccgccggcagcgtggccatggaggccagcagcgacggcgaggaggacgccgagagcaccgacaaggtgaccgagaccgtgatgaacggcggcatgaaggagaccctgagcctgaccgtggacgccaagaccgagaccgccgtgttcaagagcgaggagggcaagctgagcaccagccaggacgccgcctgcaaggacgccgaggagtgccccgagaccgccgaggccaagtgcgccgcccccagaccccccagcagcagccccgagcagagaaccggccagcccagcgcccccggcgacaccagcgtgaacggccccgtgtag

SEQ ID NO: 9493 - DNA, 3375 bp, synthetic construct
  source 1..3375: mol_type = other DNA; note = Synthetic coding sequence
atggaccccttcaccgagaagctgctggagagaaccagagccagaagagagaacctgcagagaaagatggccgagagacccaccgccgcccccagaagcatgacccacgccaagagagccagacagcccctgagcgaggccagcaaccagcagcccctgagcggcggcgaggagaagagctgcaccaagcccagccccagcaagaagagatgcagcgacaacaccgaggtggaggtgagcaacctggagaacaagcagcccgtggagagcaccagcgccaagagctgcagccccagccccgtgagcccccaggtgcagccccaggccgccgacaccatcagcgacagcgtggccgtgcccgccagcctgctgggcatgagaagaggcctgaacagcagactggaggccaccgccgccagcagcgtgaagaccagaatgcagaagctggccgagcagagaagaagatgggacaacgacgacatgaccgacgacatccccgagagcagcctgttcagccccatgcccagcgaggagaaggccgccagcccccccagacccctgctgagcaacgccagcgccacccccgtgggcagaagaggcagactggccaacctggccgccaccatctgcagctgggaggacgacgtgaaccacagcttcgccaagcagaacagcgtgcaggagcagcccggcaccgcctgcctgagcaagttcagcagcgccagcggcgccagcgccagaatcaacagcagcagcgtgaagcaggaggccaccttctgcagccagagagacggcgacgccagcctgaacaaggccctgagcagcagcgccgacgacgccagcctggtgaacgccagcatcagcagcagcgtgaaggccaccagccccgtgaagagcaccaccagcatcaccgacgccaagagctgcgagggccagaaccccgagctgctgcccaagacccccatcagccccctgaagaccggcgtgagcaagcccatcgtgaagagcaccctgagccagaccgtgcccagcaagggcgagctgagcagagagatctgcctgcagagccagagcaaggacaagagcaccacccccggcggcaccggcatcaagcccttcctggagagattcggcgagagatgccaggagcacagcaaggagagccccgccagaagcaccccccacagaacccccatcatcacccccaacaccaaggccatccaggagagactgttcaagcaggacaccagcagcagcaccacccacctggcccagcagctgaagcaggagagacagaaggagctggcctgcctgagaggcagattcgacaagggcaacatctggagcgccgagaagggcggcaacagcaagagcaagcagctggagaccaagcaggagacccactgccagagcacccccctgaagaagcaccagggcgtgagcaagacccagagcctgcccgtgaccgagaaggtgaccgagaaccagatccccgccaagaacagcagcaccgagcccaagggcttcaccgagtgcgagatgaccaagagcagccccctgaagatcaccctgttcctggaggaggacaagagcctgaaggtgaccagcgaccccaaggtggagcagaagatcgaggtgatcagagagatcgagatgagcgtggacgacgacgacatcaacagcagcaaggtgatcaacgacctgttcagcgacgtgctggaggagggcgagctggacatggagaagagccaggaggagatggaccaggccctggccgagagcagcgaggagcaggaggacgccctgaacatcagcagcatgagcctgctggcccccctggcccagaccgtgggcgtggtgagccccgagagcctggtgagcacccccagactggagctgaaggacaccagcagaagcgacgagagccccaagcccggcaagttccagagaaccagagtgcccagagccgagagcggcgacagcctgggcagcgaggacagagacctgctgtacagcatcgacgcctacagaagccagagattcaaggagaccgagagacccagcatcaagcaggtgatcgtgagaaaggaggacgtgaccagcaagctggacgagaagaacaacgccttcccctgccaggtgaacatcaagcagaagatgcaggagctgaacaacgagatcaacatgcagcagaccgtgatctaccaggccagccaggccctgaactgctgcgtggacgaggagcacggcaagggcagcctggaggaggccgaggccgagagactgctgctgatcgccaccggcaagagaaccctgctgatcgacgagctgaacaagctgaagaacgagggcccccagagaaagaacaaggccagcccccagagcgagttcatgcccagcaagggcagcgtgaccctgagcgagatcagactgcccctgaaggccgacttcgtgtgcagcaccgtgcagaagcccgacgccgccaactactactacctgatcatcctgaaggccggcgccgagaacatggtggccacccccctggccagcaccagcaacagcctgaacggcgacgccctgaccttcaccaccaccttcaccctgcaggacgtgagcaacgacttcgagatcaacatcgaggtgtacagcctggtgcagaagaaggaccccagcggcctggacaagaagaagaagaccagcaagagcaaggccatcacccccaagagactgctgaccagcatcaccaccaagagcaacatccacagcagcgtgatggccagccccggcggcctgagcgccgtgagaaccagcaacttcgccctggtgggcagctacaccctgagcctgagcagcgtgggcaacaccaagttcgtgctggacaaggtgcccttcctgagcagcctggagggccacatctacctgaagatcaagtgccaggtgaacagcagcgtggaggagagaggcttcctgaccatcttcgaggacgtgagcggcttcggcgcctggcacagaagatggtgcgtgctgagcggcaactgcatcagctactggacctaccccgacgacgagaagagaaagaaccccatcggcagaatcaacctggccaactgcaccagcagacagatcgagcccgccaacagagagttctgcgccagaagaaacaccttcgagctgatcaccgtgagaccccagagagaggacgacagagagaccctggtgagccagtgcagagacaccctgtgcgtgaccaagaactggctgagcgccgacaccaaggaggagagagacctgtggatgcagaagctgaaccaggtgctggtggacatcagactgtggcagcccgacgcctgctacaagcccatcggcaagccctag

SEQ ID NO: 9494 - DNA, 1365 bp, synthetic construct
  source 1..1365: mol_type = other DNA; note = Synthetic coding sequence
atgctgaagcagatcctgagcgagatgtacatcgaccccgacctgctggccgagctgagcgaggagcagaagcagatcctgttcttcaagatgagagaggagcagatcagaagatggaaggagagagaggccgccatggagagaaaggagagcctgcccgtgaagcccagacccaagaaggagaacggcaagagcgtgcactggaagctgggcgccgacaaggaggtgtgggtgtgggtgatgggcgagcaccacctggacaagccctacgacgtgctgtgcaacgagatcatcgccgagagagccagactgaaggccgagcaggaggccgaggagcccagaaagacccacagcgaggagttcaccaacagcctgaagaccaagagccagtaccacgacctgcaggcccccgacaaccagcagaccaaggacatctggaagaaggtggccgagaaggaggagctggagcagggcagcagacccgcccccaccctggaggaggagaagatcagaagcctgagcagcagcagcagaaacatccagcagatgctggccgacagcatcaacagaatgaaggcctacgccttccaccagaagaaggagagcatgaagaagaagcaggacgaggagatcaaccagatcgaggaggagagaaccaagcagatctgcaagagctggaaggaggacagcgagtggcaggccagcctgagaaagagcaaggccgccgacgagaagagaagaagcctggccaagcaggccagagaggactacaagagactgagcctgggcgcccagaagggcagaggcggcgagagactgcagagccccctgagagtgccccagaagcccgagagaccccccctgccccccaagccccagttcctgaacagcggcgcctacccccagaagcccctgagaaaccagggcgtggtgagaaccctgagcagcagcgcccaggaggacatcatcagatggttcaaggaggagcagctgcccctgagagccggctaccagaagaccagcgacaccatcgccccctggttccacggcatcctgaccctgaagaaggccaacgagctgctgctgagcaccggcatgcccggcagcttcctgatcagagtgagcgagagaatcaagggctacgccctgagctacctgagcgaggacggctgcaagcacttcctgatcgacgccagcgccgacgcctacagcttcctgggcgtggaccagctgcagcacgccaccctggccgacctggtggagtaccacaaggaggagcccatcaccagcctgggcaaggagctgctgctgtacccctgcggccagcaggaccagctgcccgactacctggagctgttcgagtag

SEQ ID NO: 9495 - DNA, 1497 bp, synthetic construct
  source 1..1497: mol_type = other DNA; note = Synthetic coding sequence
atggacgagaccgagtggatccacagacaccccaaggccgaggacctgagagtgggcctgatcagctgggccggcacctacctgaccttcgaggcctgcaagaacaccgtgaccgccaccgccaagagcctgggcagaagacagacctgggagatcctggtgagcaacgagcacgagacccaggccgtggtgagactgaagagcgtgcagggcctgtacctgctgtgcgagtgcgacggcaccgtgtgctacggcagacccagaaccagccaccacggctgcttcctgctgagattccacagaaacagcaagtggaccctgcagtgcctgatcagcggcagatacctggagagcaacggcaaggacgtgttctgcaccagccacgtgctgagcgcctaccacatgtggacccccagacccgccctgcacgtgcacgtgatcctgtacagccccatccacagatgctacgccagagccgaccccaccatgggcagaatctgggtggacgccgccgtgccctgcctggaggagtgcggcttcctgctgcacttcagagacggctgctaccacctggagaccagcacccaccacttcctgagccacgtggacagactgttcagccagcccagcagccagaccgccttccacatgcaggtgagacccggcggcctggtggccctgtgcgacggcgagggcggcatgctgtacccccagggcacccacctgctgctgggcatgggctgcaaccccatgagaggcgaggagtggttcatcctgcagcactgccccacctgggtgagcctgagaagcaagaccggcagattcatcagcgtgatctacgacggcgaggtgagagccgccagcgagagactgaacagaatgagcctgttccagttcgagtgcgacagcgagagccccaccgtgcagctgagaagcgccaacggctactacctgagccagagaagacacagagccgtgatggccgacggccaccccctggagagcgacaccttcttcagaatgcactggaactgcggcagaatcatcctgcagagctgcagaggcagattcctgggcatcgcccccaacagcctgctgatggccaacgtgatcctgcccggccccaacgaggagttcggcatcctgttcgccaacagaagcttcctggtgctgagaggcagatacggctacgtgggcagcagcagcggccacgacctgatccagtgcaaccaggaccagcccgacagaatccacctgctgccctgcagacccggcatctaccacttccaggcccagggcggcagcttctggagcatcaccagcttcggcaccttcagaccctggggcaagttcgccctgaacttctgcatcgagctgcagggcagcaacctgctgaccgtgctggcccccaacggcttctacatgagagccgaccagagcggcaccctgctggccgacagcgaggacatcaccagagagtgcatctgggagttctag

SEQ ID NO: 9496 - DNA, 1377 bp, synthetic construct
  source 1..1377: mol_type = other DNA; note = Synthetic coding sequence
atggagagagagcccagcgccagcgaggccgcccccgccgccgccgccctgttcgcctggggcgccaacagctacggccagctgggcctgggccacaaggaggacgtgctgctgccccagcagctgaacgacttctgcaagcccagaagcgtgagaagaatcaccggcggcggcggccacagcgccgtggtgaccgacggcggcgacctgttcgtgtgcggcctgaacaaggacggccagctgggcctgggccacaccgaggacatcccctacttcaccccctgcaagagcctgttcggctgccccatccagcaggtggcctgcggctgggacttcaccatcatgctgaccgagaacggccaggtgctgagctgcggcagcaacagcttcggccagctgggcgtgccccacggccccagaagatgcgtggtgccccaggccatcgagctgcacaaggagaaggtggtgtgcatcgccgccggcctgagacacgccgtggccgccaccgccagcggcatcgtgttccagtggggcaccggcctggccagctgcggcagaagactgtgccccggccagaccctgcccctgttcttcaccgccaaggagcccagcagagtgaccggcctggagaacagcaaggccatgtgcgtgctggccggcagcgaccacagcgccagcctgaccgacgccggcgaggtgtacgtgtggggcagcaacaagcacggccagctggccaacgaggccgccttcctgcccgtgccccagaagatcgaggcccactgcttccagaacgagaaggtgaccgccatctggagcggctggacccacctggtggcccagaccgagaccggcaagatgttcacctggggcagagccgactacggccagctgggcagaaagctggagacctacgagggctggaagctggagaagcaggacagcttcctgccctgcagcagaccccccaacagcatgcccagcagcccccactgcctgaccggcgccaccgaggtgagctgcggcagcgagcacaacctggccatcatcggcggcgtgtgctacagctggggctggaacgagcacggcatgtgcggcgacggcaccgaggccaacgtgtgggcccccaagcccgtgcaggccctgctgagcagcagcggcctgctggtgggctgcggcgccggccacagcctggccctgtgccagctgcccgcccaccccgccctggtgcaggaccccaaggtgacctacctgagccccgacgccatcgaggacaccgagagccagaaggccatggacaaggagagaaactggaaggagagacagagcgagaccagcacccagagccagagcgactggagcagaaacggcggcctgtag

SEQ ID NO: 9497 - DNA, 2961 bp, synthetic construct
  source 1..2961: mol_type = other DNA; note = Synthetic coding sequence
atggagagaatgaactggctgagcagactggccagcagaggccccggccacagaatcccccagggcgccaacctgcagacccccgtgatggccgaccccgagacctgcctgatggtgttcaagaaccactggagccaggtggtgagaatcctggagagacagggccccagagccgcccccggcggcgccgacgacctgagcgccgtgagaaaccacacctaccagatgctgaccctgctggccgaggacagagccgtgcccagcgcccccaccggccccggccccctgctggagttcgccctgcacgaggacctgctgaccagagtgctgacctggcagctgcagtgggacgagctgggcgacggcgtggaggagagaagagccgagcagctgaagctgttcgagatgctggtgagcgaggccagacagcccctgctgagacacggccccgtgagagaggccctgctgaccctgctggacgcctgcggcagacccgtgcccagcagccccgccctggacgagggcctggtgctgctgctgagccagctgtgcgtgtgcgtggcccaggagcccagcctgctggagttcttcctgcagcccccccccgagcccggcgccgcccccagactgctgctgttcagcagactggtgcccttcgtgcacagagagggcaccctgggccagcaggccagagacgccctgctgctgctgatggccctgagcgccggcagccccaccgtgggcagatacatcgccgaccacagctacttctgccccgtgctggccaccggcctgagcgccctgtacagcagcctgcccagaaagatcgaggtgcccggcgacgactggcactgcctgagaagagaggactggctgggcgtgcccgccctggccctgttcatgagcagcctggagttctgcaacgccgtgatccaggtggcccaccccctggtgcagaagcagctggtggactacatccacaacggcttcctggtgcccgtgatgggccccgccctgcacaagaccagcgtggaggagatgatcgccagcaccgcctacctggagctgttcctgagaagcatcagcgagcccgccctgctgagaaccttcctgagattcctgctgctgcacagacacgacacccacaccatcctggacaccctggtggccagaatcggcagcaacagcagactgtgcatggtgagcctgagcctgttcagaaccctgctgaacctgagctgcgaggacgtgctgctgcagctggtgctgagatacctggtgccctgcaaccacgtgatgctgagccagaagcccgccgtgagagacgtggacctgtacggcagagccgccgacaagttcctgagcctgatccccagatgctgcagacaccacgcccccagcccccccagacccgagcacgccagctgggccagaggcggccccagcagagagaccggcagaagagaggacatcaccggccccggcagccccagcgtggacagcagcagcgtgaccaccgtgcccagacccagcacccccagcagactggccctgttcctgagacagcagagcctgggcggcagcgagagccccggccccgccccctgcagccccggcctgagcgccagccccgccagcagccccggcagaagacccacccccgccgaggagcccggcgagctggaggacaactacctggagtacctgagagaggccagaagaggcgtggacagatgcgtgagagcctgcagaacctggagcgccccctacgacggcgagagacccagccccgagcccagccccttcggcagcagaaccaagaagagaagcctgctgcccgaggaggacagaaacaacgtgggcgagggcgaggaggaggagctgggcagaagaggcagagccggcggcgccggcgagggccccggccacctgccccccccccagctgaacggcgtgcccggcagctggcccgagggcgccaagaaggtgagactggtgcccaaggagggcgccggcgagctgctggagggcatcagcgagggcatggccggcctggagggcttcggccaggagctgagagagctggaggtggccctgagcaacggcggcaccggcagcgagagccccctggagccccccctgcccctggaggaggaggaggcctacgagagcttcacctgcccccccgagccccccggccccttcctgagcagccccctgagaaccctgaaccagctgcccagccagcccttcaccggccccttcatggccgtgctgttcgccaagctggagaacatgctgcagaacagcgtgtacgtgaacttcctgctgaccggcctggtggcccagctggcctgccacccccagcccctgctgagaagcttcctgctgaacaccaacatggtgttccagcccagcgtgaagagcctgctgcaggtgctgggcagcgtgaagaacaagatcgagaacttcgccgccagccaggaggacttccccgccctgctgagcaaggccaagaagtacctgatcgccagaggcaagctggactgggccgagggccccgccgccggccccgcccccagaagaagcgaccccctggtgaagagcagaagacccagcctgggcgagctgctgctgagacacgcccacagccccaccagagccagacaggccgcccagctggtgctgcagcccggcagagacggcgccggcctgggcctgagcggcggcagccccggcgccagcacccccgtgctgctgaccagaggcggcgcccccgagagacagggcgaggccctgagagtgaagaacgccgtgtactgcgccgtgatcttccccgagttcctgaaggagctggccgccatcagccaggcccacgccgtgaccagccccttcctgctggagaccagcgaggagggcagcggccccctgatcagcggctgcggccccctgaacccctag

SEQ ID NO: 9498 - DNA, 6723 bp, synthetic construct
  source 1..6723: mol_type = other DNA; note = Synthetic coding sequence
atggacgacaagggcgaccccagcaacgaggaggcccccaaggccatcaagcccaccagcaaggagttcagaaagacctggggcttcagaagaaccaccatcgccaagagagagggcgccggcgacgccgaggccgaccccctggagcccccccccccccagcagcagctgggcctgagcctgagaagaagcggcagacagcccaagagaaccgagagagtggagcagttcctgaccatcgccagaagaagaggcagaagaagcatgcccgtgagcctggaggacagcggcgagcccaccagctgccccgccaccgacgccgagaccgccagcgagggcagcgtggagagcgccagcgagaccagaagcggcccccagagcgccagcaccgccgtgaaggagagacccgccagcagcgagaaggtgaagggcggcgacgaccacgacgacaccagcgacagcgacagcgacggcctgaccctgaaggagctgcagaacagactgagaagaaagagagagcaggagcccaccgagagacccctgaagggcatccagagcagactgagaaagaagagaagagaggagggccccgccgagaccgtgggcagcgaggccagcgacaccgtggagggcgtgctgcccagcaagcaggagcccgagaacgaccagggcgtggtgagccaggccggcaaggacgacagagagagcaagctggagggcaaggccgcccaggacatcaaggacgaggagcccggcgacctgggcagacccaagcccgagtgcgagggctacgaccccaacgccctgtactgcatctgcagacagccccacaacaacagattcatgatctgctgcgacagatgcgaggagtggttccacggcgactgcgtgggcatcagcgaggccagaggcagactgctggagagaaacggcgaggactacatctgccccaactgcaccatcctgcaggtgcaggacgagacccacagcgagaccgccgaccagcaggaggccaagtggagacccggcgacgccgacggcaccgactgcaccagcatcggcaccatcgagcagaagagcagcgaggaccagggcatcaagggcagaatcgagaaggccgccaaccccagcggcaagaagaagctgaagatcttccagcccgtgatcgaggcccccggcgccagcaagtgcatcggccccggctgctgccacgtggcccagcccgacagcgtgtactgcagcaacgactgcatcctgaagcacgccgccgccaccatgaagttcctgagcagcggcaaggagcagaagcccaagcccaaggagaagatgaagatgaagcccgagaagcccagcctgcccaagtgcggcgcccaggccggcatcaagatcagcagcgtgcacaagagacccgcccccgagaagaaggagaccaccgtgaagaaggccgtggtggtgcccgccagaagcgaggccctgggcaaggaggccgcctgcgagagcagcacccccagctgggccagcgaccacaactacaacgccgtgaagcccgagaagaccgccgcccccagccccagcctgctgtacaagagcaccaaggaggacagaagaagcgaggagaaggccgccgccatggccgccagcaagaagaccgccccccccggcagcgccgtgggcaagcagcccgcccccagaaacctggtgcccaagaagagcagcttcgccaacgtggccgccgccacccccgccatcaagaagccccccagcggcttcaagggcaccatccccaagagaccctggctgagcgccacccccagcagcggcgccagcgccgccagacaggccggccccgcccccgccgccgccaccgccgccagcaagaagttccccggcagcgccgccctggtgggcgccgtgagaaagcccgtggtgcccagcgtgcccatggccagccccgcccccggcagactgggcgccatgagcgccgcccccagccagcccaacagccagatcagacagaacatcagaagaagcctgaaggagatcctgtggaagagagtgaacgacagcgacgacctgatcatgaccgagaacgaggtgggcaagatcgccctgcacatcgagaaggagatgttcaacctgttccaggtgaccgacaacagatacaagagcaagtacagaagcatcatgttcaacctgaaggaccccaagaaccagggcctgttccacagagtgctgagagaggagatcagcctggccaagctggtgagactgaagcccgaggagctggtgagcaaggagctgagcacctggaaggagagacccgccagaagcgtgatggagagcagaaccaagctgcacaacgagagcaagaagaccgcccccagacaggaggccatccccgacctggaggacagcccccccgtgagcgacagcgaggagcagcaggagagcgccagagccgtgcccgagaagagcaccgcccccctgctggacgtgttcagcagcatgctgaaggacaccaccagccagcacagagcccacctgttcgacctgaactgcaagatctgcaccggccaggtgcccagcgccgaggacgagcccgcccccaagaagcagaagctgagcgccagcgtgaagaaggaggacctgaagagcaagcacgacagcagcgcccccgaccccgcccccgacagcgccgacgaggtgatgcccgaggccgtgcccgaggtggccagcgagcccggcctggagagcgccagccaccccaacgtggacagaacctacttccccggcccccccggcgacggccaccccgagcccagccccctggaggacctgagcccctgccccgccagctgcggcagcggcgtggtgaccaccgtgaccgtgagcggcagagaccccagaaccgcccccagcagcagctgcaccgccgtggccagcgccgccagcagacccgacagcacccacatggtggaggccagacaggacgtgcccaagcccgtgctgaccagcgtgatggtgcccaagagcatcctggccaagcccagcagcagccccgaccccagatacctgagcgtgccccccagccccaacatcagcaccagcgagagcagaagcccccccgagggcgacaccaccctgttcctgagcagactgagcaccatctggaagggcttcatcaacatgcagagcgtggccaagttcgtgaccaaggcctaccccgtgagcggctgcttcgactacctgagcgaggacctgcccgacaccatccacatcggcggcagaatcgcccccaagaccgtgtgggactacgtgggcaagctgaagagcagcgtgagcaaggagctgtgcctgatcagattccaccccgccaccgaggaggaggaggtggcctacatcagcctgtacagctacttcagcagcagaggcagattcggcgtggtggccaacaacaacagacacgtgaaggacctgtacctgatccccctgagcgcccaggaccccgtgcccagcaagctgctgcccttcgagggccccggcctggagagccccagacccaacatcatcctgggcctggtgatctgccagaagatcaagagacccgccaacagcggcgagctggacaagatggacgagaagagaaccagactgcagcccgaggaggccgacgtgcccgcctaccccaaggtggccaccgtgccccagagcgagaagaagcccagcaagtaccccctgtgcagcgccgacgccgccgtgagcaccaccccccccggcagcccccccccccccccccccctgcccgagccccccgtgctgaaggtgctgagcagcctgaagcccgccgcccccagccccgccaccgccgccaccaccgccgccgccgccagcaccgccgccagcagcaccgccagcagcgccagcaagaccgccagccccctggagcacatcctgcagaccctgttcggcaagaagaagagcttcgaccccagcgccagagagccccccggcagcaccgccggcctgccccaggagcccaagaccaccgccgaggacggcgtgcccgccccccccctgctggaccccatcgtgcagcagttcggccagttcagcaaggacaaggccctggaggaggaggaggacgacagaccctacgaccccgaggaggagtacgaccccgagagagccttcgacacccagctggtggagagaggcagaagacacgaggtggagagagcccccgaggccgccgccgccgagagagaggaggtggcctacgaccccgaggacgagaccatcctggaggaggccaaggtgaccgtggacgacctgcccaacagaatgtgcgccgacgtgagaagaaacagcgtggagagacccgccgagcccgtggccggcgccgccacccccagcctggtggagcagcagaagatgctggaggagctgaacaagcagatcgaggagcagaagagacagctggaggagcaggaggaggccctgagacagcagagagccgccgtgggcgtgagcatggcccacttcagcgtgagcgacgccctgatgagccccccccccaagagcagcctgcccaaggccgagctgttccagcaggagcagcagagcgccgacaagcccgccagcctgccccccgccagccaggccagcaaccacagagaccccagacaggccagaagactggccaccgagaccggcgagggcgagggcgagcccctgagcagactgagcgccagaggcgcccagggcgccctgcccgagagagacgccagcagaggcggcctggtgggccaggcccccatgcccgtgcccgaggagaaggagcccgccagcagcccctgggccagcggcgagaagccccccgccggcagcgagcaggacggctggaaggccgagcccggcgagggcaccagacccgccaccgtgggcgacagcagcgccagacccgccagaagagtgctgctgcccacccccccctgcggcgccctgcagcccggcttccccctgcagcacgacggcgagagagaccccttcacctgccccggcttcgccagccaggacaaggccctgggcagcgcccagtacgaggaccccagaaacctgcacagcgccggcagaagcagcagccccgccggcgagaccgagggcgacagagagccccaggccagacccggcgagggcaccgcccccctgcccccccccggccagaaggtgggcggcagccagccccccttccagggccagagagagcccggcccccacgccctgggcatgagcggcctgcacggccccaacttccccggccccagaggccccgccccccccttccccgaggagaacatcgccagcaacgacggccccagaggccccccccccgccagattcggcgcccagaagggccccatccccagcctgttcagcggccagcacggcccccccccctacggcgacagcagaggccccagccccagctacctgggcggccccagaggcgtggcccccagccagttcgaggagagaaaggacccccacggcgagaagagagagttccaggacgccccctacaacgaggtgaccggcgcccccgcccagttcgagggcaccgagcaggcccccttcctgggcagcagaggcggcgcccccttccagttcggcggccagagaagacccctgctgagccagctgaagggccccagaggcggccccccccccagccagttcggcggccagagaggccccccccccggccacttcgtgggccccagaggcccccaccccagccagttcgagaccgccagaggcccccaccccaaccagttcgagggccccagaggccaggcccccaacttcatgcccggccccagaggcatccagccccagcagttcgaggaccagagagtgcacagcccccccagattcaccaaccagagagcccccgcccccctgcagttcggcggcctgagaggcagcgcccccttcagcgagaagaacgagcagacccccagcagattccacttccagggccaggccccccaggtgatgaagcccggccccagacccctgctggagctgcccagccaccccccccagcacagaaaggacagatgggaggaggccggcccccccagcgccctgagcagcagcgcccccggccagggccccgaggccgacggccagtgggccagcgccgacttcagagagggcaagggccacgagtacagaaaccagaccttcgagggcagacagagagagagattcgacgtgggccccaaggagaagcccctggaggagcccgacgcccagggcagagccagcgaggacagaagaagagagagagagagaggcagaaactggagcagagagagagactgggacagacccagagagtgggacagacacagagacaaggacagcagcagagactgggacagaaacagagagagaagcgccaacagagacagagagagagaggccgacagaggcaaggagtgggacagaagcagagagagaagcagaaacagagagagagagagagacagaagaagagacagagacagaagcagaagcagagagagagacagagacaaggccagagacagagagagaggcagagacagaaaggacagaagcaagagcaaggagagcgccagagaccccaagcccgaggccagcagagccagcgacgccggcaccgccagccaggcctag

SEQ ID NO: 9499 - DNA, 1635 bp, synthetic construct
  source 1..1635: mol_type = other DNA; note = Synthetic coding sequence
atggacgacaagggcgaccccagcaacgaggaggcccccaaggccatcaagcccaccagcaaggagttcagaaagacctggggcttcagaagaaccaccatcgccaagagagagggcgccggcgacgccgaggccgaccccctggagcccccccccccccagcagcagctgggcctgagcctgagaagaagcggcagacagcccaagagaaccgagagagtggagcagttcctgaccatcgccagaagaagaggcagaagaagcatgcccgtgagcctggaggacagcggcgagcccaccagctgccccgccaccgacgccgagaccgccagcgagggcagcgtggagagcgccagcgagaccagaagcggcccccagagcgccagcaccgccgtgaaggagagacccgccagcagcgagaaggtgaagggcggcgacgaccacgacgacaccagcgacagcgacagcgacggcctgaccctgaaggagctgcagaacagactgagaagaaagagagagcaggagcccaccgagagacccctgaagggcatccagagcagactgagaaagaagagaagagaggagggccccgccgagaccgtgggcagcgaggccagcgacaccgtggagggcgtgctgcccagcaagcaggagcccgagaacgaccagggcgtggtgagccaggccggcaaggacgacagagagagcaagctggagggcaaggccgcccaggacatcaaggacgaggagcccggcgacctgggcagacccaagcccgagtgcgagggctacgaccccaacgccctgtactgcatctgcagacagccccacaacaacagattcatgatctgctgcgacagatgcgaggagtggttccacggcgactgcgtgggcatcagcgaggccagaggcagactgctggagagaaacggcgaggactacatctgccccaactgcaccatcctgcaggtgcaggacgagacccacagcgagaccgccgaccagcaggaggccaagtggagacccggcgacgccgacggcaccgactgcaccagcatcggcaccatcgagcagaagagcagcgaggaccagggcatcaagggcagaatcgagaaggccgccaaccccagcggcaagaagaagctgaagatcttccagcccgtgatcgaggcccccggcgccagcaagtgcatcggccccggctgctgccacgtggcccagcccgacagcgtgtactgcagcaacgactgcatcctgaagcacgccgccgccaccatgaagttcctgagcagcggcaaggagcagaagcccaagcccaaggagaagatgaagatgaagcccgagaagcccagcctgcccaagtgcggcgcccaggccggcatcaagatcagcagcgtgcacaagagacccgcccccgagaagaaggagaccaccgtgaagaaggccgtggtggtgcccgccagaagcgaggccctgggcaaggaggccgcctgcgagagcagcacccccagctgggccagcgaccacaactacaacgccgtgaagcccgagaagaccgccgcccccagccccagcctgctgtacaagtgcagcggcaagtacagctacagcctgcaccccagcctgatcgcctag

SEQ ID NO: 9500 - DNA, 1164 bp, synthetic construct
  source 1..1164: mol_type = other DNA; note = Synthetic coding sequence
atggagagacccccccccagagccgccggcagagaccccagcgccctgagagccgaggccccctggctgagagccgagggccccggccccagagccgcccccgtgaccgtgcccacccccccccagggcagcagcgtgggcggcggcttcgccggcctggagttcgccagaccccaggagagcgagcccagagccagcgacctgggcgcccccagaacctggaccggcgccgccgccggccccagaacccccagcgcccacatccccgtgcccgcccagagagccacccccggcaaggccagactggacgaggtgatggccgccgccgccctgaccagcctgagcaccagccccctgctgctgggcgcccccgtggccgccttcagccccgagcccggcctggagccctggaaggaggccctggtgagaccccccggcagctacagcagcagcagcaacagcggcgactggggctgggacctggccagcgaccagagcagccccagcacccccagcccccccctgccccccgaggccgcccacttcctgttcggcgagcccaccctgagaaagagaaagagccccgcccaggtgatgttccagtgcctgtggaagagctgcggcaaggtgctgagcaccgccagcgccatgcagagacacatcagactggtgcacctgggcagacaggccgagcccgagcagagcgacggcgaggaggacttctactacaccgagctggacgtgggcgtggacaccctgaccgacggcctgagcagcctgacccccgtgagccccaccgccagcatgccccccgccttccccagactggagctgcccgagctgctggagccccccgccctgcccagccccctgagaccccccgccccccccctgccccccccccccgtgctgagcaccgtggccaacccccagagctgccacagcgacagagtgtaccagggctgcctgacccccgccagactggagccccagcccaccgaggtgggcgcctgcccccccgccctgagcagcagaatcggcgtgaccctgagaaagcccagaggcgacgccaagaagtgcagaaaggtgtacggcatggagagaagagacctgtggtgcaccgcctgcagatggaagaaggcctgccagagattcctggactag

SEQ ID NO: 9501 - DNA, 414 bp, synthetic construct
  source 1..414: mol_type = other DNA; note = Synthetic coding sequence
atgctgagattctgcgccggcctgagcgacttcgcccccgtggccgtgagaagcctgcaggacctggccagaatcgccatcagaggcaccatcaagaagatcatccaccaggagaccgtgagcaagaacggcaacggcctgaagaacacccccagattcaagagaagaagagtgagaagaagaagaatggagaccatcgtgttcctggacaaggaggtgttcgccagcagaatcagcaaccccagcgacgacaacagctgcgaggacctggaggaggagagaagagaggaggaggagaagaccccccccgagaccaagcccgacccccccgtgaacttcctgagacagaaggtgctgagcctgcccctgcccgaccccctgaagtactacctgctgtactacagagagaagtag

SEQ ID NO: 9502 - DNA, 2505 bp, synthetic construct
  source 1..2505: mol_type = other DNA; note = Synthetic coding sequence
atgagactgctggacggcaagcagaccagcagatacagcgagaacgcctgcgagaagaagatcttcagcatctacggccactaccccgtggtgagagccgccctgagaagaaagggctgggtggagaagaagttccacttcctgcccaaggtgatccccgacgtggaggacgagggcgccagagtgaacgacgacacctgcgccaaggtgaaggagaaccaggagatggccctggagaagaccgacaacatccacgacgtgatgagcagactggtgaagaacgagatgccctacctgctgtggaccatcaagagagacatcatcgactaccacagcctgacctacgaccagatgctgaaccactacgccaagaccgccagcttcaccaccaagatcggcctgtgcgtgaacatgagaagcctgccctggtacgtgcccgccaaccccgacagcttcttccccagatgctacagcctgtgcaccgagagcgagcagcaggagttcctggaggacttcagaagaaccatggccagcagcatcctgaagtgggtggtgagccaccagagctgcagcagaagcagcagaagcaagcccagagaccagagagaggaggccggcagcagcgacctgagcagcagacaggacgccgagaacgccgaggccaagctgagaggcctgcccggccagctggtggacatcgcctgcaaggtgtgccaggcctacctgggccagctggagcacgaggacatcgacaccagcgccgacgccgtggaggacctgaccgaggccgagtgggaggacctgacccagcagtactacagcctggtgcaggtgcccctgggcagcagcatcgtgctgtgcatcttcaagatccagaaggtgatgatgagcttcgagccccccaccgccagagacagacagtgccaggccctgctgaacagaatcaccagcgtgaacccccagaccgacatcgacggcctgagaaacatctggatcatcaagcccgccgccaagagcagaggcagaggcgagagccccgacatcgtgtgcatggacagagtggaggagatcctggagctggccgccgccgaccaccccctgagcagagacaacaagtgggtggtgcagaagtacatcgagacccccctgctgatctgcgacaccaagttcgacatcagacagtggttcctggtgaccgactggaaccccctgaccatctggttctacaaggagagctacctgagattcagcacccagagattcagcctggacaagctggacagcgccatccacctgtgcaacaacgccgtgcagaagtacctgaagaacgacgtgggcagaagccccctgctgcccgcccacaacatgtggaccagcaccagattccaggagtacctgcagagacagggcagaggcgccgtgtggggcagcgtgatctaccccagcatgaagaaggccatcgcccacgccatgaaggtggcccaggaccacgtggagcccagaaagaacagcttcgagctgtacggcgccgacttcgtgctgggcagagacttcagaccctggctgatcgagatcaacagcagccccaccatgcaccccagcacccccgtgaccgcccagctgtgcgcccaggtgcaggaggacaccatcaaggtggccgtggacagaagctgcgacatcggcaacttcgagctgctgtggagacagcccgtggtggagcccccccccttcagcggcagcgacctgtgcgtggccggcgtgagcgtgagaagagccagaagacaggtgctgcccgtgtgcaacctgaaggccagcgccagcctgctggacgcccagcccctgaaggccagaggccccagcgccatgcccgaccccgcccagggcccccccagccccgccctgcagagagacctgggcctgaaggaggagaagggcctgcccctggccctgctggcccccctgagaggcgccgccgagagcggcggcgccgcccagcccaccagaaccaaggccgccggcaaggtggagctgcccgcctgcccctgcagacacgtggacagccaggcccccaacaccggcgtgcccgtggcccagcccgccaagagctgggaccccaaccagctgaacgcccaccccctggagcccgtgctgagaggcctgaagaccgccgagggcgccctgagacccccccccggcggcaagggcgagggcaccgtgtgcagcagactgccccaccacggccaccacgtggccgcctgccagaccaccggcaccacctgggacggcggccccggcgtgtgcttcctgagacagctgctggccagcgagctgcccatgggccccggcctgcccagagaccccagagcccccccctgcctggtgtgcagaggcctgctgccccccgccggcccctgcaagagatgcagaagcttctgcgccgccgtgctgcagggcgccagcttcgtgagactgggcggcagaagctgcagccccagaaccccctag

SEQ ID NO: 9503 - DNA, 759 bp, synthetic construct
  source 1..759: mol_type = other DNA; note = Synthetic coding sequence
atgtgcagcaccagcggctgcgacctggaggagatccccctggacgacgacgacctgaacaccatcgagttcaagatcctggcctactacaccagacaccacgtgttcaagagcacccccgccctgttcagccccaagctgctgagaaccagaagcctgagccagagaggcctgggcaactgcagcgccaacgagagctggaccgaggtgagctggccctgcagaaacagccagagcagcgagaaggccatcaacctgggcaagaagaagagcagctggaaggccttcttcggcgtggtggagaaggaggacagccagagcacccccgccaaggtgagcgcccagggccagagaaccctggagtaccaggacagccacagccagcagtggagcagatgcctgagcaacgtggagcagtgcctggagcacgaggccgtggaccccaaggtgatcagcatcgccaacagagtggccgagatcgtgtacagctggccccccccccaggccacccaggccggcggcttcaagagcaaggagatcttcgtgaccgagggcctgagcttccagctgcagggccacgtgcccgtggccagcagcagcaagaaggacgaggaggagcagatcctggccaagatcgtggagctgctgaagtacagcggcgaccagctggagagaaaggacaccgccttcatccccatccccctggtggacaccagcatccagggcttcccccaggacggcctgatggcctgcatctag

SEQ ID NO: 9504 - DNA, 261 bp, synthetic construct
  source 1..261: mol_type = other DNA; note = Synthetic coding sequence
atgagcctgcccctgaaccccaagcccttcctgaacggcctgaccggcaagcccgtgatggtgaagctgaagtggggcatggagtacaagggctacctggtgagcgtggacggctacatgaacatgcagctggccaacaccgaggagtacatcgacggcgccctgagcggccacctgggcgaggtgctgatcagatgcaacaacgtgctgtacatcagaggcgtggaggaggaggaggaggacggcgagatgagagagtag

SEQ ID NO: 9505 - DNA, 1281 bp, synthetic construct
  source 1..1281: mol_type = other DNA; note = Synthetic coding sequence
atggccagcggccacagcctgctgctggagaacgcccagcaggtggtgctggtgtgcgccagaggcgagagattcctggccagagacgccctgagaagcctggccgtgctggagggcgccagcctggtggtgggcaaggacggcttcatcaaggccatcggccccgccgacgtgatccagagacagttcagcggcgagaccttcgaggagatcatcgactgcagcggcaagtgcatcctgcccggcctggtggacgcccacacccaccccgtgtgggccggcgagagagtgcacgagttcgccatgaagctggccggcgccacctacatggagatccaccaggccggcggcggcatccacttcaccgtggagagaaccagacaggccaccgaggaggagctgttcagaagcctgcagcagagactgcagtgcatgatgagagccggcaccaccctggtggagtgcaagagcggctacggcctggacctggagaccgagctgaagatgctgagagtgatcgagagagccagaagagagctggacatcggcatcagcgccacctactgcggcgcccacagcgtgcccaagggcaagaccgccaccgaggccgccgacgacatcatcaacaaccacctgcccaagctgaaggagctgggcagaaacggcgagatccacgtggacaacatcgacgtgttctgcgagaagggcgtgttcgacctggacagcaccagaagaatcctgcagagaggcaaggacatcggcctgcagatcaacttccacggcgacgagctgcaccccatgaaggccgccgagctgggcgccgagctgggcgcccaggccatcagccacctggaggaggtgagcgacgagggcatcgtggccatggccaccgccagatgcagcgccatcctgctgcccaccaccgcctacatgctgagactgaagcagcccagagccagaaagatgctggacgagggcgtgatcgtggccctgggcagcgacttcaaccccaacgcctactgcttcagcatgcccatggtgatgcacctggcctgcgtgaacatgagaatgagcatgcccgaggccctggccgccgccaccatcaacgccgcctacgccctgggcaagagccacacccacggcagcctggaggtgggcaagcagggcgacctgatcatcatcaacagcagcagatgggagcacctgatctaccagttcggcggccaccacgagctgatcgagtacgtgatcgccaagggcaagctgatctacaagacctag

SEQ ID NO: 9506 - DNA, 1263 bp, synthetic construct
  source 1..1263: mol_type = other DNA; note = Synthetic coding sequence
atgttcagccccggccaggaggagcactgcgcccccaacaaggagcccgtgaagtacggcgagctggtggtgctgggctacaacggcgccctgcccaacggcgacagaggcagaagaaagagcagattcgccctgtacaagagacccaaggccaacggcgtgaagcccagcaccgtgcacgtgatcagcaccccccaggccagcaaggccatcagctgcaagggccagcacagcatcagctacaccctgagcagaaaccagaccgtggtggtggagtacacccacgacaaggacaccgacatgttccaggtgggcagaagcaccgagagccccatcgacttcgtggtgaccgacaccatcagcggcagccagaacaccgacgaggcccagatcacccagagcaccatcagcagattcgcctgcagaatcgtgtgcgacagaaacgagccctacaccgccagaatcttcgccgccggcttcgacagcagcaagaacatcttcctgggcgagaaggccgccaagtggaagaaccccgacggccacatggacggcctgaccaccaacggcgtgctggtgatgcaccccagaggcggcttcaccgaggagagccagcccggcgtgtggagagagatcagcgtgtgcggcgacgtgtacaccctgagagagaccagaagcgcccagcagagaggcaagctggtggagagcgagaccaacgtgctgcaggacggcagcctgatcgacctgtgcggcgccaccctgctgtggagaaccgccgacggcctgttccacacccccacccagaagcacatcgaggccctgagacaggagatcaacgccgccagaccccagtgccccgtgggcctgaacaccctggccttccccagcatcaacagaaaggaggtggtggaggagaagcagccctgggcctacctgagctgcggccacgtgcacggctaccacaactggggccacagaagcgacaccgaggccaacgagagagagtgccccatgtgcagaaccgtgggcccctacgtgcccctgtggctgggctgcgaggccggcttctacgtggacgccggcccccccacccacgccttcaccccctgcggccacgtgtgcagcgagaagagcgccaagtactggagccagatccccctgccccacggcacccacgccttccacgccgcctgccccttctgcgccacccagctggtgggcgagcagaactgcatcaagctgatcttccagggccccatcgactag

SEQ ID NO: 9507 - DNA, 1056 bp, synthetic construct
  source 1..1056: mol_type = other DNA; note = Synthetic coding sequence
atgatcgtgcagagagtggtgctgaacagcagacccggcaagaacggcaaccccgtggccgagaacttcagaatggaggaggtgtacctgcccgacaacatcaacgagggccaggtgcaggtgagaaccctgtacctgagcgtggacccctacatgagatgcagaatgaacgaggacaccggcaccgactacatcaccccctggcagctgagccaggtggtggacggcggcggcatcggcatcatcgaggagagcaagcacaccaacctgaccaagggcgacttcgtgaccagcttctactggccctggcagaccaaggtgatcctggacggcaacagcctggagaaggtggacccccagctggtggacggccacctgagctacttcctgggcgccatcggcatgcccggcctgaccagcctgatcggcatccaggagaagggccacatcaccgccggcagcaacaagaccatggtggtgagcggcgccgccggcgcctgcggcagcgtggccggccagatcggccacttcctgggctgcagcagagtggtgggcatctgcggcacccacgagaagtgcatcctgctgaccagcgagctgggcttcgacgccgccatcaactacaagaaggacaacgtggccgagcagctgagagagagctgccccgccggcgtggacgtgtacttcgacaacgtgggcggcaacatcagcgacaccgtgatcagccagatgaacgagaacagccacatcatcctgtgcggccagatcagccagtacaacaaggacgtgccctaccccccccccctgagccccgccatcgaggccatccagaaggagagaaacatcaccagagagagattcctggtgctgaactacaaggacaagttcgagcccggcatcctgcagctgagccagtggttcaaggagggcaagctgaagatcaaggagaccgtgatcaacggcctggagaacatgggcgccgccttccagagcatgatgaccggcggcaacatcggcaagcagatcgtgtgcatcagcgaggagatcagcctgtag

SEQ ID NO: 9508 - DNA, 2172 bp, synthetic construct
  source 1..2172: mol_type = other DNA; note = Synthetic coding sequence
atggccgaggaggaggagaccgccgccctgaccgagaaggtgatcagaacccagagagtgttcatcaacctgctggacagctacagcagcggcaacatcggcaagttcctgagcaactgcgtggtgggcgccagcctggaggagatcaccgaggaggaggaggaggaggacgagaacaagagcgccatgctggaggccagcagcaccaaggtgaaggagggcaccttccagatcgtgggcaccctgagcaagcccgacagccccagacccgacttcgccgtggagacctacagcgccatcagcagagaggacctgctgatgagactgctggagtgcgacgtgatcatctacaacatcaccgagagcagccagcagatggaggaggccatctgggccgtgagcgccctgagcgaggaggtgagccacttcgagaagagaaagctgttcatcctgctgagcaccgtgatgacctgggccagaagcaaggccctggaccccgaggacagcgaggtgcccttcaccgaggaggactacagaagaagaaagagccaccccaacttcctggaccacatcaacgccgagaagatggtgctgaagttcggcaagaaggccagaaagttcgccgcctacgtggtggccgccggcctgcagtacggcgccgagggcggcatgctgcacaccttcttcaagatggcctggctgggcgagatccccgccctgcccgtgttcggcgacggcaccaacgtgatccccaccatccacgtgctggacctggccggcgtgatccagaacgtgatcgaccacgtgcccaagccccactacctggtggccgtggacgagagcgtgcacaccctggaggacatcgtgaagtgcatcagcaagaacaccggccccggcaagatccagaagatccccagagagaacgcctacctgaccaaggacctgacccaggactgcctggaccacctgctggtgaacctgagaatggaggccctgttcgtgaaggagaacttcaacatcagatgggccgcccagaccggcttcgtggagaacatcaacaccatcctgaaggagtacaagcagagcagaggcctgatgcccatcaagatctgcatcctgggcccccccgccgtgggcaagagcagcatcgccaaggagctggccaactactacaagctgcaccacatccagctgaaggacgtgatcagcgaggccatcgccaagctggaggccatcgtggcccccaacgacgtgggcgagggcgaggaggaggtggaggaggaggaggaggaggagaacgtggaggacgcccaggagctgctggacggcatcaaggagagcatggagcagaacgccggccagctggacgaccagtacatcatcagattcatgaaggagaagctgaagagcatgccctgcagaaaccagggctacatcctggacggcttccccaagacctacgaccaggccaaggacctgttcaaccaggaggacgaggaggaggaggacgacgtgagaggcagaatgttccccttcgacaagctgatcatccccgagttcgtgtgcgccctggacgccagcgacgagttcctgaaggagagagtgatcaacctgcccgagagcatcgtggccggcacccactacagccaggacagattcctgagagccctgagcaactacagagacatcaacatcgacgacgagaccgtgttcaactacttcgacgagctggagatccaccccatccacatcgacgtgggcaagctggaggacgcccagaacagactggccatcaagcagctgatcaaggagatcggcgagcccagaaactacggcctgaccgacgaggagaaggccgaggaggagagaaaggccgccgaggagagactggccagagaggccgccgaggaggccgagagagagcaccaggaggccgtggagatggccgagaagatcgccagatgggaggagtggaacaagagactggaggaggtgaagagagaggagagagagctgctggaggcccagagcatccccctgagaaactacctgatgacctacgtgatgcccaccctgatccagggcctgaacgagtgctgcaacgtgagacccgaggaccccgtggacttcctggccgagtacctgttcaagaacaaccccgaggcccagtag

SEQ ID NO: 9509 - DNA, 1245 bp, synthetic construct
  source 1..1245: mol_type = other DNA; note = Synthetic coding sequence
atgcagaccttcctgaagggcaagagagtgggctactggctgagcgagaagaagatcaagaagctgaacttccaggccttcgccgagctgtgcagaaagagaggcatggaggtggtgcagctgaacctgagcagacccatcgaggagcagggccccctggacgtgatcatccacaagctgaccgacgtgatcctggaggccgaccagaacgacagccagagcctggagctggtgcacagattccaggagtacatcgacgcccaccccgagaccatcgtgctggaccccctgcccgccatcagaaccctgctggacagaagcaagagctacgagctgatcagaaagatcgaggcctacatggaggacgacagaatctgcagcccccccttcatggagctgaccagcctgtgcggcgacgacaccatgagactgctggagaagaacggcctgaccttccccttcatctgcaagaccagagtggcccacggcaccaacagccacgagatggccatcgtgttcaaccaggagggcctgaacgccatccagcccccctgcgtggtgcagaacttcatcaaccacaacgccgtgctgtacaaggtgttcgtggtgggcgagagctacaccgtggtgcagagacccagcctgaagaacttcagcgccggcaccagcgacagagagagcatcttcttcaacagccacaacgtgagcaagcccgagagcagcagcgtgctgaccgagctggacaagatcgagggcgtgttcgagagacccagcgacgaggtgatcagagagctgagcagagccctgagacaggccctgggcgtgagcctgttcggcatcgacatcatcatcaacaaccagaccggccagcacgccgtgatcgacatcaacgccttccccggctacgagggcgtgagcgagttcttcaccgacctgctgaaccacatcgccaccgtgctgcagggccagagcaccgccatggccgccaccggcgacgtggccctgctgagacacagcaagctgctggccgagcccgccggcggcctggtgggcgagagaacctgcagcgccagccccggctgctgcggcagcatgatgggccaggacgccccctggaaggccgaggccgacgccggcggcaccgccaagctgccccaccagagactgggctgcaacgccggcgtgagccccagcttccagcagcactgcgtggccagcctggccaccaaggccagcagccagtag

SEQ ID NO: 9510 - DNA, 600 bp, synthetic construct
  source 1..600: mol_type = other DNA; note = Synthetic coding sequence
atgagattcagattctgcggcgacctggactgccccgactgggtgctggccgagatcagcaccctggccaagatgagcagcgtgaagctgagactgctgtgcagccaggtgctgaaggagctgctgggccagggcatcgactacgagaagatcctgaagctgaccgccgacgccaagttcgagagcggcgacgtgaaggccaccgtggccgtgctgagcttcatcctgagcagcgccgccaagcacagcgtggacggcgagagcctgagcagcgagctgcagcagctgggcctgcccaaggagcacgccgccagcctgtgcagatgctacgaggagaagcagagccccctgcagaagcacctgagagtgtgcagcctgagaatgaacagactggccggcgtgggctggagagtggactacaccctgagcagcagcctgctgcagagcgtggaggagcccatggtgcacctgagactggaggtggccgccgcccccggcacccccgcccagcccgtggccatgagcctgagcgccgacaagttccaggtgctgctggccgagctgaagcaggcccagaccctgatgagcagcctgggctag

SEQ ID NO: 9511 - DNA, 1224 bp, synthetic construct
  source 1..1224: mol_type = other DNA; note = Synthetic coding sequence
atgagccacagaaagttcagcgcccccagacacggccacctgggcttcctgccccacaagagaagccacagacacagaggcaaggtgaagacctggcccagagacgaccccagccagcccgtgcacctgaccgccttcctgggctacaaggccggcatgacccacaccctgagagaggtgcacagacccggcctgaagatcagcaagagagaggaggtggaggccgtgaccatcgtggagaccccccccctggtggtggtgggcgtggtgggctacgtggccacccccagaggcctgagaagcttcaagaccatcttcgccgagcacctgagcgacgagtgcagaagaagattctacaaggactggcacaagagcaagaagaaggccttcaccaaggcctgcaagagatggagagacaccgacggcaagaagcagctgcagaaggacttcgccgccatgaagaagtactgcaaggtgatcagagtgatcgtgcacacccagatgaagctgctgcccttcagacagaagaaggcccacatcatggagatccagctgaacggcggcaccgtggccgagaaggtggcctgggcccaggccagactggagaagcaggtgcccgtgcacagcgtgttcagccagagcgaggtgatcgacgtgatcgccgtgaccaagggcagaggcgtgaagggcgtgaccagcagatggcacaccaagaagctgcccagaaagacccacaagggcctgagaaaggtggcctgcatcggcgcctggcaccccgccagagtgggctgcagcatcgccagagccggccagaagggctaccaccacagaaccgagctgaacaagaagatcttcagaatcggcagaggcccccacatggaggacggcaagctggtgaagaacaacgccagcaccagctacgacgtgaccgccaagagcatcacccccctgggcggcttcccccactacggcgaggtgaacaacgacttcgtgatgctgaagggctgcatcgccggcaccaagaagagagtgatcaccctgagaaagagcctgctggtgcaccacagcagacaggccgtggagaacatcgagctgaagttcatcgacaccaccagcaagttcggccacggcagattccagaccgcccaggagaagagagccttcatgggcccccagaagaagcacctggagaaggagacccccgagaccagcggcgacctgtag

SEQ ID NO: 9512 - DNA, 7323 bp, synthetic construct
  source 1..7323: mol_type = other DNA; note = Synthetic coding sequence
atgagcagcagcggctacccccccaaccagggcgccttcagcaccgagcagagcagataccccccccacagcgtgcagtacaccttccccaacaccagacaccagcaggagttcgccgtgcccgactacagaagcagccacctggaggtgagccaggccagccagctgctgcagcagcagcagcagcagcagctgagaagaagacccagcctgctgagcgagttccaccccggcagcgacagaccccaggagagaagaaccagctacgagcccttccaccccggccccagccccgtggaccacgacagcctggagagcaagagacccagactggagcaggtgagcgacagccacttccagagagtgagcgccgccgtgctgcccctggtgcaccccctgcccgagggcctgagagccagcgccgacgccaagaaggaccccgccttcggcggcaagcacgaggcccccagcagccccatcagcggccagccctgcggcgacgaccagaacgccagccccagcaagctgagcaaggaggagctgatccagagcatggacagagtggacagagagatcgccaaggtggagcagcagatcctgaagctgaagaagaagcagcagcagctggaggaggaggccgccaagccccccgagcccgagaagcccgtgagccccccccccgtggagcagaagcacagaagcatcgtgcagatcatctacgacgagaacagaaagaaggccgaggaggcccacaagatcttcgagggcctgggccccaaggtggagctgcccctgtacaaccagcccagcgacaccaaggtgtaccacgagaacatcaagaccaaccaggtgatgagaaagaagctgatcctgttcttcaagagaagaaaccacgccagaaagcagagagagcagaagatctgccagagatacgaccagctgatggaggcctgggagaagaaggtggacagaatcgagaacaaccccagaagaaaggccaaggagagcaagaccagagagtactacgagaagcagttccccgagatcagaaagcagagagagcagcaggagagattccagagagtgggccagagaggcgccggcctgagcgccaccatcgccagaagcgagcacgagatcagcgagatcatcgacggcctgagcgagcaggagaacaacgagaagcagatgagacagctgagcgtgatcccccccatgatgttcgacgccgagcagagaagagtgaagttcatcaacatgaacggcctgatggaggaccccatgaaggtgtacaaggacagacagttcatgaacgtgtggaccgaccacgagaaggagatcttcaaggacaagttcatccagcaccccaagaacttcggcctgatcgccagctacctggagagaaagagcgtgcccgactgcgtgctgtactactacctgaccaagaagaacgagaactacaaggccctggtgagaagaaactacggcaagagaagaggcagaaaccagcagatcgccagacccagccaggaggagaaggtggaggagaaggaggaggacaaggccgagaagaccgagaagaaggaggaggagaagaaggacgaggaggagaaggacgagaaggaggacagcaaggagaacaccaaggagaaggacaagatcgacggcaccgccgaggagaccgaggagagagagcaggccacccccagaggcagaaagaccgccaacagccagggcagaagaaagggcagaatcaccagaagcatgaccaacgaggccgccgccgccagcgccgccgccgccgccgccaccgaggagccccccccccccctgccccccccccccgagcccatcagcaccgagcccgtggagaccagcagatggaccgaggaggagatggaggtggccaagaagggcctggtggagcacggcagaaactgggccgccatcgccaagatggtgggcaccaagagcgaggcccagtgcaagaacttctacttcaactacaagagaagacacaacctggacaacctgctgcagcagcacaagcagaagaccagcagaaagcccagagaggagagagacgtgagccagtgcgagagcgtggccagcaccgtgagcgcccaggaggacgaggacatcgaggccagcaacgaggaggagaaccccgaggacagcgaggtggaggccgtgaagcccagcgaggacagccccgagaacgccaccagcagaggcaacaccgagcccgccgtggagctggagcccaccaccgagaccgcccccagcaccagccccagcctggccgtgcccagcaccaagcccgccgaggacgagagcgtggagacccaggtgaacgacagcatcagcgccgagaccgccgagcagatggacgtggaccagcaggagcacagcgccgaggagggcagcgtgtgcgaccccccccccgccaccaaggccgacagcgtggacgtggaggtgagagtgcccgagaaccacgccagcaaggtggagggcgacaacaccaaggagagagacctggacagagccagcgagaaggtggagcccagagacgaggacctggtggtggcccagcagatcaacgcccagagacccgagccccagagcgacaacgacagcagcgccacctgcagcgccgacgaggacgtggacggcgagcccgagagacagagaatgttccccatggacagcaagcccagcctgctgaaccccaccggcagcatcctggtgagcagccccctgaagcccaaccccctggacctgccccagctgcagcacagagccgccgtgatcccccccatggtgagctgcaccccctgcaacatccccatcggcacccccgtgagcggctacgccctgtaccagagacacatcaaggccatgcacgagagcgccctgctggaggagcagagacagagacaggagcagatcgacctggagtgcagaagcagcaccagcccctgcggcaccagcaagagccccaacagagagtgggaggtgctgcagcccgccccccaccaggtgatcaccaacctgcccgagggcgtgagactgcccaccaccagacccaccagaccccccccccccctgatccccagcagcaagaccaccgtggccagcgagaagcccagcttcatcatgggcggcagcatcagccagggcacccccggcacctacctgaccagccacaaccaggccagctacacccaggagacccccaagcccagcgtgggcagcatcagcctgggcctgcccagacagcaggagagcgccaagagcgccaccctgccctacatcaagcaggaggagttcagccccagaagccagaacagccagcccgagggcctgctggtgagagcccagcacgagggcgtggtgagaggcaccgccggcgccatccaggagggcagcatcaccagaggcacccccaccagcaagatcagcgtggagagcatccccagcctgagaggcagcatcacccagggcacccccgccctgccccagaccggcatccccaccgaggccctggtgaagggcagcatcagcagaatgcccatcgaggacagcagccccgagaagggcagagaggaggccgccagcaagggccacgtgatctacgagggcaagagcggccacatcctgagctacgacaacatcaagaacgccagagagggcaccagaagccccagaaccgcccacgagatcagcctgaagagaagctacgagagcgtggagggcaacatcaagcagggcatgagcatgagagagagccccgtgagcgcccccctggagggcctgatctgcagagccctgcccagaggcagcccccacagcgacctgaaggagagaaccgtgctgagcggcagcatcatgcagggcacccccagagccaccaccgagagcttcgaggacggcctgaagtaccccaagcagatcaagagagagagcccccccatcagagccttcgagggcgccatcaccaagggcaagccctacgacggcatcaccaccatcaaggagatgggcagaagcatccacgagatccccagacaggacatcctgacccaggagagcagaaagacccccgaggtggtgcagagcaccagacccatcatcgagggcagcatcagccagggcacccccatcaagttcgacaacaacagcggccagagcgccatcaagcacaacgtgaagagcctgatcaccggccccagcaagctgagcagaggcatgccccccctggagatcgtgcccgagaacatcaaggtggtggagagaggcaagtacgaggacgtgaaggccggcgagaccgtgagaagcagacacaccagcgtggtgagcagcggccccagcgtgctgagaagcaccctgcacgaggcccccaaggcccagctgagccccggcatctacgacgacaccagcgccagaagaacccccgtgagctaccagaacaccatgagcagaggcagccccatgatgaacagaaccagcgacgtgaccatcagcagcaacaagagcaccaaccacgagagaaagagcaccctgacccccacccagagagagagcatccccgccaagagccccgtgcccggcgtggaccccgtggtgagccacagccccttcgacccccaccacagaggcagcaccgccggcgaggtgtacagaagccacctgcccacccacctggaccccgccatgcccttccacagagccctggaccccgccgccgccgcctacctgttccagagacagctgagccccacccccggctaccccagccagtaccagctgtacgccatggagaacaccagacagaccatcctgaacgactacatcaccagccagcagatgcaggtgaacctgagacccgacgtggccagaggcctgagccccagagagcagcccctgggcctgccctaccccgccaccagaggcatcatcgacctgaccaacatgccccccaccatcctggtgccccaccccggcggcaccagcaccccccccatggacagaatcacctacatccccggcacccagatcaccttcccccccagaccctacaacagcgccagcatgagccccggccaccccacccacctggccgccgccgccagcgccgagagagagagagagagagagagagagaaggagagagagagagagagaatcgccgccgccagcagcgacctgtacctgagacccggcagcgagcagcccggcagacccggcagccacggctacgtgagaagccccagccccagcgtgagaacccaggagaccatgctgcagcagagacccagcgtgttccagggcaccaacggcaccagcgtgatcacccccctggaccccaccgcccagctgagaatcatgcccctgcccgccggcggccccagcatcagccagggcctgcccgccagcagatacaacaccgccgccgacgccctggccgccctggtggacgccgccgccagcgccccccagatggacgtgagcaagaccaaggagagcaagcacgaggccgccagactggaggagaacctgagaagcagaagcgccgccgtgagcgagcagcagcagctggagcagaagaccctggaggtggagaagagaagcgtgcagtgcctgtacaccagcagcgccttccccagcggcaagccccagccccacagcagcgtggtgtacagcgaggccggcaaggacaagggccccccccccaagagcagatacgaggaggagctgagaaccagaggcaagaccaccatcaccgccgccaacttcatcgacgtgatcatcaccagacagatcgccagcgacaaggacgccagagagagaggcagccagagcagcgacagcagcagcagcctgagcagccacagatacgagacccccagcgacgccatcgaggtgatcagccccgccagcagccccgcccccccccaggagaagctgcagacctaccagcccgaggtggtgaaggccaaccaggccgagaacgaccccaccagacagtacgagggccccctgcaccactacagaccccagcaggagagccccagcccccagcagcagctgccccccagcagccaggccgagggcatgggccaggtgcccagaacccacagactgatcaccctggccgaccacatctgccagatcatcacccaggacttcgccagaaaccaggtgagcagccagaccccccagcagccccccaccagcaccttccagaacagccccagcgccctggtgagcacccccgtgagaaccaagaccagcaacagatacagccccgagagccaggcccagagcgtgcaccaccagagacccggcagcagagtgagccccgagaacctggtggacaagagcagaggcagcagacccggcaagagccccgagagaagccacgtgagcagcgagccctacgagcccatcagccccccccaggtgcccgtggtgcacgagaagcaggacagcctgctgctgctgagccagagaggcgccgagcccgccgagcagagaaacgacgccagaagccccggcagcatcagctacctgcccagcttcttcaccaagctggagaacaccagccccatggtgaagagcaagaagcaggagatcttcagaaagctgaacagcagcggcggcggcgacagcgacatggccgccgcccagcccggcaccgagatcttcaacctgcccgccgtgaccaccagcggcagcgtgagcagcagaggccacagcttcgccgaccccgccagcaacctgggcctggaggacatcatcagaaaggccctgatgggcagcttcgacgacaaggtggaggaccacggcgtggtgatgagccagcccatgggcgtggtgcccggcaccgccaacaccagcgtggtgaccagcggcgagaccagaagagaggagggcgaccccagcccccacagcggcggcgtgtgcaagcccaagctgatcagcaagagcaacagcagaaagagcaagagccccatccccggccagggctacctgggcaccgagagacccagcagcgtgagcagcgtgcacagcgagggcgactaccacagacagacccccggctgggcctgggaggacagacccagcagcaccggcagcacccagttcccctacaaccccctgaccatgagaatgctgagcagcaccccccccacccccatcgcctgcgcccccagcgccgtgaaccaggccgccccccaccagcagaacagaatctgggagagagagcccgcccccctgctgagcgcccagtacgagaccctgagcgacagcgacgactag

SEQ ID NO: 9513 - DNA, 2313 bp, synthetic construct
  source 1..2313: mol_type = other DNA; note = Synthetic coding sequence
atgctgcagcaggtgaacggccacaaccccggcagcgacggccaggccagagagtacctgagagaggacctgcaggagttcctgggcggcgaggtgctgctgtacaagctggacgacctgaccagagtgaaccccgtgaccctggagaccgtgctgagatgcctgcaggccagatacatggccgacaccttctacaccaacgccggctgcaccctggtggccctgaaccccttcaagcccgtgccccagctgtacagccccgagctgatgagagagtaccacgccgccccccagccccagaagctgaagccccacgtgttcaccgtgggcgagcagacctacagaaacgtgaagagcctgatcgagcccgtgaaccagagcatcgtggtgagcggcgagagcggcgccggcaagacctggaccagcagatgcctgatgaagttctacgccgtggtggccaccagccccgccagctgggagagccacaagatcgccgagagaatcgagcagagaatcctgaacagcaaccccgtgatggaggccttcggcaacgcctgcaccctgagaaacaacaacagcagcagattcggcaagttcatccagctgcagctgaacagagcccagcagatgaccggcgccgccgtgcagacctacctgctggagaagaccagagtggcctgccaggccagcagcgagagaaacttccacatcttctaccagatctgcaagggcgccagcgaggacgagagactgcagtggcacctgcccgagggcgccgccttcagctggctgcccaaccccgagagaagcctggaggaggactgcttcgaggtgaccagagaggccatgctgcacctgggcatcgacacccccacccagaacaacatcttcaaggtgctggccggcctgctgcacctgggcaacatccagttcgccgccagcgaggacgaggcccagccctgccagcccatggacgacgccaagtacagcgtgagaaccgccgccagcctgctgggcctgcccgaggacgtgctgctggagatggtgcagatcagaaccatcagagccggcagacagcagcaggtgttcagaaagccctgcgccagagccgagtgcgacaccagaagagactgcctggccaagctgatctacgccagactgttcgactggctggtgagcgtgatcaacagcagcatctgcgccgacaccgacagctggaccaccttcatcggcctgctggacgtgtacggcttcgagagcttccccgacaacagcctggagcagctgtgcatcaactacgccaacgagaagctgcagctggaggcctgcggcctggtggagaccatccacatcagcgccgccggcttccccatcagagtgagccacagaaacttcgtggagagatacaagctgctgagaagactgcacccctgcaccagcagcggccccgacagcccctaccccgccaagggcctgcccgagtggtgcccccacagcgaggaggccaccctggagcccctgatccaggacatcctgcacaccctgcccgtgctgacccaggccgccgccatcaccggcgacagcgccgaggccatgcccgcccccatgcactgcggcagaaccaaggtgttcatgaccgacagcatgctggagctgctggagtgcggcagagccagagtgctggagcagtgcgccagatgcatccagggcggctggagaagacacagacacagagagcaggagagacagtggagagccgtgatgctgatccaggccgccatcagaagctggctgaccagaaagcacatccagagactgcacgccgccgccaccgtgatcaagagagcctggcagaagtggagaatcagaatggcctgcctggccgccaaggagctggacggcgtggaggagaagcacttcagccaggccccctgcagcctgagcaccagccccctgcagaccagactgctggaggccatcatcagactgtggcccctgggcctggtgctggccaacaccgccatgggcgtgggcagcttccagagaaagctggtggtgtgggcctgcctgcagctgcccagaggcagccccagcagctacaccgtgcagaccgcccaggaccaggccggcgtgaccagcatcagagccctgccccagggcagcatcaagttccactgcagaaagagccccctgagatacgccgacatctgccccgagcccagcccctacagcatcaccggcttcaaccagatcctgctggagagacacagactgatccacgtgaccagcagcgccttcaccggcctgggctag

SEQ ID NO: 9514 - DNA, 2796 bp, synthetic construct
  source 1..2796: mol_type = other DNA; note = Synthetic coding sequence
atggccgaggtggaggccgtgcagctgaaggaggagggcaacagacacttccagctgcaggactacaaggccgccaccaacagctacagccaggccctgaagctgaccaaggacaaggccctgctggccaccctgtacagaaacagagccgcctgcggcctgaagaccgagagctacgtgcaggccgccagcgacgccagcagagccatcgacatcaacagcagcgacatcaaggccctgtacagaagatgccaggccctggagcacctgggcaagctggaccaggccttcaaggacgtgcagagatgcgccaccctggagcccagaaaccagaacttccaggagatgctgagaagactgaacaccagcatccaggagaagctgagagtgcagttcagcaccgacagcagagtgcagaagatgttcgagatcctgctggacgagaacagcgaggccgacaagagagagaaggccgccaacaacctgatcgtgctgggcagagaggaggccggcgccgagaagatcttccagaacaacggcgtggccctgctgctgcagctgctggacaccaagaagcccgagctggtgctggccgccgtgagaaccctgagcggcatgtgcagcggccaccaggccagagccaccgtgatcctgcacgccgtgagaatcgacagaatctgcagcctgatggccgtggagaacgaggagatgagcctggccgtgtgcaacctgctgcaggccatcatcgacagcctgagcggcgaggacaagagagagcacagaggcaaggaggaggccctggtgctggacaccaagaaggacctgaagcagatcaccagccacctgctggacatgctggtgagcaagaaggtgagcggccagggcagagaccaggccctgaacctgctgaacaagaacgtgcccagaaaggacctggccatccacgacaacagcagaaccatctacgtggtggacaacggcctgagaaagatcctgaaggtggtgggccaggtgcccgacctgcccagctgcctgcccctgaccgacaacaccagaatgctggccagcatcctgatcaacaagctgtacgacgacctgagatgcgaccccgagagagaccacttcagaaagatctgcgaggagtacatcaccggcaagttcgacccccaggacatggacaagaacctgaacgccatccagaccgtgagcggcatcctgcagggccccttcgacctgggcaaccagctgctgggcctgaagggcgtgatggagatgatggtggccctgtgcggcagcgagagagagaccgaccagctggtggccgtggaggccctgatccacgccagcaccaagctgagcagagccaccttcatcatcaccaacggcgtgagcctgctgaagcagatctacaagaccaccaagaacgagaagatcaagatcagaaccctggtgggcctgtgcaagctgggcagcgccggcggcaccgactacggcctgagacagttcgccgagggcagcaccgagaagctggccaagcagtgcagaaagtggctgtgcaacatgagcatcgacaccagaaccagaagatgggccgtggagggcctggcctacctgaccctggacgccgacgtgaaggacgacttcgtgcaggacgtgcccgccctgcaggccatgttcgagctggccaaggccggcaccagcgacaagaccatcctgtacagcgtggccaccaccctggtgaactgcaccaacagctacgacgtgaaggaggtgatccccgagctggtgcagctggccaagttcagcaagcagcacgtgcccgaggagcaccccaaggacaagaaggacttcatcgacatgagagtgaagagactgctgaaggccggcgtgatcagcgccctggcctgcatggtgaaggccgacagcgccatcctgaccgaccagaccaaggagctgctggccagagtgttcctggccctgtgcgacaaccccaaggacagaggcaccatcgtggcccagggcggcggcaaggccctgatccccctggccctggagggcaccgacgtgggcaaggtgaaggccgcccacgccctggccaagatcgccgccgtgagcaaccccgacatcgccttccccggcgagagagtgtacgaggtggtgagacccctggtgagactgctggacacccagagagacggcctgcagaactacgaggccctgctgggcctgaccaacctgagcggcagaagcgacaagctgagacagaagatcttcaaggagagagccctgcccgacatcgagaactacatgttcgagaaccacgaccagctgagacaggccgccaccgagtgcatgtgcaacatggtgctgcacaaggaggtgcaggagagattcctggccgacggcaacgacagactgaagctggtggtgctgctgtgcggcgaggacgacgacaaggtgcagaacgccgccgccggcgccctggccatgctgaccgccgcccacaagaagctgtgcctgaagatgacccaggtgaccacccagtggctggagatcctgcagagactgtgcctgcacgaccagctgagcgtgcagcacagaggcctggtgatcgcctacaacctgctggccgccgacgccgagctggccaagaagctggtggagagcgagctgctggagatcctgaccgtggtgggcaagcaggagcccgacgagaagaaggccgaggtggtgcagaccgccagagagtgcctgatcaagtgcatggactacggcttcatcaagcccgtgagctag

SEQ ID NO: 9515 - DNA, 2022 bp, synthetic construct
  source 1..2022: mol_type = other DNA; note = Synthetic coding sequence
atggccagccagttctgcctgcccgagagcccctgcctgagccccctgaagcccctgaagccccacttcggcgacatccaggagggcatctacgtggccatccagagaagcgacaagagaatccacctggccgtggtgaccgagatcaacagagagaactactgggtgaccgtggagtgggtggagaaggccgtgaagaagggcaagaagatcgacctggagaccatcctgctgctgaaccccgccctggacagcgccgagcaccccatgccccccccccccctgagccccctggccctggcccccagcagcgccatcagagaccagagaaccgccaccaagtgggtggccatgatcccccagaagaaccagaccgccagcggcgacagcctggacgtgagagtgcccagcaagccctgcctgatgaagcagaagaagagcccctgcctgtgggagatccagaagctgcaggagcagagagagaagagaagaagactgcagcaggagatcagagccagaagagccctggacgtgaacaccagaaaccccaactacgagatcatgcacatgatcgaggagtacagaagacacctggacagcagcaagatcagcgtgctggagcccccccaggagcacagaatctgcgtgtgcgtgagaaagagacccctgaaccagagagagaccaccctgaaggacctggacatcatcaccgtgcccagcgacaacgtggtgatggtgcacgagagcaagcagaaggtggacctgaccagatacctgcagaaccagaccttctgcttcgaccacgccttcgacgacaaggccagcaacgagctggtgtaccagttcaccgcccagcccctggtggagagcatcttcagaaagggcatggccacctgcttcgcctacggccagaccggcagcggcaagacctacaccatgggcggcgacttcagcggcaccgcccaggactgcagcaagggcatctacgccctggtggcccaggacgtgttcctgctgctgagaaacagcacctacgagaagctggacctgaaggtgtacggcaccttcttcgagatctacggcggcaaggtgtacgacctgctgaactggaagaagaagctgcaggtgctggaggacggcaaccagcagatccaggtggtgggcctgcaggagaaggaggtgtgctgcgtggaggaggtgctgaacctggtggagatcggcaacagctgcagaaccagcagacagacccccgtgaacgcccacagcagcagaagccacgccgtgttccagatcatcctgaagagcggcagaatcatgcacggcaagttcagcctggtggacctggccggcaacgagagaggcgccgacaccaccaaggccagcagaaagagacagctggagggcgccgagatcaacaagagcctgctggccctgaaggagtgcatcctggccctgggccagaacaagccccacacccccttcagagccagcaagctgaccctggtgctgagagacagcttcatcggccagaacagcagcacctgcatgatcgccaccatcagccccggcatgaccagctgcgagaacaccctgaacaccctgagatacgccaacagagtgaagaagctgaacgtggacgtgagaccctaccacagaggccactaccccatcggccacgaggcccccagaatgctgaagagccacatcggcaacagcgagatgagcctgcagagagacgagttcatcaagatcccctacgtgcagagcgaggagcagaaggagatcgaggaggtggagaccctgcccaccctgctgggcaaggacaccaccatcagcggcaagggcagcagccagtggctggagaacatccaggagagagccggcggcgtgcaccacgacatcgacttctgcatcgccagaagcctgagcatcctggagcagaagatcgacgccctgaccgagatccagaagaagctgaagctgctgctggccgacctgcacgtgaagagcaaggtggagtag

SEQ ID NO: 9516 - DNA, 1236 bp, synthetic construct
  source 1..1236: mol_type = other DNA; note = Synthetic coding sequence
atggccaccaccgccaccatggccaccagcggcagcgccagaaagagactgctgaaggaggaggacatgaccaaggtggagttcgagaccagcgaggaggtggacgtgacccccaccttcgacaccatgggcctgagagaggacctgctgagaggcatctacgcctacggcttcgagaagcccagcgccatccagcagagagccatcaagcagatcatcaagggcagagacgtgatcgcccagagccagagcggcaccggcaagaccgccaccttcagcatcagcgtgctgcagtgcctggacatccaggtgagagagacccaggccctgatcctggcccccaccagagagctggccgtgcagatccagaagggcctgctggccctgggcgactacatgaacgtgcagtgccacgcctgcatcggcggcaccaacgtgggcgaggacatcagaaagctggactacggccagcacgtggtggccggcacccccggcagagtgttcgacatgatcagaagaagaagcctgagaaccagagccatcaagatgctggtgctggacgaggccgacgagatgctgaacaagggcttcaaggagcagatctacgacgtgtacagatacctgccccccgccacccaggtggtgctgatcagcgccaccctgccccacgagatcctggagatgaccaacaagttcatgaccgaccccatcagaatcctggtgaagagagacgagctgaccctggagggcatcaagcagttcttcgtggccgtggagagagaggagtggaagttcgacaccctgtgcgacctgtacgacaccctgaccatcacccaggccgtgatcttctgcaacaccaagagaaaggtggactggctgaccgagaagatgagagaggccaacttcaccgtgagcagcatgcacggcgacatgccccagaaggagagagagagcatcatgaaggagttcagaagcggcgccagcagagtgctgatcagcaccgacgtgtgggccagaggcctggacgtgccccaggtgagcctgatcatcaactacgacctgcccaacaacagagagctgtacatccacagaatcggcagaagcggcagatacggcagaaagggcgtggccatcaacttcgtgaagaacgacgacatcagaatcctgagagacatcgagcagtactacagcacccagatcgacgagatgcccatgaacgtggccgacctgatctag

SEQ ID NO: 9517 - DNA, 1683 bp, synthetic construct
  source 1..1683: mol_type = other DNA; note = Synthetic coding sequence
atggagctgcccgccgtgggcgagcacgtgttcgccgtggagagcatcgagaagaagagaatcagaaagggcagagtggagtacctggtgaagtggagaggctggagccccaagtacaacacctgggagcccgaggagaacatcctggaccccagactgctgatcgccttccagaacagagagagacaggagcagctgatgggctacagaaagagaggccccaagcccaagcccctggtggtgcaggtgcccaccttcgccagaagaagcaacgtgctgaccggcctgcaggacagcagcaccgacaacagagccaagctggacctgggcgcccagggcaagggccagggccaccagtacgagctgaacagcaagaagcaccaccagtaccagccccacagcaaggagagagccggcaagccccccccccccggcaagagcggcaagtactactaccagctgaacagcaagaagcaccacccctaccagcccgaccccaagatgtacgacctgcagtaccagggcggccacaaggaggcccccagccccacctgccccgacctgggcgccaagagccacccccccgacaagtgggcccagggcgccggcgccaagggctacctgggcgccgtgaagcccctggccggcgccgccggcgcccccggcaagggcagcgagaagggcccccccaacggcatgatgcccgcccccaaggaggccgtgaccggcaacggcatcggcggcaagatgaagatcgtgaagaacaagaacaagaacggcagaatcgtgatcgtgatgagcaagtacatggagaacggcatgcaggccgtgaagatcaagagcggcgaggtggccgagggcgaggccagaagccccagccacaagaagagagccgccgacgagagacacccccccgccgacagaaccttcaagaaggccgccggcgccgaggagaagaaggtggaggccccccccaagagaagagaggaggaggtgagcggcgtgagcgacccccagccccaggacgccggcagcagaaagctgagccccaccaaggaggccttcggcgagcagcccctgcagctgaccaccaagcccgacctgctggcctgggaccccgccagaaacacccacccccccagccaccacccccacccccacccccaccaccaccaccaccaccaccaccaccaccaccacgccgtgggcctgaacctgagccacgtgagaaagagatgcctgagcgagacccacggcgagagagagccctgcaagaagagactgaccgccagaagcatcagcacccccacctgcctgggcggcagccccgccgccgagagacccgccgacctgccccccgccgccgccctgccccagcccgaggtgatcctgctggacagcgacctggacgagcccatcgacctgagatgcgtgaagaccagaagcgaggccggcgagccccccagcagcctgcaggtgaagcccgagacccccgccagcgccgccgtggccgtggccgccgccgccgcccccaccaccaccgccgagaagccccccgccgaggcccaggacgagcccgccgagagcctgagcgagttcaagcccttcttcggcaacatcatcatcaccgacgtgaccgccaactgcctgaccgtgaccttcaaggagtacgtgaccgtgtag

SEQ ID NO: 9518 - DNA, 1218 bp, synthetic construct
  source 1..1218: mol_type = other DNA; note = Synthetic coding sequence
atggacagcctggtgaccgccaacaccaagttctgcttcgacctgttccaggagatcggcaaggacgacagacacaagaacatcttcttcagccccctgagcctgagcgccgccctgggcatggtgagactgggcgccagaagcgacagcgcccaccagatcgacgaggtgctgcacttcaacgagttcagccagaacgagagcaaggagcccgacccctgcctgaagagcaacaagcagaaggccggcagcctgaacaacgagagcggcctggtgagctgctacttcggccagctgctgagcaagctggacagaatcaagaccgactacaccctgagcatcgccaacagactgtacggcgagcaggagttccccatctgccaggagtacctggacggcgtgatccagttctaccacaccaccatcgagagcgtggacttccagaagaaccccgagaagagcagacaggagatcaacttctgggtggagtgccagagccagggcaagatcaaggagctgttcagcaaggacgccatcaacgccgagaccgtgctggtgctggtgaacgccgtgtacttcaaggccaagtgggagacctacttcgaccacgagaacaccgtggacgcccccttctgcctgaacgccaacgagaacaagagcgtgaagatgatgacccagaagggcctgtacagaatcggcttcatcgaggaggtgaaggcccagatcctggagatgagatacaccaagggcaagctgagcatgttcgtgctgctgcccagccacagcaaggacaacctgaagggcctggaggagctggagagaaagatcacctacgagaagatggtggcctggagcagcagcgagaacatgagcgaggagagcgtggtgctgagcttccccagattcaccctggaggacagctacgacctgaacagcatcctgcaggacatgggcatcaccgacatcttcgacgagaccagagccgacctgaccggcatcagccccagccccaacctgtacctgagcaagatcatccacaagaccttcgtggaggtggacgagaacggcacccaggccgccgccgccaccggcgccgtggtgagcgagagaagcctgagaagctgggtggagttcaacgccaaccaccccttcctgttcttcatcagacacaacaagacccagaccatcctgttctacggcagagtgtgcagcccctag

SEQ ID NO: 9519 - DNA, 3537 bp, synthetic construct
  source 1..3537: mol_type = other DNA; note = Synthetic coding sequence
atgctgagaatgaagctgcccctgaagcccacccaccccgccgagcccccccccgaggccgaggagcccgaggccgacgccagacccggcgccaaggcccccagcagaagaagaagagactgcagaccccccccccccccccccccccccgccggccccagcagaggccccctgccccccccccccccccccagaggcctgggcccccccgtggccggcggcgccgccgccggcgccggcatgcccggcggcggcggcggccccagcgccgccctgagagagcaggagagagtgtacgagtggttcggcctggtgctgggcagcgcccagagactggagttcatgtgcggcctgctggacctgtgcaaccccctggagctgagattcctgggcagctgcctggaggacctggccagaaaggactaccactacctgagagacagcgaggccaaggccaacggcctgagcgaccccggccccctggccgacttcagagagcccgccgtgagaagcagactgatcgtgtacctggccctgctgggcagcgagaacagagaggccgccggcagactgcacagactgctgccccaggtggacagcgtgctgaagagcctgagagccgccagaggcgagggcagcagaggcggcgccgaggacgagagaggcgaggacggcgacggcgagcaggacgccgagaaggacggcagcggccccgagggcggcatcgtggagcccagagtgggcggcggcctgggcagcagagcccaggaggagctgctgctgctgttcaccatggccagcctgcaccccgccttcagcttccaccagagagtgaccctgagagagcacctggagagactgagagccgccctgagaggcggccccgaggacgccgaggtggaggtggagccctgcaagttcgccggccccagagcccagaacaacagcgcccacggcgactacatgcagaacaacgagagcagcctgatcgagcaggcccccatcccccaggacggcctgaccgtggccccccacagagcccagagagaggccgtgcacatcgagaagatcatgctgaagggcgtgcagagaaagagagccgacaagtactgggagtacaccttcaaggtgaactggagcgacctgagcgtgaccaccgtgaccaagacccaccaggagctgcaggagttcctgctgaagctgcccaaggagctgagcagcgagaccttcgacaagaccatcctgagagccctgaaccagggcagcctgaagagagaggagagaagacaccccgacctggagcccatcctgagacagctgttcagcagcagcagccaggccttcctgcagagccagaaggtgcacagcttcttccagagcatcagcagcgacagcctgcacagcatcaacaacctgcagagcagcctgaagaccagcaagatcctggagcacctgaaggaggacagcagcgaggccagcagccaggaggaggacgtgctgcagcacgccatcatccacaagaagcacaccggcaagagccccatcgtgaacaacatcggcaccagctgcagccccctggacggcctgaccatgcagtacagcgagcagaacggcatcgtggactggagaaagcagagctgcaccaccatccagcaccccgagcactgcgtgaccagcgccgaccagcacagcgccgagaagagaagcctgagcagcatcaacaagaagaagggcaagccccagaccgagaaggagaagatcaagaagaccgacaacagactgaacagcagaatcaacggcatcagactgagcaccccccagcacgcccacggcggcaccgtgaaggacgtgaacctggacatcggcagcggccacgacacctgcggcgagaccagcagcgagagctacagcagccccagcagccccagacacgacggcagagagagcttcgagagcgaggaggagaaggacagagacaccgacagcaacagcgaggacagcggcaaccccagcaccaccagattcaccggctacggcagcgtgaaccagaccgtgaccgtgaagccccccgtgcagatcgccagcctgggcaacgagaacggcaacctgctggaggaccccctgaacagccccaagtaccagcacatcagcttcatgcccaccctgcactgcgtgatgcacaacggcgcccagaagagcgaggtggtggtgcccgcccccaagcccgccgacggcaagaccatcggcatgctggtgcccagccccgtggccatcagcgccatcagagagagcgccaacagcacccccgtgggcatcctgggccccaccgcctgcaccggcgagagcgagaagcacctggagctgctggccagccccctgcccatccccagcaccttcctgccccacagcagcacccccgccctgcacctgaccgtgcagagactgaagctgccccccccccagggcagcagcgagagctgcaccgtgaacatcccccagcagccccccggcagcctgagcatcgccagccccaacaccgccttcatccccatccacaaccccggcagcttccccggcagccccgtggccaccaccgaccccatcaccaagagcgccagccaggtggtgggcctgaaccagatggtgccccagatcgagggcaacaccggcaccgtgccccagcccaccaacgtgaaggtggtgctgcccgccgccggcctgagcgccgcccagccccccgccagctaccccctgcccggcagccccctggccgccggcgtgctgcccagccagaacagcagcgtgctgagcaccgccgccaccagcccccagcccgccagcgccggcatcagccaggcccaggccaccgtgccccccgccgtgcccacccacacccccggccccgcccccagccccagccccgccctgacccacagcaccgcccagagcgacagcaccagctacatcagcgccgtgggcaacaccaacgccaacggcaccgtggtgcccccccagcagatgggcagcggcccctgcggcagctgcggcagaagatgcagctgcggcaccaacggcaacctgcagctgaacagctactactaccccaaccccatgcccggccccatgtacagagtgcccagcttcttcaccctgcccagcatctgcaacggcagctacctgaaccaggcccaccagagcaacggcaaccagctgcccttcttcctgccccagaccccctacgccaacggcctggtgcacgaccccgtgatgggcagccaggccaactacggcatgcagcagatggccggcttcggcagattctaccccgtgtaccccgcccccaacgtggtggccaacaccagcggcagcggccccaagaagaacggcaacgtgagctgctacaactgcggcgtgagcggccactacgcccaggactgcaagcagagcagcatggaggccaaccagcagggcacctacagactgagatacgccccccccctgccccccagcaacgacaccctggacagcgccgactag

SEQ ID NO: 9520 - DNA, 411 bp, synthetic construct
  source 1..411: mol_type = other DNA; note = Synthetic coding sequence
atgcccggcaagaaggccagaaagaacgcccagcccagccccgccagagcccccgccggccccgccggcaccgccggcaccgccagagaccaggccggcttcgccatcggcatgcagctgagattcaccagaggcaagaagctgctgagcagcagcctgagcagcagccccctggccctgcccagaggccacgaggagcaggtgcaggtggccggcagcagagtgtgctacagcacccaggagatctggagacagaccgagctgcccgccgagaccagcgagagcgacatccagaccctgctgctgagaaacctgaccgccagcaagacctgcatgagaggcctgctgcagaagagcttcctgagaagatgcaccttccaccagttcgaggagagactgcactgcaactag

SEQ ID NO: 9521 - DNA, 879 bp, synthetic construct
  source 1..879: mol_type = other DNA; note = Synthetic coding sequence
atgaaggccaccgtgctgatgagacagcccggcagagtgcaggagatcgtgggcgccctgagaaagggcggcggcgacagactgcaggtgatcagcgacttcgacatgaccctgagcagattcgcctacaacggcaagagatgccccagcagctacaacatcctggacaacagcaagatcatcagcgaggagtgcagaaaggagctgaccgccctgctgcaccactactaccccatcgagatcgacccccacagaaccgtgaaggagaagctgccccacatggtggagtggtggaccaaggcccacaacctgctgtgccagcagaagatccagaagttccagatcgcccaggtggtgagagagagcaacgccatgctgagagagggctacaagaccttcttcaacaccctgtaccacaacaacatccccctgttcatcttcagcgccggcatcggcgacatcctggaggagatcatcagacagatgaaggtgttccaccccaacatccacatcgtgagcaactacatggacttcaacgaggacggcttcctgcagggcttcaagggccagctgatccacacctacaacaagaacagcagcgcctgcgagaacagcggctacttccagcagctggagggcaagaccaacgtgatcctgctgggcgacagcatcggcgacctgaccatggccgacggcgtgcccggcgtgcagaacatcctgaagatcggcttcctgaacgacaaggtggaggagagaagagagagatacatggacagctacgacatcgtgctggagaaggacgagaccctggacgtggtgaacggcctgctgcagcacatcctgtgccagggcgtgcagctggagatgcagggcccctag

SEQ ID NO: 9522 - DNA, 2010 bp, synthetic construct
  source 1..2010: mol_type = other DNA; note = Synthetic coding sequence
atggacctgagaaccgccgtgtacaacgccgccagagacggcaagctgcagctgctgcagaagctgctgagcggcagaagcagagaggagctggacgagctgaccggcgaggtggccggcggcggcacccccctgctgatcgccgccagatacggccacctggacgtggtggagtacctggtggacagatgcggcgccagcgtggaggccggcggcagcgtgcacttcgacggcgagaccatcgagggcgccccccccctgtgggccgccagcgccgccggccacctggacgtggtgagaagcctgctgagaagaggcgccagcgtgaacagaaccaccagaaccaacagcacccccctgagagccgcctgcttcgacggccacctggaggtggtgagatacctggtgggcgagcaccaggccgacctggaggtggccaacagacacggccacacctgcctgatgatcagctgctacaagggccacagagagatcgccagatacctgctggagcagggcgcccaggtgaacagaagaagcgccaagggcaacaccgccctgcacgactgcgccgagagcggcagcctggagatcctgcagctgctgctgggctgcaaggccagaatggagagagacggctacggcatgacccccctgctggccgccagcgtgaccggccacaccaacatcgtggagtacctgatccaggagcagcccggccaggagcaggtggccggcggcgaggcccagcccggcctgccccaggaggaccccagcaccagccagggctgcgcccagccccagggcgccccctgctgcagcagcagccccgaggagcccctgaacggcgagagctacgagagctgctgccccaccagcagagaggccgccgtggaggccctggagctgctgggcgccacctacgtggacaagaagagagacctgctgggcgccctgaagcactggagaagagccatggagctgagacaccagggcggcgagtacctgcccaagcccgagcccccccagctggtgctggcctacgactacagcagagaggtgaacaccaccgaggagctggaggccctgatcaccgaccccgacgagatgagaatgcaggccctgctgatcagagagagaatcctgggccccagccaccccgacaccagctactacatcagatacagaggcgccgtgtacgccgacagcggcaacttcgagagatgcatcagactgtggaagtacgccctggacatgcagcagagcaacctggagcccctgagccccatgaccgccagcagcttcctgagcttcgccgagctgttcagctacgtgctgcaggacagagccgccaagggcagcctgggcacccagatcggcttcgccgacctgatgggcgtgctgaccaagggcgtgagagaggtggagagagccctgcagctgcccagagagcccggcgacagcgcccagttcaccaaggccctggccatcatcctgcacctgctgtacctgctggagaaggtggagtgcacccccagccaggagcacctgaagcaccagaccgtgtacagactgctgaagtgcgcccccagaggcaagaacggcttcacccccctgcacatggccgtggacaaggacaccaccaacgtgggcagataccccgtgggcagattccccagcctgcacgtggtgaaggtgctgctggactgcggcgccgaccccgacagcagagacttcgacaacaacacccccctgcacatcgccgcccagaacaactgccccgccatcatgaacgccctgatcgaggccggcgcccacatggacgccaccaacgccttcaagaagaccgcctacgagctgctggacgagaagctgctggccagaggcaccatgcagcccttcaactacgtgaccctgcagtgcctggccgccagagccctggacaagaacaagatcccctacaagggcttcatccccgaggacctggaggccttcatcgagctgcactag

SEQ ID NO: 9523 - DNA, 720 bp, synthetic construct
  source 1..720: mol_type = other DNA; note = Synthetic coding sequence
atggccgccaccctgctggccgccagaggcgccggccccgcccccgcctggggccccgaggccttcacccccgactgggagagcagagaggtgagcaccggcaccaccatcatggccgtgcagttcgacggcggcgtggtgctgggcgccgacagcagaaccaccaccggcagctacatcgccaacagagtgaccgacaagctgacccccatccacgacagaatcttctgctgcagaagcggcagcgccgccgacacccaggccgtggccgacgccgtgacctaccagctgggcttccacagcatcgagctgaacgagccccccctggtgcacaccgccgccagcctgttcaaggagatgtgctacagatacagagaggacctgatggccggcatcatcatcgccggctgggacccccaggagggcggccaggtgtacagcgtgcccatgggcggcatgatggtgagacagagcttcgccatcggcggcagcggcagcagctacatctacggctacgtggacgccacctacagagagggcatgaccaaggaggagtgcctgcagttcaccgccaacgccctggccctggccatggagagagacggcagcagcggcggcgtgatcagactggccgccatcgccgagagcggcgtggagagacaggtgctgctgggcgaccagatccccaagttcgccgtggccaccctgccccccgcctag

SEQ ID NO: 9524 - DNA, 1383 bp, synthetic construct
  source 1..1383: mol_type = other DNA; note = Synthetic coding sequence
atgaacttcagcgaggtgttcaagctgagcagcctgctgtgcaagttcagccccgacggcaagtacctggccagctgcgtgcagtacagactggtggtgagagacgtgaacaccctgcagatcctgcagctgtacacctgcctggaccagatccagcacatcgagtggagcgccgacagcctgttcatcctgtgcgccatgtacaagagaggcctggtgcaggtgtggagcctggagcagcccgagtggcactgcaagatcgacgagggcagcgccggcctggtggccagctgctggagccccgacggcagacacatcctgaacaccaccgagttccacctgagaatcaccgtgtggagcctgtgcaccaagagcgtgagctacatcaagtaccccaaggcctgcctgcagggcatcaccttcaccagagacggcagatacatggccctggccgagagaagagactgcaaggactacgtgagcatcttcgtgtgcagcgactggcagctgctgagacacttcgacaccgacacccaggacctgaccggcatcgagtgggcccccaacggctgcgtgctggccgtgtgggacacctgcctggagtacaagatcctgctgtacagcctggacggcagactgctgagcacctacagcgcctacgagtggagcctgggcatcaagagcgtggcctggagccccagcagccagttcctggccgtgggcagctacgacggcaaggtgagaatcctgaaccacgtgacctggaagatgatcaccgagttcggccaccccgccgccatcaacgaccccaagatcgtggtgtacaaggaggccgagaagagcccccagctgggcctgggctgcctgagcttccccccccccagagccggcgccggccccctgcccagcagcgagagcaagtacgagatcgccagcgtgcccgtgagcctgcagaccctgaagcccgtgaccgacagagccaaccccaagatcggcatcggcatgctggccttcagccccgacagctacttcctggccaccagaaacgacaacatccccaacgccgtgtgggtgtgggacatccagaagctgagactgttcgccgtgctggagcagctgagccccgtgagagccttccagtgggacccccagcagcccagactggccatctgcaccggcggcagcagactgtacctgtggagccccgccggctgcatgagcgtgcaggtgcccggcgagggcgacttcgccgtgctgagcctgtgctggcacctgagcggcgacagcatggccctgctgagcaaggaccacttctgcctgtgcttcctggagaccgaggccgtggtgggcaccgcctgcagacagctgggcggccacacctag

SEQ ID NO: 9525 - DNA, 282 bp, synthetic construct
  source 1..282: mol_type = other DNA; note = Synthetic coding sequence
atgagcggcctgagagtgtacagcaccagcgtgaccggcagcagagagatcaagagccagcagagcgaggtgaccagaatcctggacggcaagagaatccagtaccagctggtggacatcagccaggacaacgccctgagagacgagatgagagccctggccggcaaccccaaggccacccccccccagatcgtgaacggcgaccagtactgcggcgactacgagctgttcgtggaggccgtggagcagaacaccctgcaggagttcctgaagctggcctag

SEQ ID NO: 9526 - DNA, 1920 bp, synthetic construct
  source 1..1920: mol_type = other DNA; note = Synthetic coding sequence
atgaacctggagaagctgagcaagcccgagctgctgaccctgttcagcatcctggagggcgagctggaggccagagacctggtgatcgaggccctgaaggcccagcacagagacaccttcatcgaggagagatacggcaagtacaacatcagcgaccccctgatggccctgcagagagacttcgagaccctgaaggagaagaacgacggcgagaagcagcccgtgtgcaccaaccccctgagcatcctgaaggtggtgatgaagcagtgcaagaacatgcaggagagaatgctgagccagctggccgccgccgagagcagacacagaaaggtgatcctggacctggaggaggagagacagagacacgcccaggacaccgccgagggcgacgacgtgacctacatgctggagaaggagagagagagactgacccagcagctggagttcgagaagagccaggtgaagaagttcgagaaggagcagaagaagctgagcagccagctggaggaggagagaagcagacacaagcagctgagcagcatgctggtgctggagtgcaagaaggccaccaacaaggccgccgaggagggccagaaggccggcgagctgagcctgaagctggagaaggagaagagcagagtgagcaagctggaggaggagctggccgccgagagaaagagaggcctgcagaccgaggcccaggtggagaagcagctgagcgagttcgacatcgagagagagcagctgagagccaagctgaacagagaggagaacagaaccaagaccctgaaggaggagatggagagcctgaagaagatcgtgaaggacctggaggccagccaccagcacagcagccccaacgagcagctgaagaagcccgtgaccgtgagcaagggcaccgccaccgagcccctgatgctgatgagcgtgttctgccagaccgagagcttccccgccgagagaacccacggcagcaacatcgccaagatgaccaacaccggcctgcccggccccgccacccccgcctacagctacgccaagaccaacggccactgcgaccccgagatccagaccaccagagagctgaccgccggcaacaacgtggagaaccaggtgccccccagagagaagagcgtggccctggcccaggagaagcccgtggagaacggcggctgccccgtgggcatcgagacccccgtgcccatgcccagccccctgagcagcagcggcagcagcctgagccccagcagcaccgccagcagcagcctgaccagcagcccctgcagcagccccgtgctgaccaagagactgctgggcagcagcgccagcagccccggctaccagagcagctaccaggtgggcatcaaccagagattccacgccgccagacacaagttccagagccaggccgaccaggaccagcaggccagcggcctgcagagcccccccagcagagacctgagccccaccctgatcgacaacagcgccgccaagcagctggccagaaacaccgtgacccaggtgctgagcagattcaccagccagcagggccccatcaagcccgtgagccccaacagcagccccttcggcaccgactacagaaacctggccaacaccgccaaccccagaggcgacaccagccacagccccacccccggcaaggtgagcagccccctgagccccctgagccccggcatcaagagccccaccatccccagagccgagagaggcaaccccccccccatcccccccaagaagcccggcctgacccccagccccagcgccaccacccccctgaccaagacccacagccaggccgccagcctgaccaccgccgaggacctggccagcagctgcagcagcaacaccgtggtggccaacggcaaggacgtggagctgctgctgcccaccagcagctag

SEQ ID NO: 9527 - DNA, 2487 bp, synthetic construct
  source 1..2487: mol_type = other DNA; note = Synthetic coding sequence
atgagattcctggaggccagaagcctggccgtggccatgggcgacaccgtggtggagcccgcccccctgaagcccaccagcgagcccaccagcggcccccccggcaacaacggcggcagcctgctgagcgtgatcaccgagggcgtgggcgagctgagcgtgatcgaccccgaggtggcccagaaggcctgccaggaggtgctggagaaggtgaagctgctgcacggcggcgtggccgtgagcagcagaggcacccccctggagctggtgaacggcgacggcgtggacagcgagatcagatgcctggacgacccccccgcccagatcagagaggaggaggacgagatgggcgccgccgtggccagcggcaccgccaagggcgccagaagaagaagacagaacaacagcgccaagcagagctggctgctgagactgttcgagagcaagctgttcgacatcagcatggccatcagctacctgtacaacagcaaggagcccggcgtgcaggcctacatcggcaacagactgttctgcttcagaaacgaggacgtggacttctacctgccccagctgctgaacatgtacatccacatggacgaggacgtgggcgacgccatcaagccctacatcgtgcacagatgcagacagagcatcaacttcagcctgcagtgcgccctgctgctgggcgcctacagcagcgacatgcacatcagcacccagagacacagcagaggcaccaagctgagaaagctgatcctgagcgacgagctgaagcccgcccacagaaagagagagctgcccagcctgagccccgcccccgacaccggcctgagccccagcaagagaacccaccagagaagcaagagcgacgccaccgccagcatcagcctgagcagcaacctgaagagaaccgccagcaaccccaaggtggagaacgaggacgaggagctgagcagcagcaccgagagcatcgacaacagcttcagcagccccgtgagactggcccccgagagagagttcatcaagagcctgatggccatcggcaagagactggccaccctgcccaccaaggagcagaagacccagagactgatcagcgagctgagcctgctgaaccacaagctgcccgccagagtgtggctgcccaccgccggcttcgaccaccacgtggtgagagtgccccacacccaggccgtggtgctgaacagcaaggacaaggccccctacctgatctacgtggaggtgctggagtgcgagaacttcgacaccaccagcgtgcccgccagaatccccgagaacagaatcagaagcaccagaagcgtggagaacctgcccgagtgcggcatcacccacgagcagagagccggcagcttcagcaccgtgcccaactacgacaacgacgacgaggcctggagcgtggacgacatcggcgagctgcaggtggagctgcccgaggtgcacaccaacagctgcgacaacatcagccagttcagcgtggacagcatcaccagccaggagagcaaggagcccgtgttcatcgccgccggcgacatcagaagaagactgagcgagcagctggcccacacccccaccgccttcaagagagaccccgaggaccccagcgccgtggccctgaaggagccctggcaggagaaggtgagaagaatcagagagggcagcccctacggccacctgcccaactggagactgctgagcgtgatcgtgaagtgcggcgacgacctgagacaggagctgctggccttccaggtgctgaagcagctgcagagcatctgggagcaggagagagtgcccctgtggatcaagccctacaagatcctggtgatcagcgccgacagcggcatgatcgagcccgtggtgaacgccgtgagcatccaccaggtgaagaagcagagccagctgagcctgctggactacttcctgcaggagcacggcagctacaccaccgaggccttcctgagcgcccagagaaacttcgtgcagagctgcgccggctactgcctggtgtgctacctgctgcaggtgaaggacagacacaacggcaacatcctgctggacgccgagggccacatcatccacatcgacttcggcttcatcctgagcagcagccccagaaacctgggcttcgagaccagcgccttcaagctgaccaccgagttcgtggacgtgatgggcggcctggacggcgacatgttcaactactacaagatgctgatgctgcagggcctgatcgccgccagaaagcacatggacaaggtggtgcagatcgtggagatcatgcagcagggcagccagctgccctgcttccacggcagcagcaccatcagaaacctgaaggagagattccacatgagcatgaccgaggagcagctgcagctgctggtggagcagatggtggacggcagcatgagaagcatcaccaccaagctgtacgacggcttccagtacctgaccaacggcatcatgtag

SEQ ID NO: 9528 - DNA, 4233 bp, synthetic construct
  source 1..4233: mol_type = other DNA; note = Synthetic coding sequence
atggccgacaccgacctgttcatggagtgcgaggaggaggagctggagccctggcagaagatcagcgacgtgatcgaggacagcgtggtggaggactacaacagcgtggacaagaccaccaccgtgagcgtgagccagcagcccgtgagcgcccccgtgcccatcgccgcccacgccagcgtggccggccacctgagcaccagcaccaccgtgagcagcagcggcgcccagaacagcgacagcaccaagaagaccctggtgaccctgatcgccaacaacaacgccggcaaccccctggtgcagcagggcggccagcccctgatcctgacccagaaccccgcccccggcctgggcaccatggtgacccagcccgtgctgagacccgtgcaggtgatgcagaacgccaaccacgtgaccagcagccccgtggccagccagcccatcttcatcaccacccagggcttccccgtgagaaacgtgagacccgtgcagaacgccatgaaccaggtgggcatcgtgctgaacgtgcagcagggccagaccgtgagacccatcaccctggtgcccgcccccggcacccagttcgtgaagcccaccgtgggcgtgccccaggtgttcagccagatgacccccgtgagacccggcagcaccatgcccgtgagacccaccaccaacaccttcaccaccgtgatccccgccaccctgaccatcagaagcaccgtgccccagagccagagccagcagaccaagagcacccccagcaccagcaccacccccaccgccacccagcccaccagcctgggccagctggccgtgcagagccccggccagagcaaccagaccaccaaccccaagctggcccccagcttccccagcccccccgccgtgagcatcgccagcttcgtgaccgtgaagagacccggcgtgaccggcgagaacagcaacgaggtggccaagctggtgaacaccctgaacaccatccccagcctgggccagagccccggccccgtggtggtgagcaacaacagcagcgcccacggcagccagagaaccagcggccccgagagcagcatgaaggtgaccagcagcatccccgtgttcgacctgcaggacggcggcagaaagatctgccccagatgcaacgcccagttcagagtgaccgaggccctgagaggccacatgtgctactgctgccccgagatggtggagtaccagaagaagggcaagagcctggacagcgagcccagcgtgcccagcgccgccaagccccccagccccgagaagaccgcccccgtggccagcacccccagcagcacccccatccccgccctgagcccccccaccaaggtgcccgagcccaacgagaacgtgggcgacgccgtgcagaccaagctgatcatgctggtggacgacttctactacggcagagacggcggcaaggtggcccagctgaccaacttccccaaggtggccaccagcttcagatgcccccactgcaccaagagactgaagaacaacatcagattcatgaaccacatgaagcaccacgtggagctggaccagcagaacggcgaggtggacggccacaccatctgccagcactgctacagacagttcagcacccccttccagctgcagtgccacctggagaacgtgcacagcccctacgagagcaccaccaagtgcaagatctgcgagtgggccttcgagagcgagcccctgttcctgcagcacatgaaggacacccacaagcccggcgagatgccctacgtgtgccaggtgtgccagtacagaagcagcctgtacagcgaggtggacgtgcacttcagaatgatccacgaggacaccagacacctgctgtgcccctactgcctgaaggtgttcaagaacggcaacgccttccagcagcactacatgagacaccagaagagaaacgtgtaccactgcaacaagtgcagactgcagttcctgttcgccaaggacaagatcgagcacaagctgcagcaccacaagaccttcagaaagcccaagcagctggagggcctgaagcccggcaccaaggtgaccatcagagccagcagaggccagcccagaaccgtgcccgtgagcagcaacgacaccccccccagcgccctgcaggaggccgcccccctgaccagcagcatggaccccctgcccgtgttcctgtacccccccgtgcagagaagcatccagaagagagccgtgagaaagatgagcgtgatgggcagacagacctgcctggagtgcagcttcgagatccccgacttccccaaccacttccccacctacgtgcactgcagcctgtgcagatacagcacctgctgcagcagagcctacgccaaccacatgatcaacaaccacgtgcccagaaagagccccaagtacctggccctgttcaagaacagcgtgagcggcatcaagctggcctgcaccagctgcaccttcgtgaccagcgtgggcgacgccatggccaagcacctggtgttcaaccccagccacagaagcagcagcatcctgcccagaggcctgacctggatcgcccacagcagacacggccagaccagagacagagtgcacgacagaaacgtgaagaacatgtaccccccccccagcttccccaccaacaaggccgccaccgtgaagagcgccggcgccacccccgccgagcccgaggagctgctgacccccctggcccccgccctgcccagccccgccagcaccgccacccccccccccacccccacccacccccaggccctggccctgccccccctggccaccgagggcgccgagtgcctgaacgtggacgaccaggacgagggcagccccgtgacccaggagcccgagctggccagcggcggcggcggcagcggcggcgtgggcaagaaggagcagctgagcgtgaagaagctgagagtggtgctgttcgccctgtgctgcaacaccgagcaggccgccgagcacttcagaaacccccagagaagaatcagaagatggctgagaagattccaggccagccagggcgagaacctggagggcaagtacctgagcttcgaggccgaggagaagctggccgagtgggtgctgacccagagagagcagcagctgcccgtgaacgaggagaccctgttccagaaggccaccaagatcggcagaagcctggagggcggcttcaagatcagctacgagtgggccgtgagattcatgctgagacaccacctgaccccccacgccagaagagccgtggcccacaccctgcccaaggacgtggccgagaacgccggcctgttcatcgacttcgtgcagagacagatccacaaccaggacctgcccctgagcatgatcgtggccatcgacgagatcagcctgttcctggacaccgaggtgctgagcagcgacgacagaaaggagaacgccctgcagaccgtgggcaccggcgagccctggtgcgacgtggtgctggccatcctggccgacggcaccgtgctgcccaccctggtgttctacagaggccagatggaccagcccgccaacatgcccgacagcatcctgctggaggccaaggagagcggctacagcgacgacgagatcatggagctgtggagcaccagagtgtggcagaagcacaccgcctgccagagaagcaagggcatgctggtgatggactgccacagaacccacctgagcgaggaggtgctggccatgctgagcgccagcagcaccctgcccgccgtggtgcccgccggctgcagcagcaagatccagcccctggacgtgtgcatcaagagaaccgtgaagaacttcctgcacaagaagtggaaggagcaggccagagagatggccgacaccgcctgcgacagcgacgtgctgctgcagctggtgctggtgtggctgggcgaggtgctgggcgtgatcggcgactgccccgagctggtgcagagaagcttcctggtggccagcgtgctgcccggccccgacggcaacatcaacagccccaccagaaacgccgacatgcaggaggagctgatcgccagcctggaggagcagctgaagctgagcggcgagcacagcgagagcagcacccccagacccagaagcagccccgaggagaccatcgagcccgagagcctgcaccagctgttcgagggcgagagcgagaccgagagcttctacggcttcgaggaggccgacctggacctgatggagatctag

SEQ ID NO: 9529 - DNA, 1488 bp, synthetic construct
  source 1..1488: mol_type = other DNA; note = Synthetic coding sequence
atgccccagctgctgcagaacatcaacggcatcatcgaggccttcagaagatacgccagaaccgagggcaactgcaccgccctgaccagaggcgagctgaagagactgctggagcaggagttcgccgacgtgatcgtgaagccccacgaccccgccaccgtggacgaggtgctgagactgctggacgaggaccacaccggcaccgtggagttcaaggagttcctggtgctggtgttcaaggtggcccaggcctgcttcaagaccctgagcgagagcgccgagggcgcctgcggcagccaggagagcggcagcctgcacagcggcgccagccaggagctgggcgagggccagagaagcggcaccgaggtgggcagagccggcaagggccagcactacgagggcagcagccacagacagagccagcagggcagcagaggccagaacagacccggcgtgcagacccagggccaggccaccggcagcgcctgggtgagcagctacgacagacaggccgagagccagagccaggagagaatcagcccccagatccagctgagcggccagaccgagcagacccagaaggccggcgagggcaagagaaaccagaccaccgagatgagacccgagagacagccccagaccagagagcaggacagagcccaccagaccggcgagaccgtgaccggcagcggcacccagacccaggccggcgccacccagaccgtggagcaggacagcagccaccagaccggcagaaccagcaagcagacccaggaggccaccaacgaccagaacagaggcaccgagacccacggccagggcagaagccagaccagccaggccgtgaccggcggccacgcccagatccaggccggcacccacacccagacccccacccagaccgtggagcaggacagcagccaccagaccggcagcaccagcacccagacccaggagagcaccaacggccagaacagaggcaccgagatccacggccagggcagaagccagaccagccaggccgtgaccggcggccacacccagatccaggccggcagccacaccgagaccgtggagcaggacagaagccagaccgtgagccacggcggcgccagagagcagggccagacccagacccagcccggcagcggccagagatggatgcaggtgagcaaccccgaggccggcgagaccgtgcccggcggccaggcccagaccggcgccagcaccgagagcggcagacaggagtggagcagcacccaccccagaagatgcgtgaccgagggccagggcgacagacagcccaccgtggtgggcgaggagtgggtggacgaccacagcagagagaccgtgatcctgagactggaccagggcaacctgcacaccagcgtgagcagcgcccagggccaggacgccgcccagagcgaggagaagagaggcatcaccgccagagagctgtacagctacctgagaagcaccaagccctag

SEQ ID NO: 9530 - DNA, 1233 bp, synthetic construct
  source 1..1233: mol_type = other DNA; note = Synthetic coding sequence
atgaacatgcccagcacccccctggcccccaccaccggcaccgccacctgcagctggagcgccagcacctgcaccaccaccagacccgccgtgagaccccccagcttcccccacagaccccccggcaacgccgccctgcccagcctgatgcccagcagacccacccaggtggccggccagtgcggcgccggcaacaactgggccaagggccactacaccgagggcgccgagctgatggagagcgtgatggacgtggtgagaaaggaggccgagagctgcgactgcctgcagggcttccagctgacccacagcctgggcggcggcaccggcagcggcatgggcaccctgctgctgagcaagatcagagaggagtaccccgacagaatcatcaacaccttcagcatcctgcccagccccaaggtgagcgacaccgtggtggagccctacaacgccaccctgagcgtgcaccagctgatcgagaacgccgacgagaccttctgcatcgacaacgaggccctgtacgacatctgcagcaagaccctgaagctgcccacccccacctacggcgacctgaaccacctggtgagcgccaccatgagcggcgtgaccacctgcctgagattccccggccagctgaacgccgacctgagaaagctggccgtgaacatggtgcccttccccagactgcacttcttcatgcccggcttcgcccccctgaccagcagaggcagccagcagtacagagccctgaccgtggccgagctgacccagcagatgttcgacgccaagaacatgatggccgcctgcgaccccagacacggcagatacctgaccgccgccgccatcttcagaggcagaatgcccatgagagaggtggacgagcagatgttcaacatccaggacaagaacagcagctacttcgccgactggctgcccaacaacgtgaagaccgccgtgtgcgacatcccccccagaggcctgaagatgagcgccaccttcatcggcaacaacaccgccatccaggagctgttcaagagagtgagcgagcagttcaccgccatgttcagaagaaaggccttcctgcactggtacaccggcgagggcatggacgagatggagttcaccgaggccgagagcaacatgaacgacctggtgagcgagtaccagcagtaccaggacgccaccgccgaggaggaggaggacgaggagtacgccgaggaggaggtggcctag

SEQ ID NO: 9531 - DNA, 2106 bp, synthetic construct
  source 1..2106: mol_type = other DNA; note = Synthetic coding sequence
atgggcagcgccgccgacgtgagattcagcctgggcaccaccacccacgccccccccggcgtgcacagaagatacagcgccctgagagaggagagcgccaaggactgggagaccagccccctgcccggcatgctggcccccgccgccggccccgccttcgacagcgaccccgagatcagcgacgtggacgaggacgagcccggcggcctggtgggcagcgccgacgtggtgagccccagcggccacagcgacgcccagaccctggccatgatgctgcaggagcagctggacgccatcaacgaggagatcagaatgatccaggaggagaaggagagcaccgagctgagagccgaggagatcgagaccagagtgaccagcggcagcatggaggccctgaacctgaagcagctgagaaagagaggcagcatccccaccagcctgaccgccctgagcctggccagcgccagcccccccctgagcggcagaagcacccccaagctgaccagcagaagcgccgcccaggacctggacagaatgggcgtgatgaccctgcccagcgacctgagaaagcacagaagaaagctgctgagccccgtgagcagagaggagaacagagaggacaaggccaccatcaagtgcgagaccagcccccccagcagccccagaaccctgagactggagaagctgggccaccccgccctgagccaggaggagggcaagagcgccctggaggaccagggcagcaaccccagcagcagcaacagcagccaggacagcctgcacaagggcgccaagagaaagggcatcaagagcagcatcggcagactgttcggcaagaaggagaagggcagactgatccagctgagcagagacggcgccaccggccacgtgctgctgaccgacagcgagttcagcatgcaggagcccatggtgcccgccaagctgggcacccaggccgagaaggacagaagactgaagaagaagcaccagctgctggaggacgccagaagaaagggcatgcccttcgcccagtgggacggccccaccgtggtgagctggctggagctgtgggtgggcatgcccgcctggtacgtggccgcctgcagagccaacgtgaagagcggcgccatcatgagcgccctgagcgacaccgagatccagagagagatcggcatcagcaacgccctgcacagactgaagctgagactggccatccaggagatggtgagcctgaccagccccagcgccccccccaccagcagaaccagcagcggcaacgtgtgggtgacccacgaggagatggagaccctggagaccagcaccaagaccgacagcgaggagggcagctgggcccagaccctggcctacggcgacatgaaccacgagtggatcggcaacgagtggctgcccagcctgggcctgccccagtacagaagctacttcatggagtgcctggtggacgccagaatgctggaccacctgaccaagaaggacctgagagtgcacctgaagatggtggacagcttccacagaaccagcctgcagtacggcatcatgtgcctgaagagactgaactacgacagaaaggagctggagaagagaagagaggagagccagcacgagatcaaggacgtgctggtgtggaccaacgaccaggtggtgcactgggtgcagagcatcggcctgagagactacgccggcaacctgcacgagagcggcgtgcacggcgccctgctggccctggacgagaacttcgaccacaacaccctggccctgatcctgcagatccccacccagaacacccaggccagacaggtgatggagagagagttcaacaacctgctggccctgggcaccgacagaaagctggacgacggcgacgacaaggtgttcagaagagcccccagctggagaaagagattcagacccagagagcaccacggcagaggcggcatgctgagcgccagcgccgagaccctgcccgccggcttcagagtgagcaccctgggcaccctgcagcccccccccgccccccccaagaagatcatgcccgaggcccacagccactacctgtacggccacatgctgagcgccttcagagactag

SEQ ID NO: 9532 - DNA, 1029 bp, synthetic construct
  source 1..1029: mol_type = other DNA; note = Synthetic coding sequence
atggccagcgtgaccagagccgtgttcggcgagctgcccagcggcggcggcaccgtggagaagttccagctgcagagcgacctgctgagagtggacatcatcagctggggctgcaccatcaccgccctggaggtgaaggacagacagggcagagccagcgacgtggtgctgggcttcgccgagctggagggctacctgcagaagcagccctacttcggcgccgtgatcggcagagtggccaacagaatcgccaagggcaccttcaaggtggacggcaaggagtaccacctggccatcaacaaggagcccaacagcctgcacggcggcgtgagaggcttcgacaaggtgctgtggacccccagagtgctgagcaacggcgtgcagttcagcagaatcagccccgacggcgaggagggctaccccggcgagctgaaggtgtgggtgacctacaccctggacggcggcgagctgatcgtgaactacagagcccaggccagccaggccacccccgtgaacctgaccaaccacagctacttcaacctggccggccaggccagccccaacatcaacgaccacgaggtgaccatcgaggccgacacctacctgcccgtggacgagaccctgatccccaccggcgaggtggcccccgtgcagggcaccgccttcgacctgagaaagcccgtggagctgggcaagcacctgcaggacttccacctgaacggcttcgaccacaacttctgcctgaagggcagcaaggagaagcacttctgcgccagagtgcaccacgccgccagcggcagagtgctggaggtgtacaccacccagcccggcgtgcagttctacaccggcaacttcctggacggcaccctgaagggcaagaacggcgccgtgtaccccaagcacagcggcttctgcctggagacccagaactggcccgacgccgtgaaccagcccagattcccccccgtgctgctgagacccggcgaggagtacgaccacaccacctggttcaagttcagcgtggcctag

SEQ ID NO: 9533 - DNA, 2295 bp, synthetic construct
  source 1..2295: mol_type = other DNA; note = Synthetic coding sequence
atgagcgacaccagaagaagagtgaaggtgtacaccctgaacgaggacagacagtgggacgacagaggcaccggccacgtgagcagcacctacgtggaggagctgaagggcatgagcctgctggtgagagccgagagcgacggcagcctgctgctggagagcaagatcaaccccaacaccgcctaccagaagcagcaggacaccctgatcgtgtggagcgaggccgagaactacgacctggccctgagcttccaggagaaggccggctgcgacgagatctgggagaagatctgccaggtgcagggcaaggaccccagcgtggaggtgacccaggacctgatcgacgagagcgaggaggagagattcgaggagatgcccgagaccagccacctgatcgacctgcccacctgcgagctgaacaagctggaggagatcgccgacctggtgaccagcgtgctgagcagccccatcagaagagagaagctggccctggccctggagaacgagggctacatcaagaagctgctgcagctgttccaggcctgcgagaacctggagaacaccgagggcctgcaccacctgtacgagatcatcagaggcatcctgttcctgaacaaggccaccctgttcgaggtgatgttcagcgacgagtgcatcatggacgtggtgggctgcctggagtacgaccccgccctggcccagcccaagagacacagagagttcctgaccaagaccgccaagttcaaggaggtgatccccatcaccgacagcgagctgagacagaagatccaccagacctacagagtgcagtacatccaggacatcatcctgcccacccccagcgtgttcgaggagaacttcctgagcaccctgaccagcttcatcttcttcaacaaggtggagatcgtgagcatgctgcaggaggacgagaagttcctgagcgaggtgttcgcccagctgaccgacgaggccaccgacgacgacaagagaagagagctggtgaacttcttcaaggagttctgcgccttcagccagaccctgcagccccagaacagagacgccttcttcaagaccctggccaagctgggcatcctgcccgccctggagatcgtgatgggcatggacgacctgcaggtgagaagcgccgccaccgacatcttcagctacctggtggagttcagccccagcatggtgagagagttcgtgatgcaggaggcccagcagagcgacgacgacatcctgctgatcaacgtggtgatcgagcagatgatctgcgacaccgaccccgagctgggcggcgccgtgcagctgatgggcctgctgagaaccctgatcgaccccgagaacatgctggccaccaccaacaagaccgagaagagcgagttcctgaacttcttctacaaccactgcatgcacgtgctgaccgcccccctgctgaccaacaccagcgaggacaagtgcgagaaggacaacatcgtgggcagcaacaagaacaacaccatctgccccggcgccctgagattcatgagaagaatcatcggcctgaaggacgagttctacaacagatacatcaccaagggcaacctgttcgagcccgtgatcaacgccctgctggacaacggcaccagatacaacctgctgaacagcgccgtgatcgagctgttcgagttcatcagagtggaggacatcaagagcctgaccgcccacatcgtggagaacttctacaaggccctggagagcatcgagtacgtgcagaccttcaagggcctgaagaccaagtacgagcaggagaaggacagacagaaccagaagctgaacagcgtgcccagcatcctgagaagcaacagattcagaagagacgccaaggccctggaggaggacgaggagatgtggttcaacgaggacgaggaggaggagggcaaggccgtggtggcccccgtggagaagcccaagcccgaggacgacttccccgacaactacgagaagttcatggagaccaagaaggccaaggagagcgaggacaaggagaacctgcccaagagaaccagccccggcggcttcaagttcaccttcagccacagcgccagcgccgccaacggcaccaacagcaagagcgtggtggcccagatcccccccgccaccagcaacggcagcagcagcaagaccaccaacctgcccaccagcgtgaccgccaccaagggcagcctggtgggcctggtggactaccccgacgacgaggaggaggacgaggaggaggagagcagccccagaaagagacccagactgggcagctag

SEQ ID NO: 9534 - DNA, 231 bp, synthetic construct
  source 1..231: mol_type = other DNA; note = Synthetic coding sequence
atgagcaaggcccacccccccgagctgaagaagttcatggacaagaagctgagcctgaagctgaacggcggcagacacgtgcagggcatcctgagaggcttcgaccccttcatgaacctggtgatcgacgagtgcgtggagatggccaccagcggccagcagaacaacatcggcatggtggtgatcagaggcaacagcatcatcatgctggaggccctggagagagtgtag

SEQ ID NO: 9535 - DNA, 528 bp, synthetic construct
  source 1..528: mol_type = other DNA; note = Synthetic coding sequence
atgcagctgacccaccagctggacctgttccccgagtgcagagtgaccctgctgctgttcaaggacgtgaagaacgccggcgacctgagaagaaaggccatggagggcaccatcgacggcagcctgatcaaccccaccgtgatcgtggaccccttccagatcctggtggccgccaacaaggccgtgcacctgtacaagctgggcaagatgaagaccagaaccctgagcaccgagatcatcttcaacctgagccccaacaacaacatcagcgaggccctgaagaagttcggcatcagcgccaacgacaccagcatcctgatcgtgtacatcgaggagggcgagaagcagatcaaccaggagtacctgatcagccaggtggagggccaccaggtgagcctgaagaacctgcccgagatcatgaacatcaccgaggtgaagaagatctacaagctgagcagccaggaggagagcatcggcaccctgctggacgccatcatctgcagaatgagcaccaaggacgtgctgtag

SEQ ID NO: 9536 - DNA, 909 bp, synthetic construct
  source 1..909: mol_type = other DNA; note = Synthetic coding sequence
atggccctgcacgacatggaggacttcaccttcgacggcaccaagagactgagcgtgaactacgtgaagggcatcctgcagcccaccgacacctgcgacatctgggacaagatctggaacttccaggccaagcccgacgacctgctgatcagcacctaccccaaggccggcaccacctggacccaggagatcgtggagctgatccagaacgagggcgacgtggagaagagcaagagagcccccacccaccagagattccccttcctggagatgaagatccccagcctgggcagcggcctggagcaggcccacgccatgcccagccccagaatcctgaagacccacctgcccttccacctgctgccccccagcctgctggagaagaactgcaagatcatctacgtggccagaaaccccaaggacaacatggtgagctactaccacttccagagaatgaacaaggccctgcccgcccccggcacctgggaggagtacttcgagaccttcctggccggcaaggtgtgctggggcagctggcacgagcacgtgaagggctggtgggaggccaaggacaagcacagaatcctgtacctgttctacgaggacatgaagaagaaccccaagcacgagatccagaagctggccgagttcatcggcaagaagctggacgacaaggtgctggacaagatcgtgcactacaccagcttcgacgtgatgaagcagaaccccatggccaactacagcagcatccccgccgagatcatggaccacagcatcagccccttcatgagaaagggcgccgtgggcgactggaagaagcacttcaccgtggcccagaacgagagattcgacgaggactacaagaagaagatgaccgacaccagactgaccttccacttccagttctag

SEQ ID NO: 9537 - DNA, 2892 bp, synthetic construct
  source 1..2892: mol_type = other DNA; note = Synthetic coding sequence
atgtggtgcctgcactgcaacagcgagagaacccagagcctgctggagctggagctggacagcggcgtggagggcgaggcccccagcagcgagaccggcaccagcctggacagccccagcgcctacccccagggccccctggtgcccggcagcagcctgagccccgaccactacgagcacaccagcgtgggcgcctacggcctgtacagcggcccccccggccagcagcagagaaccagaagacccaagctgcagcacagcaccagcatcctgagaaagcaggccgaggaggaggccatcaagagaagcagaagcctgagcgagagctacgagctgagcagcgacctgcaggacaagcaggtggagatgctggagagaaagtacggcggcagactggtgaccagacacgccgccagaaccatccagaccgccttcagacagtaccagatgaacaagaacttcgagagactgagaagcagcatgagcgagaacagaatgagcagaagaatcgtgctgagcaacatgagaatgcagttcagcttcgagggccccgagaaggtgcacagcagctacttcgagggcaagcaggtgagcgtgaccaacgacggcagccagctgggcgccctggtgagccccgagtgcggcgacctgagcgagcccaccaccctgaagagccccgcccccagcagcgacttcgccgacgccatcaccgagctggaggacgccttcagcagacaggtgaagagcctggccgagagcatcgacgacgccctgaactgcagaagcctgcacaccgaggaggcccccgccctggacgccgccagagccagagacaccgagccccagaccgccctgcacggcatggaccacagaaagctggacgagatgaccgccagctacagcgacgtgaccctgtacatcgacgaggaggagctgagcccccccctgcccctgagccaggccggcgacagacccagcagcaccgagagcgacctgagactgagagccggcggcgccgcccccgactactgggccctggcccacaaggaggacaaggccgacaccgacaccagctgcagaagcacccccagcctggagagacaggagcagagactgagagtggagcacctgcccctgctgaccatcgagccccccagcgacagcagcgtggacctgagcgacagaagcgagagaggcagcctgaagagacagagcgcctacgagagaagcctgggcggccagcagggcagccccaagcacggcccccacagcggcgcccccaagagcctgcccagagaggagcccgagctgagacccagaccccccagacccctggacagccacctggccatcaacggcagcgccaacagacagagcaagagcgagagcgactacagcgacggcgacaacgacagcatcaacagcaccagcaacagcaacgacaccatcaactgcagcagcgagagcagcagcagagacagcctgagagagcagaccctgagcaagcagacctaccacaaggaggccagaaacagctgggacagccccgccttcagcaacgacgtgatcagaaagagacactacagaatcggcctgaacctgttcaacaagaagcccgagaagggcgtgcagtacctgatcgagagaggcttcgtgcccgacacccccgtgggcgtggcccacttcctgctgcagagaaagggcctgagcagacagatgatcggcgagttcctgggcaacagacagaagcagttcaacagagacgtgctggactgcgtggtggacgagatggacttcagcaccatggagctggacgaggccctgagaaagttccaggcccacatcagagtgcagggcgaggcccagaaggtggagagactgatcgaggccttcagccagagatactgcatctgcaaccccggcgtggtgagacagttcagaaaccccgacaccatcttcatcctggccttcgccatcatcctgctgaacaccgacatgtacagccccaacgtgaagcccgagagaaagatgaagctggaggacttcatcaagaacctgagaggcgtggacgacggcgaggacatccccagagagatgctgatgggcatctacgagagaatcagaaagagagagctgaagaccaacgaggaccacgtgagccaggtgcagaaggtggagaagctgatcgtgggcaagaagcccatcggcagcctgcaccccggcctgggctgcgtgctgagcctgccccacagaagactggtgtgctactgcagactgttcgaggtgcccgaccccaacaagccccagaagctgggcctgcaccagagagagatcttcctgttcaacgacctgctggtggtgaccaagatcttccagaagaagaagaacagcgtgacctacagcttcagacagagcttcagcctgtacggcatgcaggtgctgctgttcgagaaccagtactaccccaacggcatcagactgaccagcagcgtgcccggcgccgacatcaaggtgctgatcaacttcaacgcccccaacccccaggacagaaagaagttcaccgacgacctgagagagagcatcgccgaggtgcaggagatggagaagcacagaatcgagagcgagctggagaagcagaagggcgtggtgagacccagcatgagccagtgcagcagcctgaagaaggagagcggcaacggcaccctgagcagagcctgcctggacgacagctacgccagcggcgagggcctgaagagaagcgccctgagcagcagcctgagagacctgagcgaggccggcaagagaggcagaagaagcagcgccggcagcctggagagcaacgtggagttccagcccttcgagcccctgcagcccagcgtgctgtgcagctag

SEQ ID NO: 9538 - DNA, 711 bp, synthetic construct
  source 1..711: mol_type = other DNA; note = Synthetic coding sequence
atggccagcctggacagagtgaaggtgctggtgctgggcgacagcggcgtgggcaagagcagcctggtgcacctgctgtgccagaaccaggtgctgggcaaccccagctggaccgtgggctgcagcgtggacgtgagagtgcacgactacaaggagggcacccccgaggagaagacctactacatcgagctgtgggacgtgggcggcagcgtgggcagcgccagcagcgtgaagagcaccagagccgtgttctacaacagcgtgaacggcatcatcttcgtgcacgacctgaccaacaagaagagcagccagaacctgagaagatggagcctggaggccctgaacagagacctggtgcccaccggcgtgctggtgaccaacggcgactacgaccaggagcagttcgccgacaaccagatccccctgctggtgatcggcaccaagctggaccagatccacgagaccaagagacacgaggtgctgaccagaaccgccttcctggccgaggacttcaaccccgaggagatcaacctggactgcaccaaccccagatacctggccgccggcagcagcaacgccgtgaagctgagcagattcttcgacaaggtgatcgagaagagatacttcctgagagagggcaaccagatccccggcttccccgacagaaagagattcggcgccggcaccctgaagagcctgcactacgactag

SEQ ID NO: 9539 - DNA, 2784 bp, synthetic construct
  source 1..2784: mol_type = other DNA; note = Synthetic coding sequence
atgcagagcatcctgtaccacggcctgatcagagaccaggcctgcagaagacagaccgactactggcagttcgtgaaggacatcagatggctgagcccccacagcgccctgcacgtggagaagttcatcagcgtgcacgagaacgaccagagcagcgccgacggcgccagcgagagagccgtggccgagctgtggctgcagcacagcctgcagtaccactgcctgagcgcccagctgagacccctgctgggcgacagacagtacatcagaaagttctacaccgacgccgccttcctgctgagcgacgcccacgtgaccgccatgctgcagtgcctggaggccgtggagcagaacaaccccagactgctggcccagatcgacgccagcatgttcgccagaaagcacgagagccccctgctggtgaccaagagccagagcctgaccgccctgcccagcagcacctacaccccccccaacagctacgcccagcacagctacttcggcagcttcagcagcctgcaccagagcgtgcccaacaacggcagcgagagaagaagcaccagcttccccctgagcggcccccccagaaagccccaggagagcagaggccacgtgagccccgccgaggaccagaccatccaggccccccccgtgagcgtgagcgccctggccagagacagccccctgacccccaacgagatgagcagcagcaccctgaccagccccatcgaggccagctgggtgagcagccagaacgacagccccggcgacgccagcgagggccccgagtacctggccatcggcaacctggaccccagaggcagaaccgccagctgccagagccacagcagcaacgccgagagcagcagcagcaacctgttcagcagcagcagcagccagaagcccgacagcgccgccagcagcctgggcgaccaggagggcggcggcgagagccagctgagcagcgtgctgagaagaagcagcttcagcgagggccagaccctgaccgtgaccagcggcgccaagaagagccacatcagaagccacagcgacaccagcatcgccagcagaggcgcccccggcggccccagaaacatcaccatcatcgtggaggaccccatcgccgagagctgcaacgacaaggccaagctgagaggccccctgccctacagcggccagagcagcgaggtgagcacccccagcagcctgtacatggagtacgagggcggcagatacctgtgcagcggcgagggcatgttcagaagacccagcgagggccagagcctgatcagctacctgagcgagcaggacttcggcagctgcgccgacctggagaaggagaacgcccacttcagcatcagcgagagcctgatcgccgccatcgagctgatgaagtgcaacatgatgagccagtgcctggaggaggaggaggtggaggaggaggacagcgacagagagatccaggagctgaagcagaagatcagactgagaagacagcagatcagaaccaagaacctgctgcccatgtaccaggaggccgagcacggcagcttcagagtgaccagcagcagcagccagttcagcagcagagacagcgcccagctgagcgacagcggcagcgccgacgaggtggacgagttcgagatccaggacgccgacatcagaagaaacaccgccagcagcagcaagagcttcgtgagcagccagagcttcagccactgcttcctgcacagcaccagcgccgaggccgtggccatgggcctgctgaagcagttcgagggcatgcagctgcccgccgccagcgagctggagtggctggtgcccgagcacgacgccccccagaagctgctgcccatccccgacagcctgcccatcagccccgacgacggccagcacgccgacatctacaagctgagaatcagagtgagaggcaacctggagtgggccccccccagaccccagatcatcttcaacgtgcaccccgcccccaccagaaagatcgccgtggccaagcagaactacagatgcgccggctgcggcatcagaaccgaccccgactacatcaagagactgagatactgcgagtacctgggcaagtacttctgccagtgctgccacgagaacgcccagatggccatccccagcagagtgctgagaaagtgggacttcagcaagtactacgtgagcaacttcagcaaggacctgctgatcaagatctggaacgaccccctgttcaacgtgcaggacatcaacagcgccctgtacagaaaggtgaagctgctgaaccaggtgagactgctgagagtgcagctgtgccacatgaagaacatgttcaagacctgcagactggccaaggagctgctggacagcttcgacaccgtgcccggccacctgaccgaggacctgcacctgtacagcctgaacgacctgaccgccaccagaaagggcgagctgggccccagactggccgagctgaccagagccggcgccacccacgtggagagatgcatgctgtgccaggccaagggcttcatctgcgagttctgccagaacgaggacgacatcatcttccccttcgagctgcacaagtgcagaacctgcgaggagtgcaaggcctgctaccacaaggcctgcttcaagagcggcagctgccccagatgcgagagactgcaggccagaagagaggccctggccagacagagcctggagagctacctgagcgactacgaggaggagcccgccgaggccctggccctggaggccgccgtgctggaggccacctag

SEQ ID NO: 9540 - DNA, 300 bp, synthetic construct
  source 1..300: mol_type = other DNA; note = Synthetic coding sequence
atggccagcgccagcgccagaggcaaccaggacaaggacgcccacttccccccccccagcaagcagagcctgctgttctgccccaagagcaagctgcacatccacagagccgagatcagcaagatcatgagagagtgccaggaggagagcttctggaagagagccctgcccttcagcctggtgagcatgctggtgacccagggcctggtgtaccagggctacctggccgccaacagcagattcggcagcctgcccaaggtggccagaaccgccagcctgcccgtgagaaacgccaagtag

SEQ ID NO: 9541 - DNA, 786 bp, synthetic construct
  source 1..786: mol_type = other DNA; note = Synthetic coding sequence
atggtggtgctgagcgtgcccgccgaggtgaccgtgatcctgctggacatcgagggcaccaccacccccatcgccttcgtgaaggacatcctgttcccctacatcgaggagaacgtgaaggagtacctgcagacccactgggaggaggaggagtgccagcaggacgtgagcctgctgagaaagcaggccgaggaggacgcccacctggacggcgccgtgcccatccccgccgccagcggcaacggcgtggacgacctgcagcagatgatccaggccgtggtggacaacgtgtgctggcagatgagcctggacagaaagaccaccgccctgaagcagctgcagggccacatgtggagagccgccttcaccgccggcagaatgaaggccgagttcttcgccgacgtggtgcccgccgtgagaaagtggagagaggccggcatgaaggtgtacatctacagcagcggcagcgtggaggcccagaagctgctgttcggccacagcaccgagggcgacatcctggagctggtggacggccacttcgacaccaagatcggccacaaggtggagagcgagagctacagaaagatcgccgacagcatcggctgcagcaccaacaacatcctgttcctgaccgacgtgaccagagaggccagcgccgccgaggaggccgacgtgcacgtggccgtggtggtgagacccggcaacgccggcctgaccgacgacgagaagacctactacagcctgatcaccagcttcagcgagctgtacctgcccagcagcacctag

SEQ ID NO: 9542 - DNA, 1188 bp, synthetic construct
  source 1..1188: mol_type = other DNA; note = Synthetic coding sequence
atggccgaggacggcctgcccaagatctacagccacccccccaccgagagcagcaagacccccaccgccgccaccatcttcttcggcgccgacaacgccatccccaagagcgagaccaccatcaccagcgagggcgaccacgtgaccagcgtgaacgagtacatgctggagagcgacttcagcaccaccaccgacaacaagctgaccgccaagaaggagaagctgaagagcgaggacgacatgggcaccgacttcatcaagagcaccacccacctgcagaaggagatcaccagcctgaccggcaccaccaacagcatcaccagagacagcatcaccgagcacttcatgcccgtgaagatcggcaacatcagcagccccgtgaccaccgtgagcctgatcgacttcagcaccgacatcgccaaggaggacatcctgctggccaccatcgacaccggcgacgccgagatcagcatcaccagcgaggtgagcggcaccctgaaggacagcagcgccggcgtggccgacgcccccgccttccccagaaagaaggacgaggccgacatgagcaactacaacagcagcatcaagagcaacgtgcccgccgacgaggccgtgcaggtgaccgacagcaccatccccgaggccgagatcccccccgcccccgaggagagcttcaccaccatccccgacatcaccgccctggaggaggagaagatcaccgagatcgacctgagcgtgctggaggacgacaccagcgccgtggccaccctgaccgacagcgacgagaagttcatcaccgtgttcgagctgaccaccagcgccgagaaggacaaggacaagagagaggacaccctgctgaccgacgaggagaccaccgagggcgccagcatctggatggagagagacaccgccaacgaggccgagacccacagcgtgctgctgaccgccgtggagagcagatacgacttcgtggtgcccgccagcatcgccaccaacctggtggaggagagcagcaccgaggaggacctgagcgagaccgacaacaccgagaccgtgcccaagatcaccgagcccttcagcggcaccaccagcgtgctggacacccccgactacaaggaggacaccagcaccaccgagaccgacatcttcgagctgctgaaggaggagcccgacgagttcatgatctag

SEQ ID NO: 9543 - DNA, 921 bp, synthetic construct
  source 1..921: mol_type = other DNA; note = Synthetic coding sequence
atgtacttctgctggggcgccgacagcagagagctgcagagaagaagaaccgccggcagccccggcgccgagctgctgcaggccgccagcggcgagagacacagcctgctgctgctgaccaaccacagagtgctgagctgcggcgacaacagcagaggccagctgggcagaagaggcgcccagagaggcgagctgcccgagcccatccaggccctggagaccctgatcgtggacctggtgagctgcggcaaggagcacagcctggccgtgtgccacaagggcagagtgttcgcctggggcgccggcagcgagggccagctgggcatcggcgagttcaaggagatcagcttcacccccaagaagatcatgaccctgaacgacatcaagatcatccaggtgagctgcggccactaccacagcctggccctgagcaaggacagccaggtgttcagctggggcaagaacagccacggccagctgggcctgggcaaggagttccccagccaggccagcccccagagagtgagaagcctggagggcatccccctggcccaggtggccgccggcggcgcccacagcttcgccctgagcctgtgcggcaccagcttcggctggggcagcaacagcgccggccagctggccctgagcggcagaaacgtgcccgtgcagagcaacaagcccctgagcgtgggcgccctgaagaacctgggcgtggtgtacatcagctgcggcgacgcccacaccgccgtgctgacccaggacggcaaggtgttcaccttcggcgacaacagaagcggccagctgggctacagccccacccccgagaagagaggcccccagctggtggagagaatcgacggcctggtgagccagatcgactgcggcagaaacagcaagcacggcttcatgaccttcttctag

SEQ ID NO: 9544 - DNA, 909 bp, synthetic construct
  source 1..909: mol_type = other DNA; note = Synthetic coding sequence
atgggcaactgctgctggacccagtgcttcggcctgctgagaaaggaggccggcagactgcagagagtgggcggcggcggcggcagcaagtacttcagaacctgcagcagaggcgagcacctgaccatcgagttcgagaacctggtggagagcgacgagggcgagagccccggcagcagccacagacccctgaccgaggaggagatcgtggacctgagagagagacactacgacagcatcgccgagaagcagaaggacctggacaagaagatccagaaggagctggccctgcaggaggagaagctgagactggaggaggaggccctgtacgccgcccagagagaggccgccagagccgccaagcagagaaagctgctggagcaggagagacagagaatcgtgcagcagtaccaccccagcaacaacggcgagtaccagagcagcggccccgaggacgacttcgagagctgcctgagaaacatgaagagccagtacgaggtgttcagaagcagcagactgagcagcgacgccaccgtgctgacccccaacaccgagagcagctgcgacctgatgaccaagaccaagagcaccagcggcaacgacgacagcaccagcctggacctggagtgggaggacgaggagggcatgaacagaatgctgcccatgagagagagaagcaagaccgaggaggacatcctgagagccgccctgaagtacagcaacaagaagaccggcagcaaccccaccagcgccagcgacgacagcaacggcctggagtgggagaacgacttcgtgagcgccgagatggacgacaacggcaacagcgagtacagcggcttcgtgaaccccgtgctggagctgagcgacagcggcatcagacacagcgacaccgaccagcagaccagatag

SEQ ID NO: 9545 - DNA, 1641 bp, synthetic construct
  source 1..1641: mol_type = other DNA; note = Synthetic coding sequence
atggccaccctggtggtgaacaagctgggcgccggcgtggacagcggcagacagggcagcagaggcaccgccgtggtgaaggtgctggagtgcggcgtgtgcgaggacgtgttcagcctgcagggcgacaaggtgcccagactgctgctgtgcggccacaccgtgtgccacgactgcctgaccagactgcccctgcacggcagagccatcagatgccccttcgacagacaggtgaccgacctgggcgacagcggcgtgtggggcctgaagaagaacttcgccctgctggagctgctggagagactgcagaacggccccatcggccagtacggcgccgccgaggagagcatcggcatcagcggcgagagcatcatcagatgcgacgaggacgaggcccacctggccagcgtgtactgcaccgtgtgcgccacccacctgtgcagcgagtgcagccaggtgacccacagcaccaagaccctggccaagcacagaagagtgcccctggccgacaagccccacgagaagaccatgtgcagccagcaccaggtgcacgccatcgagttcgtgtgcctggaggagggctgccagaccagccccctgatgtgctgcgtgtgcaaggagtacggcaagcaccagggccacaagcacagcgtgctggagcccgaggccaaccagatcagagccagcatcctggacatggcccactgcatcagaaccttcaccgaggagatcagcgactacagcagaaagctggtgggcatcgtgcagcacatcgagggcggcgagcagatcgtggaggacggcatcggcatggcccacaccgagcacgtgcccggcaccgccgagaacgccagaagctgcatcagagcctacttctacgacctgcacgagaccctgtgcagacaggaggagatggccctgagcgtggtggacgcccacgtgagagagaagctgatctggctgagacagcagcaggaggacatgaccatcctgctgagcgaggtgagcgccgcctgcctgcactgcgagaagaccctgcagcaggacgactgcagagtggtgctggccaagcaggagatcaccagactgctggagaccctgcagaagcagcagcagcagttcaccgaggtggccgaccacatccagctggacgccagcatccccgtgaccttcaccaaggacaacagagtgcacatcggccccaagatggagatcagagtggtgaccctgggcctggacggcgccggcaagaccaccatcctgttcaagctgaagcaggacgagttcatgcagcccatccccaccatcggcttcaacgtggagaccgtggagtacaagaacctgaagttcaccatctgggacgtgggcggcaagcacaagctgagacccctgtggaagcactactacctgaacacccaggccgtggtgttcgtggtggacagcagccacagagacagaatcagcgaggcccacagcgagctggccaagctgctgaccgagaaggagctgagagacgccctgctgctgatcttcgccaacaagcaggacgtggccggcgccctgagcgtggaggagatcaccgagctgctgagcctgcacaagctgtgctgcggcagaagctgcttcagcgacaacatgtag

SEQ ID NO: 9546 - DNA, 609 bp, synthetic construct
  source 1..609: mol_type = other DNA; note = Synthetic coding sequence
atggccgtgcccgccgccctgatcctgagagagagccccagcatgaagaaggccgtgagcctgatcaacgccatcgacaccggcagattccccagactgctgaccagaatcctgcagaagctgcacctgaaggccgagagcagcttcagcgaggaggaggaggagaagctgcaggccgccttcagcctggagaagcaggacctgcacctggtgctggagaccatcagcttcatcctggagcaggccgtgtaccacaacgtgaagcccgccgccctgcagcagcagctggagaacatccacctgagacaggacaaggccgaggccttcgtgaacacctggagcagcatgggccaggagaccgtggagaagttcagacagagaatcctggccccctgcaagctggagaccgtgggctggcagctgaacctgcagatggcccacagcgcccaggccaagctgaagagcccccaggccgtgctgcagctgggcgtgaacaacgaggacagcaagagcctggagaaggtgctggtggagttcagccacaaggagctgttcgacttctacaacaagctggagaccatccaggcccagctggacagcctgacctag

SEQ ID NO: 9547 - DNA, 1521 bp, synthetic construct
  source 1..1521: mol_type = other DNA; note = Synthetic coding sequence
atggaggccgacatcatcaccaacctgagatgcagactgaaggaggccgaggaggagagactgaaggccgcccagtacggcctgcagctggtggagagccagaacgagctgcagaaccagctggacaagtgcagaaacgagatgatgaccatgaccgagagctacgagcaggagaagtacaccctgcagagagaggtggagctgaagagcagaatgctggagagcctgagctgcgagtgcgaggccatcaagcagcagcagaagatgcacctggagaagctggaggagcagctgagcagaagccacggccaggaggtgaacgagctgaagaccaagatcgagaagctgaaggtggagctggacgaggccagactgagcgagaagcagctgaagcaccaggtggaccaccagaaggagctgctgagctgcaagagcgaggagctgagagtgatgagcgagagagtgcaggagagcatgagcagcgagatgctggccctgcagatcgagctgaccgagatggagagcatgaaggtgaagtaccagagcctgaagaagcagaacgtgttcaacagagagcagatgcagagaatgaagctgcagatcgccaccctgctgcagatgaagggcagccagaccgagttcgagcagcaggagagactgctggccatgctggagcagaagaacggcgagatcaagcacctgctgggcgagatcagaaacctggagaagttcaagaacctgtacgacagcatggagagcaagcccagcgtggacagcggcaccctggaggacaacacctactacaccgacctgctgcagatgaagctggacaacctgaacaaggagatcgagagcaccaagggcgagctgagcatccagagaatgaaggccctgttcgagagccagagagccctggacatcgagagaaagctgttcgccaacgagagatgcctgcagctgagcgagagcgagaacatgaagctgagagccaagctggacgagctgaagctgaagtacgagcccgaggagaccgtggaggtgcccgtgctgaagaagagaagagaggtgctgcccgtggacatcaccaccgccaaggacgcctgcgtgaacaacagcgccctgggcggcgaggtgtacagactgcccccccagaaggaggagacccagagctgccccaacagcctggaggacaacaacctgcagctggagaagagcgtgagcatctacacccccgtggtgagcctgagcccccacaagaacctgcccgtggacatgcagctgaagaaggagaagaagtgcgtgaagctgatcggcgtgcccgccgacgccgaggccctgagcgagagaagcggcaacacccccaacagccccagactggccgccgagagcaagctgcagaccgaggtgaaggagggcaaggagaccagcagcaagctggagaaggagacctgcaagaagctgcaccccatcctgtacgtgagcagcaagagcacccccgagacccagtgcccccagcagtag

SEQ ID NO: 9548 - DNA, 1842 bp, synthetic construct
  source 1..1842: mol_type = other DNA; note = Synthetic coding sequence
atggccaccatccccgactggaagctgcagctgctggccagaagaagacaggaggaggccagcgtgagaggcagagagaaggccgagagagagagactgagccagatgcccgcctggaagagaggcctgctggagagaagaagagccaagctgggcctgagccccggcgagcccagccccgtgctgggcaccgtggaggccggcccccccgaccccgacgagagcgccgtgctgctggaggccatcggccccgtgcaccagaacagattcatcagacaggagagacagcagcagcagcagcagcagcagagaagcgaggagctgctggccgagagaaagcccggccccctggaggccagagagagaagacccagccccggcgagatgagagaccagagccccaagggcagagagagcagagaggagagactgagccccagagagaccagagagagaagactgggcatcggcggcgcccaggagctgagcctgagacccctggaggccagagactggagacagagccccggcgaggtgggcgacagaagcagcagactgagcgaggcctggaagtggagactgagccccggcgagacccccgagagaagcctgagactggccgagagcagagagcagagccccagaagaaaggaggtggagagcagactgagccccggcgagagcgcctaccagaagctgggcctgaccgaggcccacaagtggagacccgacagcagagagagccaggagcagagcctggtgcagctggaggccaccgagtggagactgagaagcggcgaggagagacaggactacagcgaggagtgcggcagaaaggaggagtggcccgtgcccggcgtggcccccaaggagaccgccgagctgagcgagaccctgaccagagaggcccagggcaacagcagcgccggcgtggaggccgccgagcagagacccgtggaggacggcgagagaggcatgaagcccaccgagggctggaagtggaccctgaacagcggcaaggccagagagtggacccccagagacatcgaggcccagacccagaagcccgagccccccgagagcgccgagaagctgctggagagccccggcgtggaggccggcgagggcgaggccgagaaggaggaggccggcgcccagggcagacccctgagagccctgcagaactgctgcagcgtgcccagccccctgccccccgaggacgccggcaccggcggcctgagacagcaggaggaggaggccgtggagctgcagccccccccccccgcccccctgagcccccccccccccgcccccaccgccccccagccccccggcgaccccctgatgagcagactgttctacggcgtgaaggccggccccggcgtgggcgcccccagaagaagcggccacaccttcaccgtgaaccccagaagaagcgtgccccccgccacccccgccacccccaccagccccgccaccgtggacgccgccgtgcccggcgccggcaagaagagataccccaccgccgaggagatcctggtgctgggcggctacctgagactgagcagaagctgcctggccaagggcagccccgagagacaccacaagcagctgaagatcagcttcagcgagaccgccctggagaccacctaccagtaccccagcgagagcagcgtgctggaggagctgggccccgagcccgaggtgcccagcgcccccaacccccccgccgcccagcccgacgacgaggaggacgaggaggagctgctgctgctgcagcccgagctgcagggcggcctgagaaccaaggccctgatcgtggacgagagctgcagaagatag

SEQ ID NO: 9549 - DNA, 654 bp, synthetic construct
  source 1..654: mol_type = other DNA; note = Synthetic coding sequence
atgagctggacctgccccagatgccagcagcccgtgttcttcgccgagaaggtgagcagcctgggcaagaactggcacagattctgcctgaagtgcgagagatgccacagcatcctgagccccggcggccacgccgagcacaacggcagaccctactgccacaagccctgctacggcgccctgttcggccccagaggcgtgaacatcggcggcgtgggcagctacctgtacaacccccccacccccagccccggctgcaccacccccctgagccccagcagcttcagcccccccagacccagaaccggcctgccccagggcaagaagagccccccccacatgaagaccttcaccggcgagaccagcctgtgccccggctgcggcgagcccgtgtacttcgccgagaaggtgatgagcctgggcagaaactggcacagaccctgcctgagatgccagagatgccacaagaccctgaccgccggcagccacgccgagcacgacggcgtgccctactgccacgtgccctgctacggctacctgttcggccccaagggcggccagccccaccccagacactgggacggcatgtacatgcccgaggtgtggcacgtgcacggcctgtgggtgtgcgtggacaacttcccctgcggctag

SEQ ID NO: 9550 - DNA, 1503 bp, synthetic construct
  source 1..1503: mol_type = other DNA; note = Synthetic coding sequence
atgaaccagagaagaagcgagagcagacccggcaaccacagactgcaggcctacgccgagcccggcaagggcgacagcggcggcgccggccccctgagcggcagcgccagaagaggcagaggcggcggcggcgccatcagagtgagaagaccctgctggagcggcggcgccggcagaggcggcggccccgcctgggccgtgagactgcccaccgtgaccgccggctggacctggcccgccctgagaaccctgagcagcctgagagccggccccagcgagccccacagccccggcagaagaccccccagagccggcagacccctgtgccaggccgacccccagcccggcaaggccgccagaagaagcctggagcccgaccccgcccagaccggccccagacccgccagagccgccggcatgagcgaggccagaaagggccccgacgaggccgaggagagccagtacgacagcggcatcgagagcctgagaagcctgagaagcctgcccgagagcaccagcgcccccgccagcggccccagcgacggcagcccccagccctgcacccacccccccggccccgtgaaggagccccaggagaaggaggacgccgacggcgagagagccgacagcacctacggcagcagcagcctgacctacaccctgagcctgctgggcggccccgaggccgaggaccccgcccccagactgcccctgccccacgtgggcgccctgagcccccagcagctggaggccctgacctacatcagcgaggacggcgacaccctggtgcacctggccgtgatccacgaggcccccgccgtgctgctgtgctgcctggccctgctgccccaggaggtgctggacatccagaacaacctgtaccagaccgccctgcacctggccgtgcacctggaccagcccggcgccgtgagagccctggtgctgaagggcgccagcagagccctgcaggacagacacggcgacaccgccctgcacgtggcctgccagagacagcacctggcctgcgccagatgcctgctggagggcagacccgagcccggcagaggcaccagccacagcctggacctgcagctgcagaactggcagggcctggcctgcctgcacatcgccaccctgcagaagaaccagcccctgatggagctgctgctgagaaacggcgccgacatcgacgtgcaggagggcaccagcggcaagaccgccctgcacctggccgtggagacccaggagagaggcctggtgcagttcctgctgcaggccggcgcccaggtggacgccagaatgctgaacggctgcacccccctgcacctggccgccggcagaggcctgatgggcatcagcagcaccctgtgcaaggccggcgccgacagcctgctgagaaacgtggaggacgagaccccccaggacctgaccgaggagagcctggtgctgctgcccttcgacgacctgaagatcagcggcaagctgctgctgtgcaccgactag

SEQ ID NO: 9551 - DNA, 1881 bp, synthetic construct
  source 1..1881: mol_type = other DNA; note = Synthetic coding sequence
atggagggccccagagagaaccaggaccccccccccagaagcctggccagacacctgagcgacgccgacagactgagaaaggtgatccaggagctggtggacaccgagaagagctacgtgaaggacctgagctgcctgttcgagctgtacctggagcccctgcagaacgagaccttcctgacccaggacgagatggagagcctgttcggcagcctgcccgagatgctggagttccagaaggtgttcctggagaccctggaggacggcatcagcgccagcagcgacttcaacaccctggagacccccagccagttcagaaagctgctgttcagcctgggcggcagcttcctgtactacgccgaccacttcaagctgtacagcggcttctgcgccaaccacatcaaggtgcagaaggtgctggagagagccaagaccgacaaggccttcaaggccttcctggacgccagaaaccccaccaagcagcacagcagcaccctggagagctacctgatcaagcccgtgcagagagtgctgaagtaccccctgctgctgaaggagctggtgagcctgaccgaccaggagagcgaggagcactaccacctgaccgaggccctgaaggccatggagaaggtggccagccacatcaacgagatgcagaagatctacgaggactacggcaccgtgttcgaccagctggtggccgagcagagcggcaccgagaaggaggtgaccgagctgagcatgggcgagctgctgatgcacagcaccgtgagctggctgaaccccttcctgagcctgggcaaggccagaaaggacctggagctgaccgtgttcgtgttcaagagagccgtgatcctggtgtacaaggagaactgcaagctgaagaagaagctgcccagcaacagcagacccgcccacaacagcaccgacctggaccccttcaagttcagatggctgatccccatcagcgccctgcaggtgagactgggcaaccccgccggcaccgagaacaacagcatctgggagctgatccacaccaagagcgagatcgagggcagacccgagaccatcttccagctgtgctgcagcgacagcgagagcaagaccaacatcgtgaaggtgatcagaagcatcctgagagagaacttcagaagacacatcaagtgcgagctgcccctggagaagacctgcaaggacagactggtgcccctgaagaacagagtgcccgtgagcgccaagctggccagcagcagaagcctgaaggtgctgaagaacagcagcagcaacgagtggaccggcgagaccggcaagggcaccctgctggacagcgacgagggcagcctgagcagcggcacccagagcagcggctgccccaccgccgagggcagacaggacagcaagagcaccagccccggcaagtacccccaccccggcctggccgacttcgccgacaacctgatcaaggagagcgacatcctgagcgacgaggacgacgaccacagacagaccgtgaagcagggcagccccaccaaggacatcgagatccagttccagagactgagaatcagcgaggaccccgacgtgcaccccgaggccgagcagcagcccggccccgagagcggcgagggccagaagggcggcgagcagcccaagctggtgagaggccacttctgccccatcaagagaaaggccaacagcaccaagagagacagaggcaccctgctgaaggcccagatcagacaccagagcctggacagccagagcgagaacgccaccatcgacctgaacagcgtgctggagagagagttcagcgtgcagagcctgaccagcgtggtgagcgaggagtgcttctacgagaccgagagccacggcaagagctag

SEQ ID NO: 9552 - DNA, 1596 bp, synthetic construct
  source 1..1596: mol_type = other DNA; note = Synthetic coding sequence
atggccgccgtgaagaccctgaaccccaaggccgaggtggccagagcccaggccgccctggccgtgaacatcagcgccgccagaggcctgcaggacgtgctgagaaccaacctgggccccaagggcaccatgaagatgctggtgagcggcgccggcgacatcaagctgaccaaggacggcaacgtgctgctgcacgagatgcagatccagcaccccaccgccagcctgatcgccaaggtggccaccgcccaggacgacatcaccggcgacggcaccaccagcaacgtgctgatcatcggcgagctgctgaagcaggccgacctgtacatcagcgagggcctgcaccccagaatcatcaccgagggcttcgaggccgccaaggagaaggccctgcagttcctggaggaggtgaaggtgagcagagagatggacagagagaccctgatcgacgtggccagaaccagcctgagaaccaaggtgcacgccgagctggccgacgtgctgaccgaggccgtggtggacagcatcctggccatcaagaagcaggacgagcccatcgacctgttcatgatcgagatcatggagatgaagcacaagagcgagaccgacaccagcctgatcagaggcctggtgctggaccacggcgccagacaccccgacatgaagaagagagtggaggacgcctacatcctgacctgcaacgtgagcctggagtacgagaagaccgaggtgaacagcggcttcttctacaagagcgccgaggagagagagaagctggtgaaggccgagagaaagttcatcgaggacagagtgaagaagatcatcgagctgaagagaaaggtgtgcggcgacagcgacaagggcttcgtggtgatcaaccagaagggcatcgaccccttcagcctggacgccctgagcaaggagggcatcgtggccctgagaagagccaagagaagaaacatggagagactgaccctggcctgcggcggcgtggccctgaacagcttcgacgacctgagccccgactgcctgggccacgccggcctggtgtacgagtacaccctgggcgaggagaagttcaccttcatcgagaagtgcaacaaccccagaagcgtgaccctgctgatcaagggccccaacaagcacaccctgacccagatcaaggacgccgtgagagacggcctgagagccgtgaagaacgccatcgacgacggctgcgtggtgcccggcgccggcgccgtggaggtggccatggccgaggccctgatcaagcacaagcccagcgtgaagggcagagcccagctgggcgtgcaggccttcgccgacgccctgctgatcatccccaaggtgctggcccagaacagcggcttcgacctgcaggagaccctggtgaagatccaggccgagcacagcgagagcggccagctggtgggcgtggacctgaacaccggcgagcccatggtggccgccgaggtgggcgtgtgggacaactactgcgtgaagaagcagctgctgcacagctgcaccgtgatcgccaccaacatcctgctggtggacgagatcatgagagccggcatgagcagcctgaagggctag

SEQ ID NO: 9553 - DNA, 666 bp, synthetic construct
  source 1..666: mol_type = other DNA; note = Synthetic coding sequence
atgagcgccttcggccacgacgaggcctggatggaggccggcggcttcggcctggaggccgccgagagaaccgagtaccagagcctgtgcaagagcaagctgctgttcctgggcgagcagagcggcaagaccagcatcatcagcagattcatgtacaacagcttcggctgcgcctgccaggccaccgtgggcatcgacttcctgagcaagaccatgtacctggaggaccagatcgtgcagctgcagctgtgggacaccgccggccaggagagattccacagcctgatccccagctacatcagagacagcaccatcgccgtggtggtgtacgacatcaccaacatcaacagcttcaaggagaccgacaagtgggtggagcacgtgagagccgagagaggcgacgacgtggtgatcatgctgctgggcaacaagatcgacctggacaacaagagacaggtgaccgccgagcagggcgaggagaagagcagaaacctgaacgtgatgttcatcgagaccagcgccaagaccggctacaacgtgaagaagctgttcagaagagtggccagcgccctgctgagcaccagaaccagccccccccccaaggagggcaccgtggagatcgagctggagagcttcgaggagagcggcaacagaagctactgctag

SEQ ID NO: 9554 - DNA, 6222 bp, synthetic construct
  source 1..6222: mol_type = other DNA; note = Synthetic coding sequence
atggccgaggtgagaaagttcaccaagagactgagcaagcccggcaccgccgccgagctgagacagagcgtgagcgaggccgtgagaggcagcgtggtgctggagaaggccaaggtggtggagcccctggactacgagaacgtgatcgcccagagaaagacccagatctacagcgaccccctgagagacctgctgatgttccccatggaggacatcagcatcagcgtgatcggcagacagagaagaaccgtgcagagcaccgtgcccgaggacgccgagaagagagcccagagcctgttcgtgaaggagtgcatcaagacctacagcaccgactggcacgtggtgaactacaagtacgaggacttcagcggcgacttcagaatgctgccctgcaagagcctgagacccgagaagatccccaaccacgtgttcgagatcgacgaggactgcgagaaggacgaggacagcagcagcctgtgcagccagaagggcggcgtgatcaagcagggctggctgcacaaggccaacgtgaacagcaccatcaccgtgaccatgaaggtgttcaagagaagatacttctacctgacccagctgcccgacggcagctacatcctgaacagctacaaggacgagaagaacagcaaggagagcaagggctgcatctacctggacgcctgcatcgacgtggtgcagtgccccaagatgagaagacacgccttcgagctgaagatgctggacaagtacagccactacctggccgccgagaccgagcaggagatggaggagtggctgatcaccctgaagaagatcatccagatcaacaccgacagcctggtgcaggagaagaaggagaccgtggagaccgcccaggacgacgagaccagcagccagggcaaggccgagaacatcatggccagcctggagagaagcatgcaccccgagctgatgaagtacggcagagagaccgagcagctgaacaagctgagcagaggcgacggcagacagaacctgttcagcttcgacagcgaggtgcagagactggacttcagcggcatcgagcccgacatcaagcccttcgaggagaagtgcaacaagagattcctggtgaactgccacgacctgaccttcaacatcctgggccagatcggcgacaacgccaagggcccccccaccaacgtggagcccttcttcatcaacctggccctgttcgacgtgaagaacaactgcaagatcagcgccgacttccacgtggacctgaacccccccagcgtgagagagatgctgtggggcagcagcacccagctggccagcgacggcagccccaagggcagcagccccgagagctacatccacggcatcgccgagagccagctgagatacatccagcagggcatcttcagcgtgaccaacccccaccccgagatcttcctggtggccagaatcgagaaggtgctgcagggcaacatcacccactgcgccgagccctacatcaagaacagcgaccccgtgaagaccgcccagaaggtgcacagaaccgccaagcaggtgtgcagcagactgggccagtacagaatgcccttcgcctgggccgccagacccatcttcaaggacacccagggcagcctggacctggacggcagattcagccccctgtacaagcaggacagcagcaagctgagcagcgaggacatcctgaagctgctgagcgagtacaagaagcccgagaagaccaagctgcagatcatccccggccagctgaacatcaccgtggagtgcgtgcccgtggacctgagcaactgcatcaccagcagctacgtgcccctgaagcccttcgagaagaactgccagaacatcaccgtggaggtggaggagttcgtgcccgagatgaccaagtactgctaccccttcaccatctacaagaaccacctgtacgtgtaccccctgcagctgaagtacgacagccagaagaccttcgccaaggccagaaacatcgccgtgtgcgtggagttcagagacagcgacgagagcgacgccagcgccctgaagtgcatctacggcaagcccgccggcagcgtgttcaccaccaacgcctacgccgtggtgagccaccacaaccagaaccccgagttctacgacgagatcaagatcgagctgcccatccacctgcaccagaagcaccacctgctgttcaccttctaccacgtgagctgcgagatcaacaccaagggcaccaccaagaagcaggacaccgtggagacccccgtgggcttcgcctgggtgcccctgctgaaggacggcagaatcatcaccttcgagcagcagctgcccgtgagcgccaacctgccccccggctacctgaacctgaacgacgccgagagcagaagacagtgcaacgtggacatcaagtgggtggacggcgccaagcccctgctgaagatcaagagccacctggagagcaccatctacacccaggacctgcacgtgcacaagttcttccaccactgccagctgatccagagcggcagcaaggaggtgcccggcgagctgatcaagtacctgaagtgcctgcacgccatggagatccaggtgatgatccagttcctgcccgtgatcctgatgcagctgttcagagtgctgaccaacatgacccacgaggacgacgtgcccatcaactgcaccatggtgctgctgcacatcgtgagcaagtgccacgaggagggcctggacagctacctgagaagcttcatcaagtacagcttcagacccgagaagcccagcgccccccaggcccagctgatccacgagaccctggccaccaccatgatcgccatcctgaagcagagcgccgacttcctgagcatcaacaagctgctgaagtacagctggttcttcttcgagatcatcgccaagagcatggccacctacctgctggaggagaacaagatcaagctgcccagaggccagagattccccgagacctaccaccacgtgctgcacagcctgctgctggccatcatcccccacgtgaccatcagatacgccgagatccccgacgagagcagaaacgtgaactacagcctggccagcttcctgaagagatgcctgaccctgatggacagaggcttcatcttcaacctgatcaacgactacatcagcggcttcagccccaaggaccccaaggtgctggccgagtacaagttcgagttcctgcagaccatctgcaaccacgagcactacatccccctgaacctgcccatggccttcgccaagcccaagctgcagagagtgcaggacagcaacctggagtacagcctgagcgacgagtactgcaagcaccacttcctggtgggcctgctgctgagagagaccagcatcgccctgcaggacaactacgagatcagatacaccgccatcagcgtgatcaagaacctgctgatcaagcacgccttcgacaccagataccagcacaagaaccagcaggccaagatcgcccagctgtacctgcccttcgtgggcctgctgctggagaacatccagagactggccggcagagacaccctgtacagctgcgccgccatgcccaacagcgccagcagagacgagttcccctgcggcttcaccagccccgccaacagaggcagcctgagcaccgacaaggacaccgcctacggcagcttccagaacggccacggcatcaagagagaggacagcagaggcagcctgatccccgagggcgccaccggcttccccgaccagggcaacaccggcgagaacaccagacagagcagcaccagaagcagcgtgagccagtacaacagactggaccagtacgagatcagaagcctgctgatgtgctacctgtacatcgtgaagatgatcagcgaggacaccctgctgacctactggaacaaggtgagcccccaggagctgatcaacatcctgatcctgctggaggtgtgcctgttccacttcagatacatgggcaagagaaacatcgccagagtgcacgacgcctggctgagcaagcacttcggcatcgacagaaagagccagaccatgcccgccctgagaaacagaagcggcgtgatgcaggccagactgcagcacctgagcagcctggagagcagcttcaccctgaaccacagcagcaccaccaccgaggccgacatcttccaccaggccctgctggagggcaacaccgccaccgaggtgagcctgaccgtgctggacaccatcagcttcttcacccagtgcttcaagacccagctgctgaacaacgacggccacaaccccctgatgaagaaggtgttcgacatccacctggccttcctgaagaacggccagagcgaggtgagcctgaagcacgtgttcgccagcctgagagccttcatcagcaagttccccagcgccttcttcaagggcagagtgaacatgtgcgccgccttctgctacgaggtgctgaagtgctgcaccagcaagatcagcagcaccagaaacgaggccagcgccctgctgtacctgctgatgagaaacaacttcgagtacaccaagagaaagaccttcctgagaacccacctgcagatcatcatcgccgtgagccagctgatcgccgacgtggccctgagcggcggcagcagattccaggagagcctgttcatcatcaacaacttcgccaacagcgacagacccatgaaggccaccgccttccccgccgaggtgaaggacctgaccaagagaatcagaaccgtgctgatggccaccgcccagatgaaggagcacgagaaggaccccgagatgctgatcgacctgcagtacagcctggccaagagctacgccagcacccccgagctgagaaagacctggctggacagcatggccaagatccacgtgaagaacggcgacttcagcgaggccgccatgtgctacgtgcacgtggccgccctggtggccgagttcctgcacagaaagaagctgttccccaacggctgcagcgccttcaagaagatcacccccaacatcgacgaggagggcgccatgaaggaggacgccggcatgatggacgtgcactacagcgaggaggtgctgctggagctgctggagcagtgcgtggacggcctgtggaaggccgagagatacgagatcatcagcgagatcagcaagctgatcgtgcccatctacgagaagagaagagagttcgagaagctgacccaggtgtacagaaccctgcacggcgcctacaccaagatcctggaggtgatgcacaccaagaagagactgctgggcaccttcttcagagtggccttctacggccagagcttcttcgaggaggaggacggcaaggagtacatctacaaggagcccaagctgaccggcctgagcgagatcagcctgagactggtgaagctgtacggcgagaagttcggcaccgagaacgtgaagatcatccaggacagcgacaaggtgaacgccaaggagctggaccccaagtacgcccacatccaggtgacctacgtgaagccctacttcgacgacaaggagctgaccgagagaaagaccgagttcgagagaaaccacaacatcagcagattcgtgttcgaggccccctacaccctgagcggcaagaagcagggctgcatcgaggagcagtgcaagagaagaaccatcctgaccaccagcaacagcttcccctacgtgaagaagagaatccccatcaactgcgagcagcagatcaacctgaagcccatcgacgtggccaccgacgagatcaaggacaagaccgccgagctgcagaagctgtgcagcagcaccgacgtggacatgatccagctgcagctgaagctgcagggctgcgtgagcgtgcaggtgaacgccggccccctggcctacgccagagccttcctgaacgacagccaggccagcaagtacccccccaagaaggtgagcgagctgaaggacatgttcagaaagttcatccaggcctgcagcatcgccctggagctgaacgagagactgatcaaggaggaccaggtggagtaccacgagggcctgaagagcaacttcagagacatggtgaaggagctgagcgacatcatccacgagcagatcctgcaggaggacaccatgcacagcccctggatgagcaacaccctgcacgtgttctgcgccatcagcggcaccagcagcgacagaggctacggcagccccagatacgccgaggtgtag

SEQ ID NO: 9555 - DNA, 1644 bp, synthetic construct
  source 1..1644: mol_type = other DNA; note = Synthetic coding sequence
atgggcggctgcatccccttcctgaaggccgccagagccctgtgccccagaatcatgccccccctgctgctgctgagcgccttcatcttcctggtgagcgtgctgggcggcgcccccggccacaaccccgacagaagaaccaagatggtgagcatccacagcctgagcgagctggagagactgaagctgcaggagaccgcctaccacgagctggtggccagacacttcctgagcgagttcaagcccgacagagccctgcccatcgacagacccaacaccctggacaagtggttcctgatcctgagaggccagcagagagccgtgagccacaagaccttcggcatcagcctggaggaggtgctggtgaacgagttcaccagaagaaagcacctggagctgaccgccaccatgcaggtggaggaggccaccggccaggccgccggcagaagaagaggcaacgtggtgagaagagtgttcggcagaatcagaagattcttcagcagaagaagaaacgagcccaccctgcccagagagttcaccagaagaggcagaagaggcgccgtgagcgtggacagcctggccgagctggaggacggcgccctgctgctgcagaccctgcagctgagcaagatcagcttccccatcggccagagactgctgggcagcaagagaaagatgagcctgaaccccatcgccaagcagatcccccaggtggtggaggcctgctgccagttcatcgagaagcacggcctgagcgccgtgggcatcttcaccctggagtacagcgtgcagagagtgagacagctgagagaggagttcgaccagggcctggacgtggtgctggacgacaaccagaacgtgcacgacgtggccgccctgctgaaggagttcttcagagacatgaaggacagcctgctgcccgacgacctgtacatgagcttcctgctgaccgccaccctgaagccccaggaccagctgagcgccctgcagctgctggtgtacctgatgcccccctgccacagcgacaccctggagagactgctgaaggccctgcacaagatcaccgagaactgcgaggacagcatcggcatcgacggccagctggtgcccggcaacagaatgaccagcaccaacctggccctggtgttcggcagcgccctgctgaagaagggcaagttcggcaagagagagagcagaaagaccaagctgggcatcgaccactacgtggccagcgtgaacgtggtgagagccatgatcgacaactgggacgtgctgttccaggtgcccccccacatccagagacaggtggccaagagagtgtggaagagcagccccgaggccctggacttcatcagaagaagaaacctgagaaagatccagagcgccagaatcaagatggaggaggacgccctgctgagcgaccccgtggagaccagcgccgaggccagagccgccgtgctggcccagagcaagcccagcgacgagggcagcagcgaggagcccgccgtgcccagcggcaccgccagaagccacgacgacgaggagggcgccggcaacccccccatccccgagcaggacagacccctgctgagagtgcccagagagaaggaggccaagaccggcgtgagctacttcttcccctag

SEQ ID NO: 9556 - DNA, 5613 bp, synthetic construct
  source 1..5613: mol_type = other DNA; note = Synthetic coding sequence
atggccagatggatccccaccaagagacagaagtacggcgtggccatctacaactacaacgccagccaggacgtggagctgagcctgcagatcggcgacaccgtgcacatcctggagatgtacgagggctggtacagaggctacaccctgcagaacaagagcaagaagggcatcttccccgagacctacatccacctgaaggaggccaccgtggaggacctgggccagcacgagaccgtgatccccggcgagctgcccctggtgcaggagctgaccagcaccctgagagagtgggccgtgatctggagaaagctgtacgtgaacaacaagctgaccctgttcagacagctgcagcagatgacctacagcctgatcgagtggagaagccagatcctgagcggcaccctgcccaaggacgagctggccgagctgaagaagaaggtgaccgccaagatcgaccacggcaacagaatgctgggcctggacctggtggtgagagacgacaacggcaacatcctggaccccgacgagaccagcaccatcgccctgttcaaggcccacgaggtggccagcaagagaatcgaggagaagatccaggaggagaagagcatcctgcagaacctggacctgagaggccagagcatcttcagcaccatccacacctacggcctgtacgtgaacttcaagaacttcgtgtgcaacatcggcgaggacgccgagctgttcatggccctgtacgaccccgaccagagcaccttcatcagcgagaactacctgatcagatggggcagcaacggcatgcccaaggagatcgagaagctgaacaacctgcaggccgtgttcaccgacctgagcagcatggacctgatcagacccagagtgagcctggtgtgccagatcgtgagagtgggccacatggagctgaaggagggcaagaagcacacctgcggcctgagaagacccttcggcgtggccgtgatggacatcaccgacatcatccacggcaaggtggacgacgaggagaagcagcacttcatccccttccagcagatcgccatggagacctacatcagacagagacagctgatcatgagccccctgatcaccagccacgtgatcggcgagaacgagcccctgaccagcgtgctgaacaaggtgatcgccgccaaggaggtgaaccacaagggccagggcctgtgggtgagcctgaagctgctgcccggcgacctgacccaggtgcagaagaacttcagccacctggtggacagaagcaccgccatcgccagaaagatgggcttccccgagatcatcctgcccggcgacgtgagaaacgacatctacgtgaccctgatccacggcgagttcgacaagggcaagaagaagacccccaagaacgtggaggtgaccatgagcgtgcacgacgaggagggcaagctgctggagaaggccatccaccccggcgccggctacgagggcatcagcgagtacaagagcgtggtgtactaccaggtgaagcagccctgctggtacgagaccgtgaaggtgagcatcgccatcgaggaggtgaccagatgccacatcagattcaccttcagacacagaagcagccaggagaccagagacaagagcgagagagccttcggcgtggccttcgtgaagctgatgaaccccgacggcaccaccctgcaggacggcagacacgacctggtggtgtacaagggcgacaacaagaagatggaggacgccaagttctacctgaccctgcccggcaccaagatggagatggaggagaaggagctgcaggccagcaagaacctggtgaccttcacccccagcaaggacagcaccaaggacagcttccagatcgccaccctgatctgcagcaccaagctgacccagaacgtggacctgctgggcctgctgaactggagaagcaacagccagaacatcaagcacaacctgaagaagctgatggaggtggacggcggcgagatcgtgaagttcctgcaggacaccctggacgccctgttcaacatcatgatggagatgagcgacagcgagacctacgacttcctggtgttcgacgccctggtgttcatcatcagcctgatcggcgacatcaagttccagcacttcaaccccgtgctggagacctacatctacaagcacttcagcgccaccctggcctacgtgaagctgagcaaggtgctgaacttctacgtggccaacgccgacgacagcagcaagaccgagctgctgttcgccgccctgaaggccctgaagtacctgttcagattcatcatccagagcagagtgctgtacctgagattctacggccagagcaaggacggcgacgagttcaacaacagcatcagacagctgttcctggccttcaacatgctgatggacagacccctggaggaggccgtgaagatcaagggcgccgccctgaagtacctgcccagcatcatcaacgacgtgaagctggtgttcgaccccgtggagctgagcgtgctgttctgcaagttcatccagagcatccccgacaaccagctggtgagacagaagctgaactgcatgaccaagatcgtggagagcaccctgttcagacagagcgagtgcagagaggtgctgctgcccctgctgaccgaccagctgagcggccagctggacgacaacagcaacaagcccgaccacgaggccagcagccagctgctgagcaacatcctggaggtgctggacagaaaggacgtgggcgccaccgccgtgcacatccagctgatcatggagagactgctgagaagaatcaacagaaccgtgatcggcatgaacagacagagcccccacatcggcagcttcgtggcctgcatgatcgccctgctgcagcagatggacgacagccactacagccactacatcagcaccttcaagaccagacaggacatcatcgacttcctgatggagaccttcatcatgttcaaggacctgatcggcaagaacgtgtacgccaaggactggatggtgatgaacatgacccagaacagagtgttcctgagagccatcaaccagttcgccgaggtgctgaccagattcttcatggaccaggccagcttcgagctgcagctgtggaacaactacttccacctggccgtggccttcctgacccacgagagcctgcagctggagaccttcagccaggccaagagaaacaagatcgtgaagaagtacggcgacatgagaaaggagatcggcttcagaatcagagacatgtggtacaacctgggcccccacaagatcaagttcatccccagcatggtgggccccatcctggaggtgaccctgacccccgaggtggagctgagaaaggccaccatccccatcttcttcgacatgatgcagtgcgagttcaacttcagcggcaacggcaacttccacatgttcgagaacgagctgatcaccaagctggaccaggaggtggagggcggcagaggcgacgagcagtacaaggtgctgctggagaagctgctgctggagcactgcagaaagcacaagtacctgagcagcagcggcgaggtgttcgccctgctggtgagcagcctgctggagaacctgctggactacagaaccatcatcatgcaggacgagagcaaggagaacagaatgagctgcaccgtgaacgtgctgaacttctacaaggagaagaagagagaggacatctacatcagatacctgtacaagctgagagacctgcacagagactgcgagaactacaccgaggccgcctacaccctgctgctgcacgccgagctgctgcagtggagcgacaagccctgcgtgccccacctgctgcagaaggacagctactacgtgtacacccagcaggagctgaaggagaagctgtaccaggagatcatcagctacttcgacaagggcaagatgtgggagaaggccatcaagctgagcaaggagctggccgagacctacgagagcaaggtgttcgactacgagggcctgggcaacctgctgaagaagagagccagcttctacgagaacatcatcaaggccatgagaccccagcccgagtacttcgccgtgggctactacggccagggcttccccagcttcctgagaaacaagatcttcatctacagaggcaaggagtacgagagaagagaggacttcagcctgagactgctgacccagttccccaacgccgagaagatgaccagcaccaccccccccggcgaggacatcaagagcagccccaagcagtacatgcagtgcttcaccgtgaagcccgtgatgagcctgccccccagctacaaggacaagcccgtgcccgagcagatcctgaactactacagagccaacgaggtgcagcagttcagatacagcagacccttcagaaagggcgagaaggaccccgacaacgagttcgccaccatgtggatcgagagaaccacctacaccaccgcctacaccttccccggcatcctgaagtggttcgaggtgaagcagatcagcaccgaggagatcagccccctggagaacgccatcgagaccatggagctgaccaacgagagaatcagcaactgcgtgcagcagcacgcctgggacagaagcctgagcgtgcaccccctgagcatgctgctgagcggcatcgtggaccccgccgtgatgggcggcttcagcaactacgagaaggccttcttcaccgagaagtacctgcaggagcaccccgaggaccaggagaaggtggagctgctgaagagactgatcgccctgcagatgcccctgctgaccgagggcatcagaatccacggcgagaagctgaccgagcagctgaagcccctgcacgagagactgagcagctgcttcagagagctgaaggagaaggtggagaagcactacggcgtgatcaccctgccccccaacctgaccgagagaaagcagagcagaaccggcagcatcgtgctgccctacatcatgagcagcaccctgagaagactgagcatcaccagcgtgaccagcagcgtggtgagcaccagcagcaacagcagcgacaacgcccccagcagacccggcagcgacggcagcatcctggagcccctgctggagagaagagccagcagcggcgccagagtggaggacctgagcctgagagaggagaacagcgagaacagaatcagcaagttcaagagaaaggactggagcctgagcaagagccaggtgatcgccgagaaggcccccgagcccgacctgatgagccccaccagaaaggcccagagacccaagagcctgcagctgatggacaacagactgagccccttccacggcagcagccccccccagagcacccccctgagccccccccccctgacccccaaggccaccagaaccctgagcagccccagcctgcagaccgacggcatcgccgccacccccgtgccccccccccccccccccaagagcaagccctacgagggcagccagagaaacagcaccgagctggccccccccctgcccgtgagaagagaggccaaggccccccccccccccccccccaaggccagaaagagcggcatccccaccagcgagcccggcagccagtag

SEQ ID NO: 9557 - DNA, 1623 bp, synthetic construct
  source 1..1623: mol_type = other DNA; note = Synthetic coding sequence
atgagcgccagcctgaactacaagagcttcagcaaggagcagcagaccatggacaacctggagaagcagctgatctgccccatctgcctggagatgttcaccaagcccgtggtgatcctgccctgccagcacaacctgtgcagaaagtgcgccagcgacatcttccaggccagcaacccctacctgcccaccagaggcggcaccaccatggccagcggcggcagattcagatgccccagctgcagacacgaggtggtgctggacagacacggcgtgtacggcctgcagagaaacctgctggtggagaacatcatcgacatctacaagcaggagagcaccagacccgagaagaagagcgaccagcccatgtgcgaggagcacgaggaggagagaatcaacatctactgcctgaactgcgaggtgcccacctgcagcctgtgcaaggtgttcggcgcccacaaggactgccaggtggcccccctgacccacgtgttccagagacagaagagcgagctgagcgacggcatcgccatcctggtgggcagcaacgacagagtgcagggcgtgatcagccagctggaggacacctgcaagaccatcgaggagtgctgcagaaagcagaagcaggagctgtgcgagaagttcgactacctgtacggcatcctggaggagagaaagaacgagatgacccaggtgatcaccagaacccaggaggagaagctggagcacgtgagagccctgatcaagaagtacagcgaccacctggagaacgtgagcaagctggtggagagcggcatccagttcatggacgagcccgagatggccgtgttcctgcagaacgccaagaccctgctgaagaagatcagcgaggccagcaaggccttccagatggagaagatcgagcacggctacgagaacatgaaccacttcaccgtgaacctgaacagagaggagaagatcatcagagagatcgacttctacagagaggacgaggacgaggaggaggaggagggcggcgagggcgagaaggagggcgagggcgaggtgggcggcgaggccgtggaggtggaggaggtggagaacgtgcagaccgagttccccggcgaggacgagaaccccgagaaggccagcgagctgagccaggtggagctgcaggccgcccccggcgccctgcccgtgagcagccccgagcccccccccgccctgccccccgccgccgacgcccccgtgacccagggcgaggtggtgcccaccggcagcgagcagaccaccgagagcgagacccccgtgcccgccgccgccgagaccgccgaccccctgttctaccccagctggtacaagggccagaccagaaaggccaccaccaaccccccctgcacccccggcagcgagggcctgggccagatcggcccccccggcagcgaggacagcaacgtgagaaaggccgaggtggccgccgccgccgccagcgagagagccgccgtgagcggcaaggagaccagcgcccccgccgccaccagccaggagctggtgatctgcctggccctgctggccttcctgatcctgcactacatctggagccagatccagtgcctgatcttcaccctgatggactggatctag

SEQ ID NO: 9558 - DNA, 3252 bp, synthetic construct
  source 1..3252: mol_type = other DNA; note = Synthetic coding sequence
atgagccagacccaggactacgagtgcagaagccacaacgtggacctgcccgagagcagaatccccggcagcaacaccagactggagtgggtggagatcatcgagcccagaaccagagagagaatgtacgccaacctggtgaccggcgagtgcgtgtgggacccccccgccggcgtgagaatcaagagaaccagcgagaaccagtggtgggagctgttcgaccccaacaccagcagattctactactacaacgccagcacccagagaaccgtgtggcacagaccccagggctgcgacatcatccccctggccaagctgcagaccctgaagcagaacaccgagagccccagagccagcgccgagagcagccccggcagaggcagcagcgtgagcagagagggcagcaccagcagcagcctggagcccgagcccgacaccgagaaggcccaggagctgcccgccagagccggcagacccgccgccttcggcaccgtgaaggaggacagcggcagcagcagcccccccggcgtgttcctggagaaggactacgagatctacagagactacagcgccgacggccagctgctgcactacagaaccagcagcctgagatggaacagcggcgccaaggagagaatgctgatcaaggtggccgacagagagcccagcttcctggccgcccagggcaacggctacgcccccgacggcccccccggcgtgagaagcagaagacccagcggcagccagcacagccccagcctgcagaccttcgcccccgaggccgacggcaccatcttcttccccgagagaagacccagccccttcctgaagagagccgagctgcccggcagcagcagccccctgctggcccagcccagaaagcccagcggcgacagccagcccagcagccccagatacggctacgagccccccctgtacgaggagccccccgtggagtaccaggcccccatctacgacgagccccccatggacgtgcagttcgaggccggcggcggctaccaggccggcagcccccagagaagccccggcagaaagcccagacccttcctgcagcccaacaagcagggcccccccagcccctgccagcagctggtgctgaccaagcagaagtgccccgagagattcctgagcctggagtacagccccgccggcaaggagtacgtgagacagctggtgtacgtggagcaggccggcagcagccccaagctgagagccggccccagacacaagtacgcccccaaccccggcggcggcagctacagcctgcagcccagcccctgcctgctgagagaccagagactgggcgtgaagagcggcgactacagcaccatggagggccccgagctgagacacagccagccccccacccccctgccccaggcccaggaggacgccatgagctggagcagccagcaggacaccctgagcagcaccggctacagccccggcaccagaaagagaaagagcagaaagcccagcctgtgccaggccaccagcgccacccccaccgagggccccggcgacctgctggtggagcagcccctggccgaggagcagcccccctgcggcaccagcctggcccccgtgaagagagccgagggcgaggccgagggcgccagaggcgccgccgagcccttcctggcccaggccagactggcctgggaggcccagcaggcccacttccacatgaagcagagaagcagctgggacagccagcaggacggcagcggctacgagagcgacggcgccctgcccctgcccatgcccggccccgtggtgagagccttcagcgaggacgaggccctggcccagcaggagaacagacactggagaagaggcaccttcgagaagctgggcttcccccagatcctgctggagaagagcgtgagcgtgcagaccaacctggccagccccgagccctacctgcaccccagccagagcgaggacctggccgcctgcgcccagttcgagagcagcagacagagcagaagcggcgtgcccagcagcagctgcgtgttccccaccttcaccctgagaaagcccagcagcgagaccgacatcgagaactgggccagcaagcacttcaacaagcacacccagggcctgttcagaagaaaggtgagcatcgccaacatgctggcctggagcagcgagagcatcaagaagcccatgatcgtgaccagcgacagacacgtgaagaaggaggcctgcgagctgttcaagctgatccagatgtacatgggcgacagaagagccaaggccgaccccctgcacgtggccctggaggtggccaccaagggctggagcgtgcagggcctgagagacgagctgtacatccagctgtgcagacagaccaccgagaacttcagactggagagcctggccagaggctgggagctgatggccatctgcctggccttcttcccccccacccccaagttccacagctacctggagggctacatctacagacacatggaccccgtgaacgacaccaagggcgtggccatcagcacctacgccaagtactgctaccacaagctgcagaaggccgccctgaccggcgccaagaagggcctgaagaagcccaacgtggaggagatcagacacgccaagaacgccgtgttcagccccagcatgttcggcagcgccctgcaggaggtgatgggcatgcagagagagagataccccgagagacagctgccctgggtgcagaccagactgagcgaggaggtgctggccctgaacggcgaccagaccgagggcatcttcagagtgcccggcgacatcgacgaggtgaacgccctgaagctgcaggtggaccagtggaaggtgcccaccggcctggaggacccccacgtgcccgccagcctgctgaagctgtggtacagagagctggaggagcccctgatcccccacgagttctacgagcagtgcatcgcccactacgacagccccgaggccgccgtggccgtggtgcacgccctgcccagaatcaacagaatggtgctgtgctacctgatcagattcctgcaggtgttcgtgcagcccgccaacgtggccgtgaccaagatggacgtgagcaacctggccatggtgatggcccccaactgcctgagatgccagagcgacgaccccagagtgatcttcgagaacaccagaaaggagatgagcttcctgagagtgctgatccagcacctggacaccagcttcatggagggcgtgctgtag

SEQ ID NO: 9559 - DNA, 426 bp, synthetic construct
  source 1..426: mol_type = other DNA; note = Synthetic coding sequence
atgggcaagggcatccccctgaacgaccaggacagaatcccctggctgtgcaacctgcacgacatcctgctgagagacgtggccagcggccagagagtggtgctggcctgcagcgccctgaagaagacctacagagacatcctgacccagggcaaggacggcgtggccctgaagtgcgaggagagcggcaaggaggccaagcaggccgagatgcagctgctggtggtgcacctgagcggcagcttcgaggtgatcagcggcagactgctgaagagagagggccacttcatgccccccgagctgctgcagagccagttcgagaccctggagccccccgccgcccccgagaacttcatccagatcagcgtggacaagaacgtgagcgagatcatcgccaccatcatggagaccctgaagatgaagtag

SEQ ID NO: 9560 - DNA, 1701 bp, synthetic construct
  source 1..1701: mol_type = other DNA; note = Synthetic coding sequence
atggacatccagctggaccccgccagagacgacctgcccctgatggccaacaccagccacatcctggtgaagcactacgtgctggacctggacgtggacttcgagagccaggtgatcgagggcaccatcgtgctgttcctggaggacggcaacagattcaagaagcagaacagcagcatcgaggaggcctgccagagcgagagcaacaaggcctgcaagttcggcatgcccgagccctgccacatccccgtgaccaacgccagaaccttcagcagcgagatggagtacaacgacttcgccatctgcagcaagggcgagaaggacaccagcgacaaggacggcaaccacgacaaccaggagcacgccagcggcatcagcagcagcaagtactgctgcgacaccggcaaccacggcagcgaggacttcctgctggtgctggactgctgcgacctgagcgtgctgaaggtggaggaggtggacgtggccgccgtgcccggcctggagaagttcaccagaagccccgagctgaccgtggtgagcgaggagttcagaaaccagatcgtgagagagctggtgaccctgcccgccaacagatggagagagcagctggactactacgccagatgcagccaggcccccggctgcggcgagctgctgttcgacaccgacacctggagcctgcagatcagaaagaccggcgcccagaccgccaccgacttcccccacgccatcagaatctggtacaagaccaagcccgagggcagaagcgtgacctggaccagcgaccagagcggcagaccctgcgtgtacaccgtgggcagccccatcaacaacagagccctgttcccctgccaggagccccccgtggccatgagcacctggcaggccaccgtgagagccgccgccagcttcgtggtgctgatgagcggcgagaacagcgccaagcccacccagctgtgggaggagtgcagcagctggtactactacgtgaccatgcccatgcccgccagcaccttcaccatcgccgtgggctgctggaccgagatgaagatggagacctggagcagcaacgacctggccaccgagagacccttcagccccagcgaggccaacttcagacacgtgggcgtgtgcagccacatggagtacccctgcagattccagaacgccagcgccaccacccaggagatcatcccccacagagtgttcgcccccgtgtgcctgaccggcgcctgccaggagaccctgctgagactgatccccccctgcctgagcgccgcccacagcgtgctgggcgcccaccccttcagcagactggacgtgctgatcgtgcccgccaacttccccagcctgggcatggccagcccccacatcatgttcctgagccagagcatcctgaccggcggcaaccacctgtgcggcaccagactgtgccacgagatcgcccacgcctggttcggcctggccatcggcgccagagactggaccgaggagtggctgagcgagggcttcgccacccacctggaggacgtgttctgggccaccgcccagcagctggccccctacgaggccagagagcagcaggagctgagagcctgcctgagatggagaagactgcaggacgagatgcagtgcagccccgaggagatgcaggtgctgagattcccccacgtgggcggctgcagcggcagcttcagctag

SEQ ID NO: 9561 - DNA, 1266 bp, synthetic construct
  source 1..1266: mol_type = other DNA; note = Synthetic coding sequence
atgcccttcctgcacggcttcagaagaatcatcttcgagtaccagcccctggtggacgccatcctgggcagcctgggcatccaggaccccgagagacaggagagcctggacagacccagctacgtggccagcgaggagagcagaatcctggtgctgaccgagctgctggagagaaaggcccacagccccttctaccaggagggcgtgagcaacgccctgctgaagatggccgagctgggcctgaccagagccgccgacgtgctgctgagacacggcgccaacctgaacttcgaggaccccgtgacctactacaccgccctgcacatcgccgtgctgagaaaccagcccgacatggtggagctgctggtgcaccacggcgccgacgtgaacagaagagacagaatccacgagagcagccccctggacctggccagcgaggagcccgagagactgccctgcctgcagagactgctggacctgggcgccgacgtgaacgccgccgacaagcacggcaagaccgccctgctgcacgccctggccagcagcgacggcgtgcagatccacaacaccgagaacatcagactgctgctggagggcggcgccgacgtgaaggccaccaccaaggacggcgacaccgtgttcacctgcatcatcttcctgctgggcgagaccgtgggcggcgacaaggaggaggcccagatgatcaacagattctgcttccaggtgaccagactgctgctggcccacggcgccgaccccagcgagtgccccgcccacgagagcctgacccacatctgcctgaagagcttcaagctgcacttccccctgctgagattcctgctggagagcggcgccgcctacaactgcagcctgcacggcgccagctgctggagcggcttccacatcatcttcgagagactgtgcagccaccccggctgcaccgaggacgagagccacgccgacctgctgagaaaggccgagaccgtgctggacctgatggtgaccaacagccagaagctgcagctgcccgagaacttcgacatccaccccgtgggcagcctggccgagaagatccaggccctgcacttcagcctgagacagctggagagctaccccccccccctgaagcacctgtgcagagtggccatcagactgtacctgcagccctggcccgtggacgtgaaggtgaaggccctgcccctgcccgacagactgaagtggtacctgctgagcgagcacagcggcagcgtggaggacgacatctag

SEQ ID NO: 9562 - DNA, 594 bp, synthetic construct
  source 1..594: mol_type = other DNA; note = Synthetic coding sequence
atgcccttcctgcacggcttcagaagaatcatcttcgagtaccagcccctggtggacgccatcctgggcagcctgggcatccaggaccccgagagacaggagagcctggacagacccagctacgtggccagcgaggagagcagaatcctggtgctgaccgagctgctggagagaaaggcccacagccccttctaccaggagggcgtgagcaacgccctgctgaagatggccgagctgggcctgaccagagccgccgacgtgctgctgagacacggcgccaacctgaacttcgaggaccccgtgacctactacaccgccctgcacatcgccgtgctgagaaaccagcccgacatggtggagctgctggtgcaccacggcgccgacgtgaacagaagagacagagagaagctgctgtgcagcatgctgtggcccgccgccaccggctgcagaagcaccatcctgagaaccttcgtgagctactggaaggagggccagaccagcagacccccccccaagatgggcacccagtgcagccccgccagcagcagctgcctggtgagaccctgggagggcaccaagagaagacccagatag

SEQ ID NO: 9563 - DNA, 684 bp, synthetic construct
  source 1..684: mol_type = other DNA; note = Synthetic coding sequence
atgagcgacatcaacctggactgggtggacagaagacagctgcagagactggaggagatgctgatcgtggtggacgagaacgacaaggtgatcggcgccgacaccaagagaaactgccacctgaacgagaacatcgagaagggcctgctgcacagagccttcagcgtggtgctgttcaacaccaagaacagaatcctgatccagcagagaagcgacaccaaggtgaccttccccggctacttcaccgacagctgcagcagccaccccctgtacaaccccgccgagctggaggagaaggacgccatcggcgtgagaagagccgcccagagaagactgcaggccgagctgggcatccccggcgagcagatcagccccgaggacatcgtgttcatgaccatctaccaccacaaggccaagagcgacagaatctggggcgagcacgagatctgctacctgctgctggtgagaaagaacgtgaccctgaaccccgaccccagcgagaccaagagcatcctgtacctgagccaggaggagctgtgggagctgctggagagagaggccagaggcgaggtgaaggtgaccccctggctgagaaccatcgccgagagattcctgtacagatggtggccccacctggacgacgtgacccccttcgtggagctgcacaagatccacagagtgtag

SEQ ID NO: 9564 - DNA, 864 bp, synthetic construct
  source 1..864: mol_type = other DNA; note = Synthetic coding sequence
atggaggtgatggagggccccctgaacctggcccaccagcagagcagaagagccgacagactgctggccgccggcaagtacgaggaggccatcagctgccacaagaaggccgccgcctacctgagcgaggccatgaagctgacccagagcgagcaggcccacctgagcctggagctgcagagagacagccacatgaagcagctgctgctgatccaggagagatggaagagagcccagagagaggagagactgaaggcccagcagaacaccgacaaggacgccgccgcccacctgcagaccagccacaagcccagcgccgaggacgccgagggccagagccccctgagccagaagtacagccccagcaccgagaagtgcctgcccgagatccagggcatcttcgacagagaccccgacaccctgctgtacctgctgcagcagaagagcgagcccgccgagccctgcatcggcagcaaggcccccaaggacgacaagaccatcatcgaggagcaggccaccaagatcgccgacctgaagagacacgtggagttcctggtggccgagaacgagagactgagaaaggagaacaagcagctgaaggccgagaaggccagactgctgaagggccccatcgagaaggagctggacgtggacgccgacttcgtggagaccagcgagctgtggagcctgcccccccacgccgagaccgccaccgccagcagcacctggcagaagttcgccgccaacaccggcaaggccaaggacatccccatccccaacctgccccccctggacttccccagccccgagctgcccctgatggagctgagcgaggacatcctgaagggcttcatgaacaactag

SEQ ID NO: 9565 - DNA, 2844 bp, synthetic construct
  source 1..2844: mol_type = other DNA; note = Synthetic coding sequence
atgtgcgtggacagcctggtgagaatctgcagcggcctgagctacggcagaatcagaaacatcaagagcctgagcgacatccagatcgtgcaggtggcctgcggctactaccacagcctggccctgagcaaggccagcgaggtgttctgctggggccagaacaagtacggccagctgggcctgggcaccgactgcaagaagcagaccagcccccagctgctgaagagcctgctgggcatccccttcatgcaggtggccgccggcggcgcccacagcttcgtgctgaccctgagcggcgccatcttcggctggggcagaaacaagttcggccagctgggcctgaacgacgagaacgacagatacgtgcccaacctgctgaagagcctgagaagccagaagatcgtgtacatctgctgcggcgaggaccacaccgccgccctgaccaaggagggcggcgtgttcaccttcggcgccggcggctacggccagctgggccacaacagcaccagccacgagatcaaccccagaaaggtgttcgagctgatgggcagcatcgtgaccgagatcgcctgcggcagacagcacaccagcgccttcgtgcccagcagcggcagaatctacagcttcggcctgggcggcaacggccagctgggcaccggcagcaccagcaacagaaagagccccttcaccgtgaagggcaactggtacccctacaacggccagtgcctgcccgacatcgacagcgaggagtacttctgcgtgaagagaatcttcagcggcggcgaccagagcttcagccactacagcagcccccagaactgcggcccccccgacgacttcagatgccccaaccccaccaagcagatctggaccgtgaacgaggccctgatccagaagtggctgagctaccccagcggcagattccccgtggagatcgccaacgagatcgacggcaccttcagcagcagcggctgcctgaacggcagcttcctggccgtgagcaacgacgaccactacagaaccggcaccagattcagcggcgtggacatgaacgccgccagactgctgttccacaagctgatccagcccgaccacccccagatcagccagcaggtggccgccagcctggagaagaacctgatccccaagctgaccagcagcctgcccgacgtggaggccctgagattctacctgaccctgcccgagtgccccctgatgagcgacagcaacaacttcaccaccatcgccatccccttcggcaccgccctggtgaacctggagaaggcccccctgaaggtgctggagaactggtggagcgtgctggagccccccctgttcctgaagatcgtggagctgttcaaggaggtggtggtgcacctgctgaagctgtacaagatcggcatcccccccagcgagagaagaatcttcaacagcttcctgcacaccgccctgaaggtgctggagatcctgcacagagtgaacgagaagatgggccagatcatccagtacgacaagttctacatccacgaggtgcaggagctgatcgacatcagaaacgactacatcaactgggtgcagcagcaggcctacggcatggacgtgaaccacggcctgaccgagctggccgacatccccgtgaccatctgcacctaccccttcgtgttcgacgcccaggccaagaccaccctgctgcagaccgacgccgtgctgcagatgcagatggccatcgaccaggcccacagacagaacgtgagcagcctgttcctgcccgtgatcgagagcgtgaacccctgcctgatcctggtggtgagaagagagaacatcgtgggcgacgccatggaggtgctgagaaagaccaagaacatcgactacaagaagcccctgaaggtgatcttcgtgggcgaggacgccgtggacgccggcggcgtgagaaaggagttcttcctgctgatcatgagagagctgctggaccccaagtacggcatgttcagatactacgaggacagcagactgatctggttcagcgacaagaccttcgaggacagcgacctgttccacctgatcggcgtgatctgcggcctggccatctacaactgcaccatcgtggacctgcacttccccctggccctgtacaagaagctgctgaagaagaagcccagcctggacgacctgaaggagctgatgcccgacgtgggcagaagcatgcagcagctgctggactaccccgaggacgacatcgaggagaccttctgcctgaacttcaccatcaccgtggagaacttcggcgccaccgaggtgaaggagctggtgctgaacggcgccgacaccgccgtgaacaagcagaacagacaggagttcgtggacgcctacgtggactacatcttcaacaagagcgtggccagcctgttcgacgccttccacgccggcttccacaaggtgtgcggcggcaaggtgctgctgctgttccagcccaacgagctgcaggccatggtgatcggcaacaccaactacgactggaaggagctggagaagaacaccgagtacaagggcgagtactgggccgagcaccccaccatcaagatcttctgggaggtgttccacgagctgcccctggagaagaagaagcagttcctgctgttcctgaccggcagcgacagaatccccatcctgggcatgaagagcctgaagctggtgatccagagcaccggcggcggcgaggagtacctgcccgtgagccacacctgcttcaacctgctggacctgcccaagtacaccgagaaggagaccctgagaagcaagctgatccaggccatcgaccacaacgagggcttcagcctgatctag

SEQ ID NO: 9566 - DNA, 2541 bp, synthetic construct
  source 1..2541: mol_type = other DNA; note = Synthetic coding sequence
atgcccgccttcctgggcctgaagtgcctgggcaagctgtgcagcagcgagaagagcaaggtgaccagcagcgagagaaccagcgccagaggcagcaacagaaagagactgatcgtggaggacagaagagtgagcggcaccagcttcaccgcccacagaagagccaccatcacccacctgctgtacctgtgccccaaggactactgccccagaggcagagtgtgcaacagcgtggaccccttcgtggcccacccccaggacccccaccaccccagcgagaagcccgtgatccactgccacaagtgcggcgagccctgcaagggcgaggtgctgagagtgcagaccaagcacttccacatcaagtgcttcacctgcaaggtgtgcggctgcgacctggcccagggcggcttcttcatcaagaacggcgagtacctgtgcaccctggactaccagagaatgtacggcaccagatgccacggctgcggcgagttcgtggagggcgaggtggtgaccgccctgggcaagacctaccaccccaactgcttcgcctgcaccatctgcaagagacccttcccccccggcgacagagtgaccttcaacggcagagactgcctgtgccagctgtgcgcccagcccatgagcagcagccccaaggagaccaccttcagcagcaactgcgccggctgcggcagagacatcaagaacggccaggccctgctggccctggacaagcagtggcacctgggctgcttcaagtgcaagagctgcggcaaggtgctgaccggcgagtacatcagcaaggacggcgccccctactgcgagaaggactaccagggcctgttcggcgtgaagtgcgaggcctgccaccagttcatcaccggcaaggtgctggaggccggcgacaagcactaccaccccagctgcgccagatgcagcagatgcaaccagatgttcaccgagggcgaggagatgtacctgcagggcagcaccgtgtggcaccccgactgcaagcagagcaccaagaccgaggagaagctgagactgcccaacatcagaagaagcagcagcgacttcttctacagcaagagcctgatcagaagaaccggcagaagccccagcctgcagcccaccagaaccagcagcgagagcatctacagcagacccggcagcagcatccccggcagccccggccacaccatctacgccaaggtggacaacgagatcctggactacaaggacctggccgccatccccaaggtgaaggccatctacgacatcgagagacccgacctgatcacctacgagcccttctacaccagcggctacgacgacaagcaggagagacagagcctgggcgagagccccagaaccctgagccccacccccagcgccgagggctaccaggacgtgagagacagaatgatccacagaagcaccagccagggcagcatcaacagccccgtgtacagcagacacagctacacccccaccaccagcagaagcccccagcacttccacagacccgagctgctgagccccggcgtgcagagactgagctacctgagaaccagcagcctgagccccacccacagcgacagcagacccaacccccccttcagacaccacttcatcccccacatcaagggcaacgagcccagcagcggcagaaacagccccctgccctacagacccgacagcagacccctgacccccacctacgcccaggcccccaagcacttccacgtgcccgaccagggcatcaacatctacagaaagccccccatctacaagcagcacgccgccctggccgcccagagcaagagcagcgaggacatcatcaagttcagcaagttccccgccgcccaggcccccgaccccagcgagacccccaagatcgagaccgaccactggcccggcccccccagcttcgccgtggtgggccccgacatgaagagaagaagcagcggcagagaggaggacgacgaggagctgctgagaagaagacagctgcaggaggagcagctgatgaagctgaacagcggcctgggccagctgatcctgaaggaggagatggagaaggagagcagagagagaagcagcctgctggccagcagatacgacagccccatcaacagcgccagccacatccccagcagcaagaccgccagcctgcccggctacggcagaaacggcctgcacagacccgtgagcaccgacttcgcccagtacaacagctacggcgacgtgagcggcggcgtgagagactaccagaccctgcccgacggccacatgcccgccatgagaatggacagaggcgtgagcatgcccaacatgctggagcccaagatcttcccctacgagatgctgatggtgaccaacagaggcagaaacaagatcctgagagaggtggacagaaccagactggagagacacctggcccccgaggtgttcagagagatcttcggcatgagcatccaggagttcgacagactgcccctgtggagaagaaacgacatgaagaagaaggccaagctgttctag

SEQ ID NO: 9567 - DNA, 594 bp, synthetic construct
  source 1..594: mol_type = other DNA; note = Synthetic coding sequence
atgttcggctgcctggtggccggcagactggtgcagaccgccgcccagcaggtggccgaggacaagttcgtgttcgacctgcccgactacgagagcatcaaccacgtggtggtgttcatgctgggcaccatccccttccccgagggcatgggcggcagcgtgtacttcagctaccccgacagcaacggcatgcccgtgtggcagctgctgggcttcgtgaccaacggcaagcccagcgccatcttcaagatcagcggcctgaagagcggcgagggcagccagcaccccttcggcgccatgaacatcgtgagaacccccagcgtggcccagatcggcatcagcgtggagctgctggacagcatggcccagcagacccccgtgggcaacgccgccgtgagcagcgtggacagcttcacccagttcacccagaagatgctggacaacttctacaacttcgccagcagcttcgccgtgagccaggcccagatgacccccagccccagcgagatgttcatccccgccaacgtggtgctgaagtggtacgagaacttccagagaagactggcccagaaccccctgttctggaagacctag

SEQ ID NO: 9568 - DNA, 930 bp, synthetic construct
  source 1..930: mol_type = other DNA; note = Synthetic coding sequence
atggtgttccccgccaagagattctgcctggtgcccagcatggagggcgtgagatgggccttcagctgcggcacctggctgcccagcagagccgagtggctgctggccgtgagaagcatccagcccgaggagaaggagagaatcggccagttcgtgttcgccagagacgccaaggccgccatggccggcagactgatgatcagaaagctggtggccgagaagctgaacatcccctggaaccacatcagactgcagagaaccgccaagggcaagcccgtgctggccaaggacagcagcaacccctaccccaacttcaacttcaacatcagccaccagggcgactacgccgtgctggccgccgagcccgagctgcaggtgggcatcgacatcatgaagaccagcttccccggcagaggcagcatccccgagttcttccacatcatgaagagaaagttcaccaacaaggagtgggagaccatcagaagcttcaaggacgagtggacccagctggacatgttctacagaaactgggccctgaaggagagcttcatcaaggccatcggcgtgggcctgggcttcgagctgcagagactggagttcgacctgagccccctgaacctggacatcggccaggtgtacaaggagaccagactgttcctggacggcgaggaggagaaggagtgggccttcgaggagagcaagatcgacgagcaccacttcgtggccgtggccctgagaaagcccgacggcagcagacaccaggacgtgcccagccaggacgacagcaagcccacccagagacagttcaccatcctgaacttcaacgacctgatgagcagcgccgtgcccatgacccccgaggaccccagcttctgggactgcttctgcttcaccgaggagatccccatcagaaacggcaccaagagctag

SEQ ID NO: 9569 - DNA, 1599 bp, synthetic construct
  source 1..1599: mol_type = other DNA; note = Synthetic coding sequence
atgcagagctgcgagagcagcggcgacagcgccgacgaccccctgagcagaggcctgagaagaagaggccagcccagagtggtggtgatcggcgccggcctggccggcctggccgccgccaaggccctgctggagcagggcttcaccgacgtgaccgtgctggaggccagcagccacatcggcggcagagtgcagagcgtgaagctgggccacgccaccttcgagctgggcgccacctggatccacggcagccacggcaaccccatctaccacctggccgaggccaacggcctgctggaggagaccaccgacggcgagagaagcgtgggcagaatcagcctgtacagcaagaacggcgtggcctgctacctgaccaaccacggcagaagaatccccaaggacgtggtggaggagttcagcgacctgtacaacgaggtgtacaacctgacccaggagttcttcagacacgacaagcccgtgaacgccgagagccagaacagcgtgggcgtgttcaccagagaggaggtgagaaacagaatcagaaacgaccccgacgaccccgaggccaccaagagactgaagctggccatgatccagcagtacctgaaggtggagagctgcgagagcagcagccacagcatggacgaggtgagcctgagcgccttcggcgagtggaccgagatccccggcgcccaccacatcatccccagcggcttcatgagagtggtggagctgctggccgagggcatccccgcccacgtgatccagctgggcaagcccgtgagatgcatccactgggaccaggccagcgccagacccagaggccccgagatcgagcccagaggcgtgctgaagagacagtacaccagcttcttcagacccggcctgcccaccgagaaggtggccgccatccacagactgggcatcggcaccaccgacaagatcttcctggagttcgaggagcccttctggggccccgagtgcaacagcctgcagttcgtgtgggaggacgaggccgagagccacaccctgacctacccccccgagctgtggtacagaaagatctgcggcttcgacgtgctgtacccccccgagagatacggccacgtgctgagcggctggatctgcggcgaggaggccctggtgatggagaagtgcgacgacgaggccgtggccgagatctgcaccgagatgctgagacagttcaccggcaaccccaacatccccaagcccagaagaatcctgagaagcgcctggggcagcaacccctacttcagaggcagctacagctacacccaggtgggcagcagcggcgccgacgtggagaagctggccaagcccctgccctacaccgagagcagcaagaccgcccacggcagcagcaccaagcagcagcccggccacctgttcagcagcaagtgccccgagcagcccctggacgccaacagaggcgccgtgaagcccatgcaggtgctgttcagcggcgaggccacccacagaaagtactacagcaccacccacggcgccctgctgagcggccagagagaggccgccagactgatcgagatgtacagagacctgttccagcagggcacctag

SEQ ID NO: 9570 - DNA, 2349 bp, synthetic construct
  source 1..2349: mol_type = other DNA; note = Synthetic coding sequence
atggacagcagcatccacctgagcagcctgatcagcagacacgacgacgaggccaccagaaccagcaccagcgagggcctggaggagggcgaggtggagggcgagaccctgctgatcgtggagagcgaggaccaggccagcgtggacctgagccacgaccagagcggcgacagcctgaacagcgacgagggcgacgtgagctggatggaggagcagctgagctacttctgcgacaagtgccagaagtggatccccgccagccagctgagagagcagctgagctacctgaagggcgacaacttcttcagattcacctgcagcgactgcagcgccgacggcaaggagcagtacgagagactgaagctgacctggcagcaggtggtgatgctggccatgtacaacctgagcctggagggcagcggcagacagggctacttcagatggaaggaggacatctgcgccttcatcgagaagcactggaccttcctgctgggcaacagaaagaagaccagcacctggtggagcaccgtggccggctgcctgagcgtgggcagccccatgtacttcagaagcggcgcccaggagttcggcgagcccggctggtggaagctggtgcacaacaagccccccaccatgaagcccgagggcgagaagctgagcgccagcaccctgaagatcaaggccgccagcaagcccaccctggaccccatcatcaccgtggagggcctgagaaagagagccagcagaaaccccgtggagagcgccatggagctgaaggagaagagaagcagaacccaggaggccaaggacatcagaagagcccagaaggaggccgccggcttcctggacagaagcaccagcagcacccccgtgaagttcatcagcagaggcagaagacccgacgtgatcctggagaagggcgaggtgatcgacttcagcagcctgagcagcagcgacagaacccccctgaccagccccagccccagccccagcctggacttcagcgcccccggcacccccgccagccacagcgccacccccagcctgctgagcgaggccgacctgatccccgacgtgatgcccccccaggccctgttccacgacgacgacgagatggagggcgacggcgtgatcgaccccggcatggagtacgtgcccccccccgccggcagcgtggccagcggccccgtggtgggcgtgagaaagaaggtgagaggccccgagcagatcaagcaggaggtggagagcgaggaggagaagcccgacagaatggacatcgacagcgaggacaccgacagcaacaccagcctgcagaccagagccagagagaagagaaagccccagctggagaaggacaccaagcccaaggagcccagatacacccccgtgagcatctacgaggagaagctgctgctgaagagactggaggcctgccccggcgccgtggccatgacccccgaggccagaagactgaagagaaagctgatcgtgagacaggccaagagagacagaggcctgcccctgttcgacctggaccaggtggtgaacgccgccctgctgctggtggacggcatctacggcgccaaggagggcggcatcagcagactgcccgccggccaggccacctacagaaccacctgccaggacttcagaatcctggacagataccagaccagcctgcccagcagaaagggcttcagacaccagaccaccaagttcctgtacagactggtgggcagcgaggacatggccgtggaccagagcatcgtgagcccctacaccagcagaatcctgaagccctacatcagaagagactacgagaccaagccccccaagctgcagctgctgagccagatcagaagccacctgcacagaagcgacccccactggacccccgagcccgacgcccccctggactactgctacgtgagacccaaccacatccccaccatcaacagcatgtgccaggagttcttctggcccggcatcgacctgagcgagtgcctgcagtaccccgacttcagcgtggtggtgctgtacaagaaggtgatcatcgccttcggcttcatggtgcccgacgtgaagtacaacgaggcctacatcagcttcctgttcgtgcaccccgagtggagaagagccggcatcgccaccttcatgatctaccacctgatccagacctgcatgggcaaggacgtgaccctgcacgtgagcgccagcaaccccgccatgctgctgtaccagaagttcggcttcaagaccgaggagtacgtgctggacttctacgacaagtactaccccctggagagcaccgagtgcaagcacgccttcttcctgagactgagaagatag

SEQ ID NO: 9571 - DNA, 2745 bp, synthetic construct
  source 1..2745: mol_type = other DNA; note = Synthetic coding sequence
atgggcaccaccgcccccggccccatccacctgctggagctgtgcgaccagaagctgatggagttcctgtgcaacatggacaacaaggacctggtgtggctggaggagatccaggaggaggccgagagaatgttcaccagagagttcagcaaggagcccgagctgatgcccaagacccccagccagaagaacagaagaaagaagagaagaatcagctacgtgcaggacgagaacagagaccccatcagaagaagactgagcagaagaaagagcagaagcagccagctgagcagcagaagactgagaagcaaggacagcgtggagaagctggccaccgtggtgggcgagaacggcagcgtgctgagaagagtgaccagagccgccgccgccgccgccgccgccaccatggccctggccgcccccagcagccccacccccgagagccccaccatgctgaccaagaagcccgaggacaaccacacccagtgccagctggtgcccgtggtggagatcggcatcagcgagagacagaacgccgagcagcacgtgacccagctgatgagcaccgagcccctgcccagaaccctgagccccacccccgccagcgccaccgcccccaccagccagggcatccccaccagcgacgaggagagcacccccaagaagagcaaggccagaatcctggagagcatcaccgtgagcagcctgatggccaccccccaggaccccaagggccagggcgtgggcaccggcagaagcgccagcaagctgagaatcgcccaggtgagccccggccccagagacagccccgccttccccgacagcccctggagagagagagtgctggcccccatcctgcccgacaacttcagcacccccaccggcagcagaaccgacagccagagcgtgagacacagccccatcgcccccagcagccccagcccccaggtgctggcccagaagtacagcctggtggccaagcaggagagcgtggtgagaagagccagcagaagactggccaagaagaccgccgaggagcccgccgccagcggcagaatcatctgccacagctacctggagagactgctgaacgtggaggtgccccagaaggtgggcagcgagcagaaggagccccccgaggaggccgagcccgtggccgccgccgagcccgaggtgcccgagaacaacggcaacaacagctggccccacaacgacaccgagatcgccaacagcacccccaaccccaagcccgccgccagcagccccgagacccccagcgccggccagcaggaggccaagaccgaccaggccgacggccccagagagcccccccagagcgccagaagaaagagaagctacaagcaggccgtgagcgagctggacgaggagcagcacctggaggacgaggagctgcagccccccagaagcaagacccccagcagcccctgccccgccagcaaggtggtgagacccctgagaaccttcctgcacaccgtgcagagaaaccagatgctgatgacccccaccagcgcccccagaagcgtgatgaagagcttcatcaagagaaacacccccctgagaatggaccccaaggagaaggagagacagagactggagaacctgagaagaaaggaggaggccgagcagctgagaagacagaaggtggaggaggacaagagaagaagactggaggaggtgaagctgaagagagaggagagactgagaaaggtgctgcaggccagagagagagtggagcagatgaaggaggagaagaagaagcagatcgagcagaagttcgcccagatcgacgagaagaccgagaaggccaaggaggagagactggccgaggagaaggccaagaagaaggccgccgccaagaagatggaggaggtggaggccagaagaaagcaggaggaggaggccagaagactgagatggctgcagcaggaggaggaggagagaagacaccaggagctgctgcagaagaagaaggaggaggagcaggagagactgagaaaggccgccgaggccaagagactggccgagcagagagagcaggagagaagagagcaggagagaagagagcaggagagaagagagcaggagagaagagagcaggagagaagagagcaggagagacagctggccgagcaggagagaagaagagagcaggagagactgcaggccgagagagagctgcaggagagagagaaggccctgagactgcagaaggagcagctgcagagagagctggaggagaagaagaagaaggaggagcagcagagactggccgagagacagctgcaggaggagcaggagaagaaggccaaggaggccgccggcgccagcaaggccctgaacgtgaccgtggacgtgcagagccccgcctgcaccagctaccagatgaccccccagggccacagagccccccccaagatcaaccccgacaactacggcatggacctgaacagcgacgacagcaccgacgacgaggcccaccccagaaagcccatccccacctgggccagaggcacccccctgagccaggccatcatccaccagtactaccacccccccaacctgctggagctgttcggcaccatcctgcccctggacctggaggacatcttcaagaagagcaagcccagataccacaagagaaccagcagcgccgtgtggaacagcccccccctgcagggcgccagagtgcccagcagcctggcctacagcctgaagaagcactag

SEQ ID NO: 9572 - DNA, 4149 bp, synthetic construct
  source 1..4149: mol_type = other DNA; note = Synthetic coding sequence
atggacgaggaggagaaccactacgtgagccagctgagagaggtgtacagcagctgcgacaccaccggcaccggcttcctggacagacaggagctgacccagctgtgcctgaagctgcacctggagcagcagctgcccgtgctgctgcagaccctgctgggcaacgaccacttcgccagagtgaacttcgaggagttcaaggagggcttcgtggccgtgctgagcagcaacgccggcgtgagacccagcgacgaggacagcagcagcctggagagcgccgccagcagcgccatcccccccaagtacgtgaacggcagcaagtggtacggcagaagaagcagacccgagctgtgcgacgccgccaccgaggccagaagagtgcccgagcagcagacccaggccagcctgaagagccacctgtggagaagcgccagcctggagagcgtggagagccccaagagcgacgaggaggccgagagcaccaaggaggcccagaacgagctgttcgaggcccagggccagctgcagacctgggacagcgaggacttcggcagcccccagaagagctgcagccccagcttcgacacccccgagagccagatcagaggcgtgtgggaggagctgggcgtgggcagcagcggccacctgagcgagcaggagctggccgtggtgtgccagagcgtgggcctgcagggcctggagaaggaggagctggaggacctgttcaacaagctggaccaggacggcgacggcaaggtgagcctggaggagttccagctgggcctgttcagccacgagcccgccctgctgctggagagcagcaccagagtgaagcccagcaaggcctggagccactaccaggtgcccgaggagagcggctgccacaccaccaccaccagcagcctggtgagcctgtgcagcagcctgagactgttcagcagcatcgacgacggcagcggcttcgccttccccgaccaggtgctggccatgtggacccaggagggcatccagaacggcagagagatcctgcagagcctggacttcagcgtggacgagaaggtgaacctgctggagctgacctgggccctggacaacgagctgatgaccgtggacagcgccgtgcagcaggccgccctggcctgctaccaccaggagctgagctaccagcagggccaggtggagcagctggccagagagagagacaaggccagacaggacctggagagagccgagaagagaaacctggagttcgtgaaggagatggacgactgccacagcaccctggagcagctgaccgagaagaagatcaagcacctggagcagggctacagagagagactgagcctgctgagaagcgaggtggaggccgagagagagctgttctgggagcaggcccacagacagagagccgccctggagtgggacgtgggcagactgcaggccgaggaggccggcctgagagagaagctgaccctggccctgaaggagaacagcagactgcagaaggagatcgtggaggtggtggagaagctgagcgacagcgagagactggccctgaagctgcagaaggacctggagttcgtgctgaaggacaagctggagccccagagcgccgagctgctggcccaggaggagagattcgccgccgtgctgaaggagtacgagctgaagtgcagagacctgcaggacagaaacgacgagctgcaggccgagctggagggcctgtgggccagactgcccaagaacagacacagccccagctggagccccgacggcagaagaagacagctgcccggcctgggccccgccggcatcagcttcctgggcaacagcgcccccgtgagcatcgagaccgagctgatgatggagcaggtgaaggagcactaccaggacctgagaacccagctggagaccaaggtgaactactacgagagagagatcgccgccctgaagagaaacttcgagaaggagagaaaggacatggagcaggccagaagaagagaggtgagcgtgctggagggccagaaggccgacctggaggagctgcacgagaagagccaggaggtgatctggggcctgcaggagcagctgcaggacaccgccagaggccccgagcccgagcagatgggcctggccccctgctgcacccaggccctgtgcggcctggccctgagacaccacagccacctgcagcagatcagaagagaggccgaggccgagctgagcggcgagctgagcggcctgggcgccctgcccgccagaagagacctgaccctggagctggaggagcccccccagggccccctgcccagaggcagccagagaagcgagcagctggagctggagagagccctgaagctgcagccctgcgccagcgagaagagagcccagatgtgcgtgagcctggccctggaggaggaggagctggagctggccagaggcaagagagtggacggccccagcctggaggccgagatgcaggccctgcccaaggacggcctggtggccggcagcggccaggagggcaccagaggcctgctgcccctgagacccggctgcggcgagagacccctggcctggctggcccccggcgacggcagagagagcgaggaggccgccggcgccggccccagaagaagacaggcccaggacaccgaggccacccagagccccgcccccgcccccgcccccgccagccacggccccagcgagagatggagcagaatgcagccctgcggcgtggacggcgacatcgtgcccaaggagcccgagcccttcggcgccagcgccgccggcctggagcagcccggcgccagagagctgcccctgctgggcaccgagagagacgccagccagacccagcccagaatgtgggagccccccctgagacccgccgccagctgcagaggccaggccgagagactgcaggccatccaggaggagagagccagaagctggagcagaggcacccaggagcaggccagcgagcagcaggccagagccgagggcgccctggagcccggctgccacaagcacagcgtggaggtggccagaagaggcagcctgcccagccacctgcagctggccgacccccagggcagctggcaggagcagctggccgcccccgaggagggcgagaccaagatcgccctggagagagagaaggacgacatggagaccaagctgctgcacctggaggacgtggtgagagccctggagaagcacgtggacctgagagagaacgacagactggagttccacagactgagcgaggagaacaccctgctgaagaacgacctgggcagagtgagacaggagctggaggccgccgagagcacccacgacgcccagagaaaggagatcgaggtgctgaagaaggacaaggagaaggcctgcagcgagatggaggtgctgaacagacagaaccagaactacaaggaccagctgagccagctgaacgtgagagtgctgcagctgggccaggaggccagcacccaccaggcccagaacgaggagcacagagtgaccatccagatgctgacccagagcctggaggaggtggtgagaagcggccagcagcagagcgaccagatccagaagctgagagtggagctggagtgcctgaaccaggagcaccagagcctgcagctgccctggagcgagctgacccagaccctggaggagagccaggaccaggtgcagggcgcccacctgagactgagacaggcccaggcccagcacctgcaggaggtgagactggtgccccaggacagagtggccgagctgcacagactgctgagcctgcagggcgagcaggccagaagaagactggacgcccagagagaggagcacgagaagcagctgaaggccaccgaggagagagtggaggaggccgagatgatcctgaagaacatggagatgctgctgcaggagaaggtggacaagctgaaggagcagttcgagaagaacaccaagagcgacctgctgctgaaggagctgtacgtggagaacgcccacctggtgagagccctgcaggccaccgaggagaagcagagaggcgccgagaagcagagcagactgctggaggagaaggtgagagccctgaacaagctggtgagcagaatcgcccccgccgccctgagcgtgtag

SEQ ID NO: 9573 - DNA, 4383 bp, synthetic construct
  source 1..4383: mol_type = other DNA; note = Synthetic coding sequence
atggccggcagacccctgagaatcggcgaccagctggtgctggaggaggactacgacgagacctacatccccagcgagcaggagatcctggagttcgccagagagatcggcatcgaccccatcaaggagcccgagctgatgtggctggccagagagggcatcgtggcccccctgcccggcgagtggaagccctgccaggacatcaccggcgacatctactacttcaacttcgccaacggccagagcatgtgggaccacccctgcgacgagcactacagaagcctggtgatccaggagagagccaagctgagcaccagcggcgccatcaagaagaagaagaagaagaaggagaagaaggacaagaaggacagagacccccccaagagcagcctggccctgggcagcagcctggcccccgtgcacgtgcccctgggcggcctggcccccctgagaggcctggtggacaccccccccagcgccctgagaggcagccagagcgtgagcctgggcagcagcgtggagagcggcagacagctgggcgagctgatgctgcccagccagggcctgaagaccagcgcctacaccaagggcctgctgggcagcatctacgaggacaagaccgccctgagcctgctgggcctgggcgaggagaccaacgaggaggacgaggaggagagcgacaaccagagcgtgcacagcagcagcgagcccctgagaaacctgcacctggacatcggcgccctgggcggcgacttcgagtacgaggagagcctgagaaccagccagcccgaggagaagaaggacgtgagcctggacagcgacgccgccggcccccccaccccctgcaagcccagcagccccggcgccgacagcagcctgagcagcgccgtgggcaagggcagacagggcagcggcgccagacccggcctgcccgagaaggaggagaacgagaagagcgagcccaagatctgcagaaacctggtgacccccaaggccgaccccaccggcagcgagcccgccaaggccagcgagaaggaggcccccgaggacaccgtggacgccggcgaggagggcagcagaagagaggaggccgccaaggagcccaagaagaaggccagcgccctggaggagggcagcagcgacgccagccaggagctggagatcagcgagcacatgaaggagccccagctgagcgacagcatcgccagcgaccccaagagcttccacggcctggacttcggcttcagaagcagaatcagcgagcacctgctggacgtggacgtgctgagccccgtgctgggcggcgcctgcagacaggcccagcagcccctgggcatcgaggacaaggacgacagccagagcagccaggacgagctgcagagcaagcagagcaagggcctggaggagagactgagcccccccctgccccacgaggagagagcccagagcccccccagaagcctggccaccgaggaggagcccccccagggccccgagggccagcccgagtggaaggaggccgaggagctgggcgaggacagcgccgccagcctgagcctgcagctgagcctgcagagagagcaggcccccagcccccccgccgcctgcgagaagggcaaggagcagcacagccaggccgaggagctgggccccggccaggaggaggccgaggaccccgaggagaaggtggccgtgagccccaccccccccgtgagccccgaggtgagaagcaccgagcccgtggccccccccgagcagctgagcgaggccgccctgaaggccatggaggaggccgtggcccaggtgctggagcaggaccagagacacctgctggagagcaagcaggagaagatgcagcagctgagagagaagctgtgccaggaggaggaggaggagatcctgagactgcaccagcagaaggagcagagcctgagcagcctgagagagagactgcagaaggccatcgaggaggaggaggccagaatgagagaggaggagagccagagactgagctggctgagagcccaggtgcagagcagcacccaggccgacgaggaccagatcagagccgagcaggaggccagcctgcagaagctgagagaggagctggagagccagcagaaggccgagagagccagcctggagcagaagaacagacagatgctggagcagctgaaggaggagatcgaggccagcgagaagagcgagcaggccgccctgaacgccgccaaggagaaggccctgcagcagctgagagagcagctggagggcgagagaaaggaggccgtggccaccctggagaaggagcacagcgccgagctggagagactgtgcagcagcctggaggccaagcacagagaggtggtgagcagcctgcagaagaagatccaggaggcccagcagaaggaggaggcccagctgcagaagtgcctgggccaggtggagcacagagtgcaccagaagagctaccacgtggccggctacgagcacgagctgagcagcctgctgagagagaagagacaggaggtggagggcgagcacgagagaagactggacaagatgaaggaggagcaccagcaggtgatggccaaggccagagagcagtacgaggccgaggagagaaagcagagagccgagctgctgggccacctgaccggcgagctggagagactgcagagagcccacgagagagagctggagaccgtgagacaggagcagcacaagagactggaggacctgagaagaagacacagagagcaggagagaaagctgcaggacctggagctggacctggagaccagagccaaggacgtgaaggccagactggccctgctggaggtgcaggaggagaccgccagaagagagaagcagcagctgctggacgtgcagagacaggtggccctgaagagcgaggaggccaccgccacccaccagcagctggaggaggcccagaaggagcacacccacctgctgcagagcaaccagcagctgagagagatcctggacgagctgcaggccagaaagctgaagctggagagccaggtggacctgctgcaggcccagagccagcagctgcagaagcacttcagcagcctggaggccgaggcccagaagaagcagcacctgctgagagaggtgaccgtggaggagaacaacgccagcccccacttcgagcccgacctgcacatcgaggacctgagaaagagcctgggcaccaaccagaccaaggaggtgagcagcagcctgagccagagcaaggaggacctgtacctggacagcctgagcagccacaacgtgtggcacctgctgagcgccgagggcgtggccctgagaagcgccaaggagttcctggtgcagcagaccagaagcatgagaagaagacagaccgccctgaaggccgcccagcagcactggagacacgagctggccagcgcccaggaggtggccaaggacccccccggcatcaaggccctggaggacatgagaaagaacctggagaaggagaccagacacctggacgagatgaagagcgccatgagaaagggccacaacctgctgaagaagaaggaggagaagctgaaccagctggagagcagcctgtgggaggaggccagcgacgagggcaccctgggcggcagccccaccaagaaggccgtgaccttcgacctgagcgacatggacagcctgagcagcgagagcagcgagagcttcagccccccccacagagagtggtggagacagcagagaatcgacagcacccccagcctgaccagcagaaagatccacggcctgagccacagcctgagacagatcagcagccagctgagcagcgtgctgagcatcctggacagcctgaacccccagagccccccccccctgctggccagcatgcccgcccagctgccccccagagaccccaagagcacccccacccccacctactacggcagcctggccagattcagcgccctgagcagcgccacccccaccagcacccagtgggcctgggacagcggccagggccccagactgcccagcagcgtggcccagaccgtggacgacttcctgctggagaagtggagaaagtacttccccagcggcatccccctgctgagcaacagccccacccccctggagagcagactgggctacatgagcgccagcgagcagctgagactgctgcagcacagccacagccaggtgcccgaggccggcagcaccaccttccagggcatcatcgaggccaacagaagatggctggagagagtgaagaacgaccccagactgcccctgttcagcagcacccccaagcccaaggccaccctgagcctgctgcagctgggcctggacgagcacaacagagtgaaggtgtacagattctag

SEQ ID NO: 9574 - DNA, 1881 bp, synthetic construct
  source 1..1881: mol_type = other DNA; note = Synthetic coding sequence
atgatggccaacgacgccaagcccgacgtgaagaccgtgcaggtgctgagagacaccgccaacagactgagaatccacagcatcagagccacctgcgccagcggcagcggccagctgaccagctgctgcagcgccgccgaggtggtgagcgtgctgttcttccacaccatgaagtacaagcagaccgaccccgagcaccccgacaacgacagattcatcctgagcagaggccacgccgcccccatcctgtacgccgcctgggtggaggtgggcgacatcagcgagagcgacctgctgaacctgagaaagctgcacagcgacctggagagacaccccacccccagactgcccttcgtggacgtggccaccggcagcctgggccagggcctgggcaccgcctgcggcatggcctacaccggcaagtacctggacaaggccagctacagagtgttctgcctgatgggcgacggcgagagcagcgagggcagcgtgtgggaggccttcgccttcgccagccactacaacctggacaacctggtggccgtgttcgacgtgaacagactgggccagagcggccccgcccccctggagcacggcgccgacatctaccagaactgctgcgaggccttcggctggaacacctacctggtggacggccacgacgtggaggccctgtgccaggccttctggcaggccagccaggtgaagaacaagcccaccgccatcgtggccaagaccttcaagggcagaggcatccccaacatcgaggacgccgagaactggcacggcaagcccgtgcccaaggagagagccgacgccatcgtgaagctgatcgagagccagatccagaccaacgagaacctgatccccaagagccccgtggaggacagcccccagatcagcatcaccgacatcaagatgaccagcccccccgcctacaaggtgggcgacaagatcgccacccagaagacctacggcctggccctggccaagctgggcagagccaacgagagagtgatcgtgctgagcggcgacaccatgaacagcaccttcagcgagatcttcagaaaggagcaccccgagagattcatcgagtgcatcatcgccgagcagaacatggtgagcgtggccctgggctgcgccaccagaggcagaaccatcgccttcgccggcgccttcgccgccttcttcaccagagccttcgaccagctgagaatgggcgccatcagccaggccaacatcaacctgatcggcagccactgcggcgtgagcaccggcgaggacggcgtgagccagatggccctggaggacctggccatgttcagaagcatccccaactgcaccgtgttctaccccagcgacgccatcagcaccgagcacgccatctacctggccgccaacaccaagggcatgtgcttcatcagaaccagccagcccgagaccgccgtgatctacaccccccaggagaacttcgagatcggccaggccaaggtggtgagacacggcgtgaacgacaaggtgaccgtgatcggcgccggcgtgaccctgcacgaggccctggaggccgccgaccacctgagccagcagggcatcagcgtgagagtgatcgaccccttcaccatcaagcccctggacgccgccaccatcatcagcagcgccaaggccaccggcggcagagtgatcaccgtggaggaccactacagagagggcggcatcggcgaggccgtgtgcgccgccgtgagcagagagcccgacatcctggtgcaccagctggccgtgagcggcgtgccccagagaggcaagaccagcgagctgctggacatgttcggcatcagcaccagacacatcatcgccgccgtgaccctgaccctgatgaagtag

SEQ ID NO: 9575 - DNA, 999 bp, synthetic construct
  source 1..999: mol_type = other DNA; note = Synthetic coding sequence
atggccaccatcaagagcgagctgatcaagaacttcgccgaggaggaggccatccaccacaacaagatcagcatcgtgggcaccggcagcgtgggcgtggcctgcgccatcagcatcctgctgaagggcctgagcgacgagctggtgctggtggacgtggacgagggcaagctgaagggcgagaccatggacctgcagcacggcagccccttcatgaagatgcccaacatcgtgagcagcaaggactacctggtgaccgccaacagcaacctggtgatcatcaccgccggcgccagacagaagaagggcgagaccagactggacctggtgcagagaaacgtgagcatcttcaagctgatgatccccaacatcacccagtacagcccccactgcaagctgctgatcgtgaccaaccccgtggacatcctgacctacgtggcctggaagctgagcggcttccccaagaacagagtgatcggcagcggctgcaacctggacagcgccagattcagatacttcatcggccagagactgggcatccacagcgagagctgccacggcctgatcctgggcgagcacggcgacagcagcgtgcccgtgtggagcggcgtgaacatcgccggcgtgcccctgaaggacctgaaccccgacatcggcaccgacaaggaccccgagcagtgggagaacgtgcacaagaaggtgatcagcagcggctacgagatggtgaagatgaagggctacaccagctggggcatcagcctgagcgtggccgacctgaccgagagcatcctgaagaacctgagaagagtgcaccccgtgagcaccctgagcaagggcctgtacggcatcaacgaggacatcttcctgagcgtgccctgcatcctgggcgagaacggcatcaccgacctgatcaaggtgaagctgaccctggaggaggaggcctgcctgcagaagagcgccgagaccctgtgggagatccagaaggagctgaagctgtag

SEQ ID NO: 9576 - DNA, 972 bp, synthetic construct
  source 1..972: mol_type = other DNA; note = Synthetic coding sequence
atgcccgagatgcccgaggacatggagcaggaggaggtgaacatccccaacagaagagtgctggtgaccggcgccaccggcctgctgggcagagccgtgcacaaggagttccagcagaacaactggcacgccgtgggctgcggcttcagaagagccagacccaagttcgagcaggtgaacctgctggacagcaacgccgtgcaccacatcatccacgacttccagccccacgtgatcgtgcactgcgccgccgagagaagacccgacgtggtggagaaccagcccgacgccgccagccagctgaacgtggacgccagcggcaacctggccaaggaggccgccgccgtgggcgccttcctgatctacatcagcagcgactacgtgttcgacggcaccaaccccccctacagagaggaggacatccccgcccccctgaacctgtacggcaagaccaagctggacggcgagaaggccgtgctggagaacaacctgggcgccgccgtgctgagaatccccatcctgtacggcgaggtggagaagctggaggagagcgccgtgaccgtgatgttcgacaaggtgcagttcagcaacaagagcgccaacatggaccactggcagcagagattccccacccacgtgaaggacgtggccaccgtgtgcagacagctggccgagaagagaatgctggaccccagcatcaagggcaccttccactggagcggcaacgagcagatgaccaagtacgagatggcctgcgccatcgccgacgccttcaacctgcccagcagccacctgagacccatcaccgacagccccgtgctgggcgcccagagacccagaaacgcccagctggactgcagcaagctggagaccctgggcatcggccagagaacccccttcagaatcggcatcaaggagagcctgtggcccttcctgatcgacaagagatggagacagaccgtgttccactag

SEQ ID NO: 9577 - DNA, 3285 bp, synthetic construct
  source 1..3285: mol_type = other DNA; note = Synthetic coding sequence
atggccgagagcagcagcgagagcgaccacttcagatgcagagacagactgagcccctgggccgccagaagcacccacagaggcaccagaagcctgcccaccgtggaggtgaccgagaaggtgaacaccatcaccagcaccctgcaggacaccagcagaaacctgagacaggtggaccagatgctgggcagatacagagagtacagcaacggccaggccggcgccatcgagcacctgaaggagagcctggagcagagcatcgaccagctgagaagccagagactgctgagaaacagcggcggcagaagcatcagcgtgaccagcctgagcgccagcgacctggacggcggcaccggcagcgagctgcaccacttcccccccaccagccccctgaaggactacggcgacccccagggcatcaagagaatgagaagcagaaccggcgtgagattcgtgcaggagaccgacgacatgacccagctgcacggcttccaccagagcctgagagacctgagcagcgagcagatcagactgggcgacgacttcaacagagagctgagcagaagaagcagaagcgacgccgagaccaagagagccctggaggagctgaccgagaagctgaacgaggcccagaagcaggaggtggtgagcgacagagtggagagaagactgcaggagctggagagagagatgagaaccgagagagagctggtggagagaagacaggaccagctgggcctgatgagcctgcagctgcaggaggccctgaagaagcaggaggccaaggccgacgagcacgagggcgccatcaagaacaagctgagacagaccgagaccgagaagaaccagctggagcaggagctggagctgagcagaagactgctgaaccagagcgagggcagcagagagaccctgctgcaccaggtggaggagctgagaacccagctgaccaaggccgagggcgacagaaagggcctgcagcaccaggtgagccagatcagcaagcagcagagcaactaccaggacgagcagggcgaggactggagattcagaagaggcgtggagagagagaagcaggacctggagaagcagatgagcgacctgagagtgcagctgaacttcagcgccatggccagcgagctggaggaggtgaagagatgcatggagagaaaggacaaggagaaggcccacctggccagccaggtggagaacctgaccagagagctggagaacggcgagaagcagcagctgcagatgctggacagactgaaggagatccagaaccacttcgacacctgcgaggccgagagaaagcacgccgacctgcagatcagcgagctgaccagacacgccgaggacgccaccaagcaggccgagagatacctgagcgagctgcagcagagcgaggccctgaaggaggaggccgagaagagaagagaggacctgaagctgaaggcccaggagagcatcagacagtggaagctgaagcacaagaagctggagagagccctggagaagcagagcgagaccgtggacgagctgaccggcaagaacaaccagatcctgaaggagaaggacgagctgaagacccagctgtacgccgccctgcagcagatcgagaacctgagaaaggagctgaacgacgtgctgaccaagagagccctgcaggaggaggagctgcacagcaaggaggagaagctgagagacatcaagagccaccaggccgacctggagctggaggtgaagaacagcctggacaccatccacagactggagagcgagctgaagaagcagagcaagatccagagccagatgaaggtggagaaggcccacctggaggaggagatcgccgagctgaagaagagccaggcccaggacaaggccaagctgctggagatgcaggagagcatcaaggacctgagcgccatcagagccgacctggccaacaagctggccgaggaggagagagccaagaaggccgtgctgaaggacctgagcgacctgaccgcccaggccaagagcagagacgaggagaccgccaccatcatcacccagctgaagctggagagagacgtgcaccagagagagctgaaggacctgaccagcagcctgcagagcgtgaagaccaagcacgagcagaacatccaggagctgatgaagcacttcaagaaggagaagagcgaggccgagaaccacatcagaaccctgaaggccgagagcctggaggagaagaacatggccaagatccacagaggccagctggagaagctgaagagccagtgcgacagactgaccgaggagctgacccagaacgagaacgagaacaagaagctgaagctgaagtaccagtgcctgaaggaccagctggaggagagagagaagcacatcagcatcgaggaggagcacctgagaagaatggaggaggccagactgcagctgaaggaccagctgctgtgcctggagaccgagcaggagagcatcctgggcgtgatcggcaaggagatcgacgccgcctgcaagaccttcagcaaggacagcgtggagaagctgaaggtgttcagcagcggccccgacatccactacgacccccacagatggctggccgagagcaagaccaagctgcagtggctgtgcgaggagctgaaggagagagagaacagagagaagaacctgagacaccagctgatgctgtgcagacagcagctgagaaacctgaccgagaacaaggagagcgagctgcagtgcctgttccagcagatcgagagacaggagcagctgctggacgagatccacagagagaagagagacctgctggaggagacccagagaaaggacgaggagatgggcagcctgcaggacagagtgatcgccctggagaccagcacccaggtggccctggaccacctggagagcgtgcccgagaagctgagcctgctggaggacttcaaggacttcagagacagctgcagcagcagcgagagaaccgacggcagatacagcaagtacagagtgagaagaaacagcctgcagcaccaccaggacgacaccaagtacagaaccaagagcttcaagggcgacagaaccttcctggagggcagccacaccagaggcctggaccacagcagcagctggcaggaccacagcagattcctgagcagccccagattcagctacgtgaacagcttcaccaagagaaccgtggcccccgacagcgccagcaacaaggaggacgccaccatgaacggcaccagcagccagcccaagaaggaggagtacggcagctag

SEQ ID NO: 9578 - DNA, 1011 bp, synthetic construct
  source 1..1011: mol_type = other DNA; note = Synthetic coding sequence
atgaagaaggagcacgtgctgcactgccagttcagcgcctggtaccccttcttcagaggcgtgaccatcaagagcgtgatcctgcccctgccccagaacgtgaaggactacctgctggacgacggcaccctggtggtgagcggcagagacgacccccccacccacagccagcccgacagcgacgacgaggccgaggagatccagtggagcgacgacgagaacaccgccaccctgaccgcccccgagttccccgagttcgccaccaaggtgcaggaggccatcaacagcctgggcggcagcgtgttccccaagctgaactggagcgcccccagagacgcctactggatcgccatgaacagcagcctgaagtgcaagaccctgagcgacatcttcctgctgttcaagagcagcgacttcatcaccagagacttcacccagcccttcatccactgcaccgacgacagccccgacccctgcatcgagtacgagctggtgctgagaaagtggtgcgagctgatccccggcgccgagttcagatgcttcgtgaaggagaacaagctgatcggcatcagccagagagactacacccagtactacgaccacatcagcaagcagaaggaggagatcagaagatgcatccaggacttcttcaagaagcacatccagtacaagttcctggacgaggacttcgtgttcgacatctacagagacagcagaggcaaggtgtggctgatcgacttcaaccccttcggcgaggtgaccgacagcctgctgttcacctgggaggagctgatcagcgagaacaacctgaacggcgacttcagcgaggtggacgcccaggagcaggacagccccgccttcagatgcaccaacagcgaggtgaccgtgcagcccagcccctacctgagctacagactgcccaaggacttcgtggacctgagcaccggcgaggacgcccacaagctgatcgacttcctgaagctgaagagaaaccagcaggaggacgactag

SEQ ID NO: 9579 - DNA, 1248 bp, synthetic construct
  source 1..1248: mol_type = other DNA; note = Synthetic coding sequence
atgaagctgagcctgaccaaggtggtgaacggctgcagactgggcaagatcaagaacctgggcaagaccggcgaccacaccatggacatccccggctgcctgctgtacaccaagaccggcagcgccccccacctgacccaccacaccctgcacaacatccacggcgtgcccgccatggcccagctgaccctgagcagcctggccgagcaccacgaggtgctgaccgagtacaaggagggcgtgggcaagttcatcggcatgcccgagagcctgctgtactgcagcctgcacgaccccgtgagcccctgccccgccggctacgtgaccaacaagagcgtgagcgtgtggagcgtggccggcagagtggagatgaccgtgagcaagttcatggccatccagaaggccctgcagcccgactggttccagtgcctgagcgacggcgaggtgagctgcaaggaggccaccagcatcaagagagtgagaaagagcgtggacagaagcctgctgttcctggacaactgcctgagactgcaggaggagagcgaggtgctgcagaagagcgtgatcatcggcgtgatcgagggcggcgacgtgatggaggagagactgagaagcgccagagagaccgccaagagacccgtgggcggcttcctgctggacggcttccagggcaaccccaccaccctggaggccagactgagactgctgagcagcgtgaccgccgagctgcccgaggacaagcccagactgatcagcggcgtgagcagacccgacgaggtgctggagtgcatcgagagaggcgtggacctgttcgagagcttcttcccctaccaggtgaccgagagaggctgcgccctgaccttcagcttcgactaccagcccaaccccgaggagaccctgctgcagcagaacggcacccaggaggagatcaagtgcatggaccagatcaagaagatcgagaccaccggctgcaaccaggagatcaccagcttcgagatcaacctgaaggagaagaagtaccaggaggacttcaaccccctggtgagaggctgcagctgctactgctgcaagaaccacaccagagcctacatccaccacctgctggtgaccaacgagctgctggccggcgtgctgctgatgatgcacaacttcgagcactacttcggcttcttccactacatcagagaggccctgaagagcgacaagctggcccagctgaaggagctgatccacagacaggccagctag

SEQ ID NO: 9580 - DNA, 1770 bp, synthetic construct
  source 1..1770: mol_type = other DNA; note = Synthetic coding sequence
atgcccaccgtgagcgtgaagagagacctgctgttccaggccctgggcagaacctacaccgacgaggagttcgacgagctgtgcttcgagttcggcctggagctggacgagatcaccagcgagaaggagatcatcagcaaggagcagggcaacgtgaaggccgccggcgccagcgacgtggtgctgtacaagatcgacgtgcccgccaacagatacgacctgctgtgcctggagggcctggtgagaggcctgcaggtgttcaaggagagaatcaaggcccccgtgtacaagagagtgatgcccgacggcaagatccagaagctgatcatcaccgaggagaccgccaagatcagacccttcgccgtggccgccgtgctgagaaacatcaagttcaccaaggacagatacgacagcttcatcgagctgcaggagaagctgcaccagaacatctgcagaaagagagccctggtggccatcggcacccacgacctggacaccctgagcggccccttcacctacaccgccaagagacccagcgacatcaagttcaagcccctgaacaagaccaaggagtacaccgcctgcgagctgatgaacatctacaagaccgacaaccacctgaagcactacctgcacatcatcgagaacaagcccctgtaccccgtgatctacgacagcaacggcgtggtgctgagcatgccccccatcatcaacggcgaccacagcagaatcaccgtgaacaccagaaacatcttcatcgagtgcaccggcaccgacttcaccaaggccaagatcgtgctggacatcatcgtgaccatgttcagcgagtactgcgagaaccagttcaccgtggaggccgccgaggtggtgttccccaacggcaagagccacaccttccccgagctggcctacagaaaggagatggtgagagccgacctgatcaacaagaaggtgggcatcagagagacccccgagaacctggccaagctgctgaccagaatgtacctgaagagcgaggtgatcggcgacggcaaccagatcgagatcgagatcccccccaccagagccgacatcatccacgcctgcgacatcgtggaggacgccgccatcgcctacggctacaacaacatccagatgaccctgcccaagacctacaccatcgccaaccagttccccctgaacaagctgaccgagctgctgagacacgacatggccgccgccggcttcaccgaggccctgaccttcgccctgtgcagccaggaggacatcgccgacaagctgggcgtggacatcagcgccaccaaggccgtgcacatcagcaaccccaagaccgccgagttccaggtggccagaaccaccctgctgcccggcctgctgaagaccatcgccgccaacagaaagatgcccctgcccctgaagctgttcgagatcagcgacatcgtgatcaaggacagcaacaccgacgtgggcgccaagaactacagacacctgtgcgccgtgtactacaacaagaaccccggcttcgagatcatccacggcctgctggacagaatcatgcagctgctggacgtgccccccggcgaggacaagggcggctacgtgatcaaggccagcgagggccccgccttcttccccggcagatgcgccgagatcttcgccagaggccagagcgtgggcaagctgggcgtgctgcaccccgacgtgatcaccaagttcgagctgaccatgccctgcagcagcctggagatcaacgtgggccccttcctgtag

SEQ ID NO: 9581 - DNA, 477 bp, synthetic construct
  source 1..477: mol_type = other DNA; note = Synthetic coding sequence
atggccgcccagggcgtgggccccggccccggcagcgccgccccccccggcctggaggccgccagacagaagctggccctgagaagaaagaaggtgctgagcaccgaggagatggagctgtacgagctggcccaggccgccggcggcgccatcgaccccgacgtgttcaagatcctggtggacctgctgaagctgaacgtggcccccctggccgtgttccagatgctgaagagcatgtgcgccggccagagactggccagcgagccccaggaccccgccgccgtgagcctgcccaccagcagcgtgcccgagaccagaggcagaaacaagggcagcgccgccctgggcggcgccctggccctggccgagagaagcagcagagagggcagcagccagagaatgcccagacagcccagcgccaccagactgcccaagggcggcggccccggcaagagccccaccagaggcagcacctag

SEQ ID NO: 9582 - DNA, 675 bp, synthetic construct
  source 1..675: mol_type = other DNA; note = Synthetic coding sequence
atggtggaggacgagctggccctgttcgacaagagcatcaacgagttctggaacaagttcaagagcaccgacaccagctgccagatggccggcctgagagacacctacaaggacagcatcaaggccttcgccgagaagctgagcgtgaagctgaaggaggaggagagaatggtggagatgttcctggagtaccagaaccagatcagcagacagaacaagctgatccaggagaagaaggacaacctgctgaagctgatcgccgaggtgaagggcaagaagcaggagctggaggtgctgaccgccaacatccaggacctgaaggaggagtacagcagaaagaaggagaccatcagcaccgccaacaaggccaacgccgagagactgaagagactgcagaagagcgccgacctgtacaaggacagactgggcctggagatcagaaagatctacggcgagaagctgcagttcatcttcaccaacatcgaccccaagaaccccgagagccccttcatgttcagcctgcacctgaacgaggccagagactacgaggtgagcgacagcgccccccacctggagggcctggccgagttccaggagaacgtgagaaagaccaacaacttcagcgccttcctggccaacgtgagaaaggccttcaccgccaccgtgtacaactag

SEQ ID NO: 9583 - DNA, 1728 bp, synthetic construct
  source 1..1728: mol_type = other DNA; note = Synthetic coding sequence
atgaagctgaccgacagcaccaagggctggatcgtgtgggccgccctggacagcagcatgagaggcatgagcctgagcgccggcagcagccccctgcacagccccaagatcaccccccacaccagccccgcccccagaagaagaagccacacccccaaccccgccagctacatggtgcccagcagcgccagcaccagcgtgaacaaccccgtgagccagacccccagcagcggccaggtgatccagaaggagaccgtgggcggcaccacctacttctacaccgacaccacccccgcccccctgaccggcatggtgttccccaactaccacatctacccccccaccgccccccacgtggcctacatgcagcccaaggccaacgcccccagcttcttcatggccgacgagctgagacaggagctgatcaacagacacctgatcaccatggcccagatcgaccaggccgacatgcccgccgtgcccaccgaggtggacagctaccacagcctgttccccctggagcccctgcccccccccaacagaatccagaagagcagcaacttcggctacatcaccagctgctacaaggccgtgaacagcaaggacgacctgccctactgcctgagaagaatccacggcttcagactggtgaacaccaagtgcatggtgctggtggacatgtggaagaagatccagcacagcaacatcgtgaccctgagagaggtgttcaccaccaaggccttcgccgagcccagcctggtgttcgcctacgacttccacgccggcggcgagaccatgatgagcagacacttcaacgaccccaacgccgacgcctacttcaccaagagaaagtggggccagcacgagggccccctgcccagacagcacgccggcctgctgcccgagagcctgatctgggcctacatcgtgcagctgagcagcgccctgagaaccatccacaccgccggcctggcctgcagagtgatggaccccaccaagatcctgatcaccggcaagaccagactgagagtgaactgcgtgggcgtgttcgacgtgctgaccttcgacaacagccagaacaacaaccccctggccctgatggcccagtaccagcaggccgacctgatcagcctgggcaaggtggtgctggccctggcctgcaacagcctggccggcatccagagagagaacctgcagaaggccatggagctggtgaccatcaactacagcagcgacctgaagaacctgatcctgtacctgctgaccgaccagaacagaatgagaagcgtgaacgacatcatgcccatgatcggcgccagattctacacccagctggacgccgcccagatgagaaacgacgtgatcgaggaggacctggccaaggaggtgcagaacggcagactgttcagactgctggccaagctgggcaccatcaacgagagacccgagttccagaaggaccccacctggagcgagaccggcgacagatacctgctgaagctgttcagagaccacctgttccaccaggtgaccgaggccggcgccccctggatcgacctgagccacatcatcagctgcctgaacaagctggacgccggcgtgcccgagaagatcagcctgatcagcagagacgagaagagcgtgctggtggtgacctacagcgacctgaagagatgcttcgagaacaccttccaggagctgatcgccgccgccaacggccagctgtag

SEQ ID NO: 9584 - DNA, 1785 bp, synthetic construct
  source 1..1785: mol_type = other DNA; note = Synthetic coding sequence
atggagagcaaccacaagagcggcgacggcctgagcggcacccagaaggaggccgccctgagagccctggtgcagagaaccggctacagcctggtgcaggagaacggccagagaaagtacggcggccccccccccggctgggacgccgccccccccgagagaggctgcgagatcttcatcggcaagctgcccagagacctgttcgaggacgagctgatccccctgtgcgagaagatcggcaagatctacgagatgagaatgatgatggacttcaacggcaacaacagaggctacgccttcgtgaccttcagcaacaaggtggaggccaagaacgccatcaagcagctgaacaactacgagatcagaaacggcagactgctgggcgtgtgcgccagcgtggacaactgcagactgttcgtgggcggcatccccaagaccaagaagagagaggagatcctgagcgagatgaagaaggtgaccgagggcgtggtggacgtgatcgtgtaccccagcgccgccgacaagaccaagaacagaggcttcgccttcgtggagtacgagagccacagagccgccgccatggccagaagaaagctgctgcccggcagaatccagctgtggggccacggcatcgccgtggactgggccgagcccgaggtggaggtggacgaggacaccatgagcagcgtgaagatcctgtacgtgagaaacctgatgctgagcaccagcgaggagatgatcgagaaggagttcaacaacatcaagcccggcgccgtggagagagtgaagaagatcagagactacgccttcgtgcacttcagcaacagagaggacgccgtggaggccatgaaggccctgaacggcaaggtgctggacggcagccccatcgaggtgaccctggccaagcccgtggacaaggacagctacgtgagatacaccagaggcaccggcggcagaggcaccatgctgcagggcgagtacacctacagcctgggccaggtgtacgaccccaccaccacctacctgggcgcccccgtgttctacgccccccagacctacgccgccatccccagcctgcacttccccgccaccaagggccacctgagcaacagagccatcatcagagcccccagcgtgagagagatctacatgaacgtgcccgtgggcgccgccggcgtgagaggcctgggcggcagaggctacctggcctacaccggcctgggcagaggctaccaggtgaagggcgacaagagagaggacaagctgtacgacatcctgcccggcatggagctgacccccatgaaccccgtgaccctgaagccccagggcatcaagctggccccccagatcctggaggagatctgccagaagaacaactggggccagcccgtgtaccagctgcacagcgccatcggccaggaccagagacagctgttcctgtacaagatcaccatccccgccctggccagccagaaccccgccatccaccccttcaccccccccaagctgagcgccttcgtggacgaggccaagacctacgccgccgagtacaccctgcagaccctgggcatccccaccgacggcggcgacggcaccatggccaccgccgccgccgccgccaccgccttccccggctacgccgtgcccaacgccaccgcccccgtgagcgccgcccagctgaagcaggccgtgaccctgggccaggacctggccgcctacaccacctacgaggtgtaccccaccttcgccgtgaccgccagaggcgacggctacggcaccttctag

SEQ ID NO: 9585 - DNA, 1167 bp, synthetic construct
  source 1..1167: mol_type = other DNA; note = Synthetic coding sequence
atgctggagggcagctggatcaacagaagagaggacaagctgggcgtgtacagcctggtgcacttcagccccaagatgctgggcagcgtggccaccaccctgcccctgagcagcagcaacagcagcggcatgcccctgggctactacctgagcagcccccagatcagcagagtgaccatcagcaccaccggccagctgaccagcaaggccaccgtgggcagctgcagcagagtggagaacagcctggacgccagccccttcagcgtgcccaagaagcaggacgagagccccatgatcggcgacggcgaggactacttcctgagcctgttcggcgacagcaagaagctgaccgcccacagcaactacacccagaagaccctgaagtacttcagcatgatcctggaggaggtgggccagttcaccagcagcagcctgggcgacgtggagatcgccgaggtgaacgtgaagggcctgttcgtgaagctgatcaacagcagcctggacaaggagatggccatcggcgaccacatcctgcagcagaacgtgaacggccagaccatcagcctgtacagattcctgcccaacatcgtgatgcaggccaacagcaccgtgaccgtgtgggccgccgccagcgaggccaagcaccagccccccagcgacttcctgtggaaggagcaggacaagttcagagccagccccgactgcatcaccatcctgtgcaagcccaacggccaggccatcgcctggtacacccccatccactggaagcaggcctgggagaagctggacgccgacgtggagttcaacagatgcagcgtggtgagccccaccttcagaaagagagtgttccagtggaccgccagcaccgccaccatcaccaaggagaagcaggaccagcccaagaaggacatcagcaactaccaggtggagcaggcccaggtgctgctgaagagagagaaggagatcccccccaccgtgttccccaacagaagcccctggtgccagaacccctacgtgagcgcccacccctactgccccctgatcgagccccacaacaccagcaccgccggcggcagactggacagacagcccagaaccagaagcaccagacccaacagagccagcggcagcaagaagaagaagaccagcgagagccagaagcagtag

SEQ ID NO: 9586 - DNA, 744 bp, synthetic construct
  source 1..744: mol_type = other DNA; note = Synthetic coding sequence
atggaggagcagccccagatgcaggacgccgacgagcccgccgacagcggcggcgagggcagagccggcggccccccccaggtggccggcgcccaggccgcctgcagcgaggacagaatgaccctgctgctgagactgagagcccagaccaagcagcagctgctggagtacaagagcatggtggacgccagcgaggagaagacccccgagcagatcatgcaggagaagcagatcgaggccaagatcgaggacctggagaacgagatcgaggaggtgaaggtggccttcgagatcaagaagctggccctggacagaatgagactgagcaccgccctgaagaagaacctggagaagatcagcagacagagcagcgtgctgatggacaacatgaagcacctgctggagctgaacaagctgatcatgaagagccagcaggagagctgggacctggaggagaagctgctggacatcagaaagaagagactgcagctgaagcaggccagcgagagcaagctgctggagatccagaccgagaagaacaagcagaagatcgacctggacagcatggagaacagcgagagaatcaagatcatcagacagaacctgcagatggagatcaagatcaccaccgtgatccagcacgtgttccagaacctgatcctgggcagcaaggtgaactgggccgaggaccccgccctgaaggagatcgtgctgcagctggagaagaacgtggacatgatgtag

SEQ ID NO: 9587 - DNA, 1458 bp, synthetic construct
  source 1..1458: mol_type = other DNA; note = Synthetic coding sequence
atggagttcctgggcaccacccagaccgccagctactgcggccccaagaagtgctgcggcctgaccagcctgcccgccgtgcaggcccccgtgatccaggagtgctaccagccctactacctgcccggctacagatacctgaacagctggagacccagcctgttctacaagatcgccaacgtgcagacctgccccgacgagagcaccagcaccctgagaccccccaccatcctgcccaccctgagaagcgccctgttcagcagatacagcccccacgactgggaccagagcaaccagctgcaggtgagaggcgccgaggccagcagactgtgggccagcagactgaccgacgacagcatgagactgctgcaggacaaggaccagctgacccaccagatgcaggagggcacctgcagaaacctgggccagagactgagcgacatcggcttctggaagagcgagctgagctacgagctggacagactgctgaccgagaaccagaacctggagaccgtgaagagaagactggagtgcgccgccaacgaggtgaactgccccctgcaggtggccctggagtgcctgtaccacagagagaagagaatcggcatcgacctggtgcacgacaacgtggagaagaacctgatcagagaggtggacctgctgaagtgctgccaggagcagatgagaaagctggcccagagaatcgacatccagatgagagacaacagagacgcccagcacgtgctggagagagacctggaggacaagagcagcgcccagtgcatcgacgagaagtgcttcaacctgagaaacaccagcgactgcatcagcttcttccacggcatggagaagatcgacggcaccatcagcgtgcccgagacctgggccaagttcagcaacgacaacatcaagcacagccagaacatgagagccaacagcatccagctgagagaggaggccgagcacctgttcgagaccctgagcgaccagatgtggagacagttcaccgacaccaacctggccttcaacgccagaatcagcgaggtgaccgacgtgaagaacaagctgcagacccagctggccaagaccctgcaggagatcttccaggccgagaacaccatcatgctgctggagagaagcatcatggccaaggagggccccctgaaggtggcccagaccagactggagtgcagaaccagaagacccaacatggagctgtgcagagacatcccccagctgaagctggtgaacgaggtgttcaccatcgacgacaccctgcagaccctgaagctgagactgagagagacccaggacaccctgcagctgctggtgatgaccaagtgcagactggagcacgagctggccatcaaggccaacaccctgtgcatcgacaaggagaagtgcatgggcatgagaaagaccttcccctgcacccccagactggtgggccacacctag

SEQ ID NO: 9588 - DNA, 837 bp, synthetic construct
  source 1..837: mol_type = other DNA; note = Synthetic coding sequence
atgggcaagagcagcgagtggtgcgagagaatcgccggcatccagaagttcgtgctggagaagtggaccaagaaggccaagcccgaggacaccctgaacctgtgccagctgctgaacaacgacctggccagcaccgtggtgagctaccccagaagattcgtgggcctgggcaccctgcccatgcaggcccccgagctggccgtgaaggagatggagagatgcgtgaaggagctgggcttccccggcgtgcagatcggcacccacgtgaacgagtgggacctgaacgcccaggagctgttccccgtgtacgccgccgccgagagactgaagtgcagcctgttcgtgcacccctgggacatgcagatggacggcagaatggccaagtactggctgccctggctggtgggcatgcccgccgagaccaccatcgccatctgcagcatgatcatgggcggcgtgttcgagaagttccccaagctgaaggtgtgcttcgcccacggcggcggcgccttccccttcaccgtgggcagaatcagccacggcttcagcatgagacccgacctgtgcgcccaggacaaccccatgaaccccaagaagtacctgggcagcttctacaccgacgccctggtgcacgaccccctgagcctgaagctgctgaccgacgtgatcggcaaggacaaggtgatcctgggcaccgactaccccttccccctgggcgagctggagcccggcaagctgatcgagagcatggaggagttcgacgaggagaccaagaacaagctgaaggccggcaacgccctggccttcctgggcctggagagaaagcagttcgagtag

SEQ ID NO: 9589 - DNA, 2478 bp, synthetic construct
  source 1..2478: mol_type = other DNA; note = Synthetic coding sequence
atgagcagcagccccgtgaacgtgaagaagctgaaggtgagcgagctgaaggaggagctgaagaagagaagactgagcgacaagggcctgaaggccgagctgatggagagactgcaggccgccctggacgacgaggaggccggcggcagacccgccatggagcccggcaacggcagcctggacctgggcggcgacagcgccggcagaagcggcgccggcctggagcaggaggccgccgccggcggcgacgaggaggaggaggaggaggaggaggaggaggagggcatcagcgccctggacggcgaccagatggagctgggcgaggagaacggcgccgccggcgccgccgacagcggccccatggaggaggaggaggccgccagcgaggacgagaacggcgacgaccagggcttccaggagggcgaggacgagctgggcgacgaggaggagggcgccggcgacgagaacggccacggcgagcagcagccccagccccccgccacccagcagcagcagccccagcagcagagaggcgccgccaaggaggccgccggcaagagcagcggccccaccagcctgttcgccgtgaccgtggccccccccggcgccagacagggccagcagcaggccggcggcaagaagaaggccgagggcggcggcggcggcggcagacccggcgcccccgccgccggcgacggcaagaccgagcagaagggcggcgacaagaagagaggcgtgaagagacccagagaggaccacggcagaggctacttcgagtacatcgaggagaacaagtacagcagagccaagagcccccagccccccgtggaggaggaggacgagcacttcgacgacaccgtggtgtgcctggacacctacaactgcgacctgcacttcaagatcagcagagacagactgagcgccagcagcctgaccatggagagcttcgccttcctgtgggccggcggcagagccagctacggcgtgagcaagggcaaggtgtgcttcgagatgaaggtgaccgagaagatccccgtgagacacctgtacaccaaggacatcgacatccacgaggtgagaatcggctggagcctgaccaccagcggcatgctgctgggcgaggaggagttcagctacggctacagcctgaagggcatcaagacctgcaactgcgagaccgaggactacggcgagaagttcgacgagaacgacgtgatcacctgcttcgccaacttcgagagcgacgaggtggagctgagctacgccaagaacggccaggacctgggcgtggccttcaagatcagcaaggaggtgctggccggcagacccctgttcccccacgtgctgtgccacaactgcgccgtggagttcaacttcggccagaaggagaagccctacttccccatccccgaggagtacaccttcatccagaacgtgcccctggaggacagagtgagaggccccaagggccccgaggagaagaaggactgcgaggtggtgatgatgatcggcctgcccggcgccggcaagaccacctgggtgaccaagcacgccgccgagaaccccggcaagtacaacatcctgggcaccaacaccatcatggacaagatgatggtggccggcttcaagaagcagatggccgacaccggcaagctgaacaccctgctgcagagagccccccagtgcctgggcaagttcatcgagatcgccgccagaaagaagagaaacttcatcctggaccagaccaacgtgagcgccgccgcccagagaagaaagatgtgcctgttcgccggcttccagagaaaggccgtggtggtgtgccccaaggacgaggactacaagcagagaacccagaagaaggccgaggtggagggcaaggacctgcccgagcacgccgtgctgaagatgaagggcaacttcaccctgcccgaggtggccgagtgcttcgacgagatcacctacgtggagctgcagaaggaggaggcccagaagctgctggagcagtacaaggaggagagcaagaaggccctgccccccgagaagaagcagaacaccggcagcaagaagagcaacaagaacaagagcggcaagaaccagttcaacagaggcggcggccacagaggcagaggcggcttcaacatgagaggcggcaacttcagaggcggcgcccccggcaacagaggcggctacaacagaagaggcaacatgccccagagaggcggcggcggcggcggcagcggcggcatcggctacccctaccccagagcccccgtgttccccggcagaggcagctacagcaacagaggcaactacaacagaggcggcatgcccaacagaggcaactacaaccagaacttcagaggcagaggcaacaacagaggctacaagaaccagagccagggctacaaccagtggcagcagggccagttctggggccagaagccctggagccagcactaccaccagggctactactag

SEQ ID NO: 9590 - DNA, 945 bp, synthetic construct
  source 1..945: mol_type = other DNA; note = Synthetic coding sequence
atgcagaacgtgatcaacaccgtgaagggcaaggccctggaggtggccgagtacctgacccccgtgctgaaggagagcaagttcaaggagaccggcgtgatcacccccgaggagttcgtggccgccggcgaccacctggtgcaccactgccccacctggcagtgggccaccggcgaggagctgaaggtgaaggcctacctgcccaccggcaagcagttcctggtgaccaagaacgtgccctgctacaagagatgcaagcagatggagtacagcgacgagctggaggccatcatcgaggaggacgacggcgacggcggctgggtggacacctaccacaacaccggcatcaccggcatcaccgaggccgtgaaggagatcaccctggagaacaaggacaacatcagactgcaggactgcagcgccctgtgcgaggaggaggaggacgaggacgagggcgaggccgccgacatggaggagtacgaggagagcggcctgctggagaccgacgaggccaccctggacaccagaaagatcgtggaggcctgcaaggccaagaccgacgccggcggcgaggacgccatcctgcagaccagaacctacgacctgtacatcacctacgacaagtactaccagacccccagactgtggctgttcggctacgacgagcagagacagcccctgaccgtggagcacatgtacgaggacatcagccaggaccacgtgaagaagaccgtgaccatcgagaaccacccccacctgccccccccccccatgtgcagcgtgcacccctgcagacacgccgaggtgatgaagaagatcatcgagaccgtggccgagggcggcggcgagctgggcgtgcacatgtacctgctgatcttcctgaagttcgtgcaggccgtgatccccaccatcgagtacgactacaccagacacttcaccatgtag

SEQ ID NO: 9591 - DNA, 900 bp, synthetic construct
  source 1..900: mol_type = other DNA; note = Synthetic coding sequence
atggtggacaagaagctggtggtggtgttcggcggcaccggcgcccagggcggcagcgtggccagaaccctgctggaggacggcaccttcaaggtgagagtggtgaccagaaaccccagaaagaaggccgccaaggagctgagactgcagggcgccgaggtggtgcagggcgaccaggacgaccaggtgatcatggagctggccctgaacggcgcctacgccaccttcatcgtgaccaactactgggagagctgcagccaggagcaggaggtgaagcagggcaagctgctggccgacctggccagaagactgggcctgcactacgtggtgtacagcggcctggagaacatcaagaagctgaccgccggcagactggccgccgcccacttcgacggcaagggcgaggtggaggagtacttcagagacatcggcgtgcccatgaccagcgtgagactgccctgctacttcgagaacctgctgagccacttcctgccccagaaggcccccgacggcaagagctacctgctgagcctgcccaccggcgacgtgcccatggacggcatgagcgtgagcgacctgggccccgtggtgctgagcctgctgaagatgcccgagaagtacgtgggccagaacatcggcctgagcacctgcagacacaccgccgaggagtacgccgccctgctgaccaagcacaccagaaaggtggtgcacgacgccaagatgacccccgaggactacgagaagctgggcttccccggcgccagagacctggccaacatgttcagattctacgccctgagacccgacagagacatcgagctgaccctgagactgaaccccaaggccctgaccctggaccagtggctggagcagcacaagggcgacttcaacctgctgtag

SEQ ID NO: 9592 - DNA, 2571 bp, synthetic construct
  source 1..2571: mol_type = other DNA; note = Synthetic coding sequence
atggacatcagcaagggcctgcccggcatgcagggcggcctgcacatctggatcagcgagaacagaaagatggtgcccgtgcccgagggcgcctacggcaacttcttcgaggagcactgctacgtgatcctgcacgtgccccagagccccaaggccacccagggcgccagcagcgacctgcactactgggtgggcaagcaggccggcgccgaggcccagggcgccgccgaggccttccagcagagactgcaggacgagctgggcggccagaccgtgctgcacagagaggcccagggccacgagagcgactgcttctgcagctacttcagacccggcatcatctacagaaagggcggcctggccagcgacctgaagcacgtggagaccaacctgttcaacatccagagactgctgcacatcaagggcagaaagcacgtgagcgccaccgaggtggagctgagctggaacagcttcaacaagggcgacatcttcctgctggacctgggcaagatgatgatccagtggaacggccccaagaccagcatcagcgagaaggccagaggcctggccctgacctacagcctgagagacagagagagaggcggcggcagagcccagatcggcgtggtggacgacgaggccaaggcccccgacctgatgcagatcatggaggccgtgctgggcagaagagtgggcagcctgagagccgccacccccagcaaggacatcaaccagctgcagaaggccaacgtgagactgtaccacgtgtacgagaagggcaaggacctggtggtgctggagctggccaccccccccctgacccaggacctgctgcaggaggaggacttctacatcctggaccagggcggcttcaagatctacgtgtggcagggcagaatgagcagcctgcaggagagaaaggccgccttcagcagagccgtgggcttcatccaggccaagggctaccccacctacaccaacgtggaggtggtgaacgacggcgccgagagcgccgccttcaagcagctgttcagaacctggagcgagaagagaagaagaaaccagaagctgggcggcagagacaagagcatccacgtgaagctggacgtgggcaagctgcacacccagcccaagctggccgcccagctgagaatggtggacgacggcagcggcaaggtggaggtgtggtgcatccaggacctgcacagacagcccgtggaccccaagagacacggccagctgtgcgccggcaactgctacctggtgctgtacacctaccagagactgggcagagtgcagtacatcctgtacctgtggcagggccaccaggccaccgccgacgagatcgaggccctgaacagcaacgccgaggagctggacgtgatgtacggcggcgtgctggtgcaggagcacgtgaccatgggcagcgagcccccccacttcctggccatcttccagggccagctggtgatcttccaggagagagccggccaccacggcaagggccagagcgccagcaccaccagactgttccaggtgcagggcaccgacagccacaacaccagaaccatggaggtgcccgccagagccagcagcctgaacagcagcgacatcttcctgctggtgaccgccagcgtgtgctacctgtggttcggcaagggctgcaacggcgaccagagagagatggccagagtggtggtgaccgtgatcagcagaaagaacgaggagaccgtgctggagggccaggagcccccccacttctgggaggccctgggcggcagagccccctaccccagcaacaagagactgcccgaggaggtgcccagcttccagcccagactgttcgagtgcagcagccacatgggctgcctggtgctggccgaggtgggcttcttcagccaggaggacctggacaagtacgacatcatgctgctggacacctggcaggagatcttcctgtggctgggcgaggccgccagcgagtggaaggaggccgtggcctggggccaggagtacctgaagacccaccccgccggcagaagccccgccacccccatcgtgctggtgaagcagggccacgagccccccaccttcatcggctggttcttcacctgggacccctacaagtggaccagccaccccagccacaaggaggtggtggacggcagccccgccgccgccagcaccatcagcgagatcaccgccgaggtgaacaacctgagactgagcagatggcccggcaacggcagagccggcgccgtggccctgcaggccctgaagggcagccaggacagcagcgagaacgacctggtgagaagccccaagagcgccggcagcagaaccagcagcagcgtgagcagcaccagcgccaccatcaacggcggcctgagaagagagcagctgatgcaccaggccgtggaggacctgcccgagggcgtggaccccgccagaagagagttctacctgagcgacagcgacttccaggacatcttcggcaagagcaaggaggagttctacagcatggccacctggagacagagacaggagaagaagcagctgggcttcttctag

SEQ ID NO: 9593 - DNA, 987 bp, synthetic construct
  source 1..987: mol_type = other DNA; note = Synthetic coding sequence
atggaggccaacggcagccagggcaccagcggcagcgccaacgacagccagcacgaccccggcaagatgttcatcggcggcctgagctggcagaccagccccgacagcctgagagactacttcagcaagttcggcgagatcagagagtgcatggtgatgagagaccccaccaccaagagaagcagaggcttcggcttcgtgaccttcgccgaccccgccagcgtggacaaggtgctgggccagccccaccacgagctggacagcaagaccatcgaccccaaggtggccttccccagaagagcccagcccaagatggtgaccagaaccaagaagatcttcgtgggcggcctgagcgccaacaccgtggtggaggacgtgaagcagtacttcgagcagttcggcaaggtggaggacgccatgctgatgttcgacaagaccaccaacagacacagaggcttcggcttcgtgaccttcgagaacgaggacgtggtggagaaggtgtgcgagatccacttccacgagatcaacaacaagatggtggagtgcaagaaggcccagcccaaggaggtgatgttcccccccggcaccagaggcagagccagaggcctgccctacaccatggacgccttcatgctgggcatgggcatgctgggctaccccaacttcgtggccacctacggcagaggctaccccggcttcgcccccagctacggctaccagttccccggcttccccgccgccgcctacggccccgtggccgccgccgccgtggccgccgccagaggcagcggcagcaaccccgccagacccggcggcttccccggcgccaacagccccggccccgtggccgacctgtacggccccgccagccaggacagcggcgtgggcaactacatcagcgccgccagcccccagcccggcagcggcttcggccacggcatcgccggccccctgatcgccaccgccttcaccaacggctaccactag

SEQ ID NO: 9594 - DNA, 654 bp, synthetic construct
  source 1..654: mol_type = other DNA; note = Synthetic coding sequence
atggagagcgtggccctgtacagcttccaggccaccgagagcgacgagctggccttcaacaagggcgacaccctgaagatcctgaacatggaggacgaccagaactggtacaaggccgagctgagaggcgtggagggcttcatccccaagaactacatcagagtgaagccccacccctggtacagcggcagaatcagcagacagctggccgaggagatcctgatgaagagaaaccacctgggcgccttcctgatcagagagagcgagagcagccccggcgagttcagcgtgagcgtgaactacggcgaccaggtgcagcacttcaaggtgctgagagaggccagcggcaagtacttcctgtgggaggagaagttcaacagcctgaacgagctggtggacttctacagaaccaccaccatcgccaagaagagacagatcttcctgagagacgaggagcccctgctgaagagccccggcgcctgcttcgcccaggcccagttcgacttcagcgcccaggaccccagccagctgagcttcagaagaggcgacatcatcgaggtgctggagagacccgacccccactggtggagaggcagaagctgcggcagagtgggcttcttccccagaagctacgtgcagcccgtgcacctgtag

SEQ ID NO: 9595 - DNA, 231 bp, synthetic construct
  source 1..231: mol_type = other DNA; note = Synthetic coding sequence
atgggcctgaagatgagctgcctgaagggcttccagatgtgcgtgagcagcagcagcagcagccacgacgaggcccccgtgctgaacgacaagcacctggacgtgcccgacatcatcatcaccccccccacccccaccggcatgatgctgcccagagacctgggcagcaccgtgtggctggacgagaccggcagctgccccgacgacggcgagatcgaccccgaggcctag

SEQ ID NO: 9596 - DNA, 19863 bp, synthetic construct
  source 1..19863: mol_type = other DNA; note = Synthetic coding sequence
atggaccagccccagttcagcggcgcccccagattcctgaccagacccaaggccttcgtggtgagcgtgggcaaggacgccaccctgagctgccagatcgtgggcaaccccaccccccaggtgagctgggagaaggaccagcagcccgtggccgccggcgccagattcagactggcccaggacggcgacctgtacagactgaccatcctggacctggccctgggcgacagcggccagtacgtgtgcagagccagaaacgccatcggcgaggccttcgccgccgtgggcctgcaggtggacgccgaggccgcctgcgccgagcaggccccccacttcctgctgagacccaccagcatcagagtgagagagggcagcgaggccaccttcagatgcagagtgggcggcagccccagacccgccgtgagctggagcaaggacggcagaagactgggcgagcccgacggccccagagtgagagtggaggagctgggcgaggccagcgccctgagaatcagagccgccagacccagagacggcggcacctacgaggtgagagccgagaaccccctgggcgccgccagcgccgccgccgccctggtggtggacagcgacgccgccgacaccgccagcagacccggcaccagcaccgccgccctgctggcccacctgcagagaagaagagaggccatgagagccgagggcgcccccgccagcccccccagcaccggcaccagaacctgcaccgtgaccgagggcaagcacgccagactgagctgctacgtgaccggcgagcccaagcccgagaccgtgtggaagaaggacggccagctggtgaccgagggcagaagacacgtggtgtacgaggacgcccaggagaacttcgtgctgaagatcctgttctgcaagcagagcgacagaggcctgtacacctgcaccgccagcaacctggtgggccagacctacagcagcgtgctggtggtggtgagagagcccgccgtgcccttcaagaagagactgcaggacctggaggtgagagagaaggagagcgccaccttcctgtgcgaggtgccccagcccagcaccgaggccgcctggttcaaggaggagaccagactgtgggccagcgccaagtacggcatcgaggaggagggcaccgagagaagactgaccgtgagaaacgtgagcgccgacgacgacgccgtgtacatctgcgagacccccgagggcagcagaaccgtggccgagctggccgtgcagggcaacctgctgagaaagctgcccagaaagaccgccgtgagagtgggcgacaccgccatgttctgcgtggagctggccgtgcccgtgggccccgtgcactggctgagaaaccaggaggaggtggtggccggcggcagagtggccatcagcgccgagggcaccagacacaccctgaccatcagccagtgctgcctggaggacgtgggccaggtggccttcatggccggcgactgccagaccagcacccagttctgcgtgagcgcccccagaaagccccccctgcagccccccgtggaccccgtggtgaaggccagaatggagagcagcgtgatcctgagctggagcccccccccccacggcgagagacccgtgaccatcgacggctacctggtggagaagaagaagctgggcacctacacctggatcagatgccacgaggccgagtgggtggccacccccgagctgaccgtggccgacgtggccgaggagggcaacttccagttcagagtgagcgccctgaacagcttcggccagagcccctacctggagttccccggcaccgtgcacctggcccccaagctggccgtgagaacccccctgaaggccgtgcaggccgtggagggcggcgaggtgaccttcagcgtggacctgaccgtggccagcgccggcgagtggttcctggacggccaggccctgaaggccagcagcgtgtacgagatccactgcgacagaaccagacacaccctgaccatcagagaggtgcccgccagcctgcacggcgcccagctgaagttcgtggccaacggcatcgagagcagcatcagaatggaggtgagagccgcccccggcctgaccgccaacaagccccccgccgccgccgccagagaggtgctggccagactgcacgaggaggcccagctgctggccgagctgagcgaccaggccgccgccgtgacctggctgaaggacggcagaaccctgagccccggccccaagtacgaggtgcaggccagcgccggcagaagagtgctgctggtgagagacgtggccagagacgacgccggcctgtacgagtgcgtgagcagaggcggcagaatcgcctaccagctgagcgtgcagggcctggccagattcctgcacaaggacatggccggcagctgcgtggacgccgtggccggcggccccgcccagttcgagtgcgagaccagcgaggcccacgtgcacgtgcactggtacaaggacggcatggagctgggccacagcggcgagagattcctgcaggaggacgtgggcaccagacacagactggtggccgccaccgtgaccagacaggacgagggcacctacagctgcagagtgggcgaggacagcgtggacttcagactgagagtgagcgagcccaaggtggtgttcgccaaggagcagctggccagaagaaagctgcaggccgaggccggcgccagcgccaccctgagctgcgaggtggcccaggcccagaccgaggtgacctggtacaaggacggcaagaagctgagcagcagcagcaaggtgtgcatggaggccaccggctgcaccagaagactggtggtgcagcaggccggccaggccgacgccggcgagtacagctgcgaggccggcggccagagactgagcttccacctggacgtgaaggagcccaaggtggtgttcgccaaggaccaggtggcccacagcgaggtgcaggccgaggccggcgccagcgccaccctgagctgcgaggtggcccaggcccagaccgaggtgatgtggtacaaggacggcaagaagctgagcagcagcctgaaggtgcacgtggaggccaagggctgcagaagaagactggtggtgcagcaggccggcaagaccgacgccggcgactacagctgcgaggccagaggccagagagtgagcttcagactgcacatcaccgagcccaagatgatgttcgccaaggagcagagcgtgcacaacgaggtgcaggccgaggccggcgccagcgccatgctgagctgcgaggtggcccaggcccagaccgaggtgacctggtacaaggacggcaagaagctgagcagcagcagcaaggtgggcatggaggtgaagggctgcaccagaagactggtgctgccccaggccggcaaggccgacgccggcgagtacagctgcgaggccggcggccagagagtgagcttccacctgcacatcaccgagcccaagggcgtgttcgccaaggagcagagcgtgcacaacgaggtgcaggccgaggccggcaccaccgccatgctgagctgcgaggtggcccagccccagaccgaggtgacctggtacaaggacggcaagaagctgagcagcagcagcaaggtgagaatggaggtgaagggctgcaccagaagactggtggtgcagcaggtgggcaaggccgacgccggcgagtacagctgcgaggccggcggccagagagtgagcttccagctgcacatcaccgagcccaaggccgtgttcgccaaggagcagctggtgcacaacgaggtgagaaccgaggccggcgccagcgccaccctgagctgcgaggtggcccaggcccagaccgaggtgacctggtacaaggacggcaagaagctgagcagcagcagcaaggtgagaatcgaggccgccggctgcatgagacagctggtggtgcagcaggccggccaggccgacgccggcgagtacacctgcgaggccggcggccagagactgagcttccacctggacgtgagcgagcccaaggccgtgttcgccaaggagcagctggcccacagaaaggtgcaggccgaggccggcgccatcgccaccctgagctgcgaggtggcccaggcccagaccgaggtgacctggtacaaggacggcaagaagctgagcagcagcagcaaggtgagaatggaggccgtgggctgcaccagaagactggtggtgcagcaggcctgccaggccgacaccggcgagtacagctgcgaggccggcggccagagactgagcttcagcctggacgtggccgagcccaaggtggtgttcgccaaggagcagcccgtgcacagagaggtgcaggcccaggccggcgccagcaccaccctgagctgcgaggtggcccaggcccagaccgaggtgatgtggtacaaggacggcaagaagctgagcttcagcagcaaggtgagaatggaggccgtgggctgcaccagaagactggtggtgcagcaggccggccaggccgtggccggcgagtacagctgcgaggccggcagccagagactgagcttccacctgcacgtggccgagcccaaggccgtgttcgccaaggagcagcccgccagcagagaggtgcaggccgaggccggcaccagcgccaccctgagctgcgaggtggcccaggcccagaccgaggtgacctggtacaaggacggcaagaagctgagcagcagcagcaaggtgagaatggaggccgtgggctgcaccagaagactggtggtgcaggaggccggccaggccgacgccggcgagtacagctgcaaggccggcgaccagagactgagcttccacctgcacgtggccgagcccaaggtggtgttcgccaaggagcagcccgcccacagagaggtgcaggccgaggccggcgccagcgccaccctgagctgcgaggtggcccaggcccagaccgaggtgacctggtacaaggacggcaagaagctgagcagcagcagcaaggtgagagtggaggccgtgggctgcaccagaagactggtggtgcagcaggccggccaggccgaggccggcgagtacagctgcgaggccggcggccagcagctgagcttcagactgcaggtggccgagctggagccccagatcagcgagagaccctgcagaagagagcccctggtggtgaaggagcacgaggacatcatcctgaccgccaccctggccacccccagcgccgccaccgtgacctggctgaaggacggcgtggagatcagaagaagcaagagacacgagaccgccagccagggcgacacccacaccctgaccgtgcacggcgcccaggtgctggacagcgccatctacagctgcagagtgggcgccgagggccaggacttccccgtgcaggtggaggaggtggccgccaagttctgcagactgctggagcccgtgtgcggcgagctgggcggcaccgtgaccctggcctgcgagctgagccccgcctgcgccgaggtggtgtggagatgcggcaacacccagctgagagtgggcaagagattccagatggtggccgagggccccgtgagaagcctgaccgtgctgggcctgagagccgaggacgccggcgagtacgtgtgcgagagcagagacgaccacaccagcgcccagctgaccgtgagcgtgcccagagtggtgaagttcatgagcggcctgagcaccgtggtggccgaggagggcggcgaggccaccttccagtgcgtggtgagccccagcgacgtggccgtggtgtggttcagagacggcgccctgctgcagcccagcgagaagttcgccatcagccagagcggcgccagccacagcctgaccatcagcgacctggtgctggaggacgccggccagatcaccgtggaggccgagggcgccagcagcagcgccgccctgagagtgagagaggcccccgtgctgttcaagaagaagctggagccccagaccgtggaggagagaagcagcgtgaccctggaggtggagctgaccagaccctggcccgagctgagatggaccagaaacgccaccgccctggcccccggcaagaacgtggagatccacgccgagggcgccagacacagactggtgctgcacaacgtgggcttcgccgacagaggcttcttcggctgcgagacccccgacgacaagacccaggccaagctgaccgtggagatgagacaggtgagactggtgagaggcctgcaggccgtggaggccagagagcagggcaccgccaccatggaggtgcagctgagccacgccgacgtggacggcagctggaccagagacggcctgagattccagcagggccccacctgccacctggccgtgagaggccccatgcacaccctgaccctgagcggcctgagacccgaggacagcggcctgatggtgttcaaggccgagggcgtgcacaccagcgccagactggtggtgaccgagctgcccgtgagcttcagcagacccctgcaggacgtggtgaccaccgagaaggagaaggtgaccctggagtgcgagctgagcagacccaacgtggacgtgagatggctgaaggacggcgtggagctgagagccggcaagaccatggccatcgccgcccagggcgcctgcagaagcctgaccatctacagatgcgagttcgccgaccagggcgtgtacgtgtgcgacgcccacgacgcccagagcagcgccagcgtgaaggtgcagggcagaacctacaccctgatctacagaagagtgctggccgaggacgccggcgagatccagttcgtggccgagaacgccgagagcagagcccagctgagagtgaaggagctgcccgtgaccctggtgagacccctgagagacaagatcgccatggagaagcacagaggcgtgctggagtgccaggtgagcagagccagcgcccaggtgagatggttcaagggcagccaggagctgcagcccggccccaagtacgagctggtgagcgacggcctgtacagaaagctgatcatcagcgacgtgcacgccgaggacgaggacacctacacctgcgacgccggcgacgtgaagaccagcgcccagttcttcgtggaggagcagagcatcaccatcgtgagaggcctgcaggacgtgaccgtgatggagcccgcccccgcctggttcgagtgcgagaccagcatccccagcgtgagaccccccaagtggctgctgggcaagaccgtgctgcaggccggcggcaacgtgggcctggagcaggagggcaccgtgcacagactgatgctgagaagaacctgcagcaccatgaccggccccgtgcacttcaccgtgggcaagagcagaagcagcgccagactggtggtgagcgacatccccgtggtgctgaccagacccctggagcccaagaccggcagagagctgcagagcgtggtgctgagctgcgacttcagacccgcccccaaggccgtgcagtggtacaaggacgacacccccctgagccccagcgagaagttcaagatgagcctggagggccagatggccgagctgagaatcctgagactgatgcccgccgacgccggcgtgtacagatgccaggccggcagcgcccacagcagcaccgaggtgaccgtggaggccagagaggtgaccgtgaccggccccctgcaggacgccgaggccaccgaggagggctgggccagcttcagctgcgagctgagccacgaggacgaggaggtggagtggagcctgaacggcatgcccctgtacaacgacagcttccacgagatcagccacaagggcagaagacacaccctggtgctgaagagcatccagagagccgacgccggcatcgtgagagccagcagcctgaaggtgagcaccagcgccagactggaggtgagagtgaagcccgtggtgttcctgaaggccctggacgacctgagcgccgaggagagaggcaccctggccctgcagtgcgaggtgagcgaccccgaggcccacgtggtgtggagaaaggacggcgtgcagctgggccccagcgacaagtacgacttcctgcacaccgccggcaccagaggcctggtggtgcacgacgtgagccccgaggacgccggcctgtacacctgccacgtgggcagcgaggagaccagagccagagtgagagtgcacgacctgcacgtgggcatcaccaagagactgaagaccatggaggtgctggagggcgagagctgcagcttcgagtgcgtgctgagccacgagagcgccagcgaccccgccatgtggaccgtgggcggcaagaccgtgggcagcagcagcagattccaggccaccagacagggcagaaagtacatcctggtggtgagagaggccgcccccagcgacgccggcgaggtggtgttcagcgtgagaggcctgaccagcaaggccagcctgatcgtgagagagagacccgccgccatcatcaagcccctggaggaccagtgggtggcccccggcgaggacgtggagctgagatgcgagctgagcagagccggcacccccgtgcactggctgaaggacagaaaggccatcagaaagagccagaagtacgacgtggtgtgcgagggcaccatggccatgctggtgatcagaggcgccagcctgaaggacgccggcgagtacacctgcgaggtggaggccagcaagagcaccgccagcctgcacgtggaggagaaggccaactgcttcaccgaggagctgaccaacctgcaggtggaggagaagggcaccgccgtgttcacctgcaagaccgagcaccccgccgccaccgtgacctggagaaagggcctgctggagctgagagccagcggcaagcaccagcccagccaggagggcctgaccctgagactgaccatcagcgccctggagaaggccgacagcgacacctacacctgcgacatcggccaggcccagagcagagcccagctgctggtgcagggcagaagagtgcacatcatcgaggacctggaggacgtggacgtgcaggagggcagcagcgccaccttcagatgcagaatcagccccgccaactacgagcccgtgcactggttcctggacaagacccccctgcacgccaacgagctgaacgagatcgacgcccagcccggcggctaccacgtgctgaccctgagacagctggccctgaaggacagcggcaccatctacttcgaggccggcgaccagagagccagcgccgccctgagagtgaccgagaagcccagcgtgttcagcagagagctgaccgacgccaccatcaccgagggcgaggacctgaccctggtgtgcgagaccagcacctgcgacatccccgtgtgctggaccaaggacggcaagaccctgagaggcagcgccagatgccagctgagccacgagggccacagagcccagctgctgatcaccggcgccaccctgcaggacagcggcagatacaagtgcgaggccggcggcgcctgcagcagcagcatcgtgagagtgcacgccagacccgtgagattccaggaggccctgaaggacctggaggtgctggagggcggcgccgccaccctgagatgcgtgctgagcagcgtggccgcccccgtgaagtggtgctacggcaacaacgtgctgagacccggcgacaagtacagcctgagacaggagggcgccatgctggagctggtggtgagaaacctgagaccccaggacagcggcagatacagctgcagcttcggcgaccagaccaccagcgccaccctgaccgtgaccgccctgcccgcccagttcatcggcaagctgagaaacaaggaggccaccgagggcgccaccgccaccctgagatgcgagctgagcaaggccgcccccgtggagtggagaaagggcagcgagaccctgagagacggcgacagatactgcctgagacaggacggcgccatgtgcgagctgcagatcagaggcctggccatggtggacgccgccgagtacagctgcgtgtgcggcgaggagagaaccagcgccagcctgaccatcagacccatgcccgcccacttcatcggcagactgagacaccaggagagcatcgagggcgccaccgccaccctgagatgcgagctgagcaaggccgcccccgtggagtggagaaagggcagagagagcctgagagacggcgacagacacagcctgagacaggacggcgccgtgtgcgagctgcagatctgcggcctggccgtggccgacgccggcgagtacagctgcgtgtgcggcgaggagagaaccagcgccaccctgaccgtgaaggccctgcccgccaagttcaccgagggcctgagaaacgaggaggccgtggagggcgccaccgccatgctgtggtgcgagctgagcaaggtggcccccgtggagtggagaaagggccccgagaacctgagagacggcgacagatacatcctgagacaggagggcaccagatgcgagctgcagatctgcggcctggccatggccgacgccggcgagtacctgtgcgtgtgcggccaggagagaaccagcgccaccctgaccatcagagccctgcccgccagattcatcgaggacgtgaagaaccaggaggccagagagggcgccaccgccgtgctgcagtgcgagctgaacagcgccgcccccgtggagtggagaaagggcagcgagaccctgagagacggcgacagatacagcctgagacaggacggcaccaagtgcgagctgcagatcagaggcctggccatggccgacaccggcgagtacagctgcgtgtgcggccaggagagaaccagcgccatgctgaccgtgagagccctgcccatcaagttcaccgagggcctgagaaacgaggaggccaccgagggcgccaccgccgtgctgagatgcgagctgagcaagatggcccccgtggagtggtggaagggccacgagaccctgagagacggcgacagacacagcctgagacaggacggcgccagatgcgagctgcagatcagaggcctggtggccgaggacgccggcgagtacctgtgcatgtgcggcaaggagagaaccagcgccatgctgaccgtgagagccatgcccagcaagttcatcgagggcctgagaaacgaggaggccaccgagggcgacaccgccaccctgtggtgcgagctgagcaaggccgcccccgtggagtggagaaagggccacgagaccctgagagacggcgacagacacagcctgagacaggacggcagcagatgcgagctgcagatcagaggcctggccgtggtggacgccggcgagtacagctgcgtgtgcggccaggagagaaccagcgccaccctgaccgtgagagccctgcccgccagattcatcgaggacgtgaagaaccaggaggccagagagggcgccaccgccgtgctgcagtgcgagctgagcaaggccgcccccgtggagtggagaaagggcagcgagaccctgagaggcggcgacagatacagcctgagacaggacggcaccagatgcgagctgcagatccacggcctgagcgtggccgacaccggcgagtacagctgcgtgtgcggccaggagagaaccagcgccaccctgaccgtgagagccccccagcccgtgttcagagagcccctgcagagcctgcaggccgaggagggcagcaccgccaccctgcagtgcgagctgagcgagcccaccgccaccgtggtgtggagcaagggcggcctgcagctgcaggccaacggcagaagagagcccagactgcagggctgcaccgccgagctggtgctgcaggacctgcagagagaggacaccggcgagtacacctgcacctgcggcagccaggccaccagcgccaccctgaccgtgaccgccgcccccgtgagattcctgagagagctgcagcaccaggaggtggacgagggcggcaccgcccacctgtgctgcgagctgagcagagccggcgccagcgtggagtggagaaagggcagcctgcagctgttcccctgcgccaagtaccagatggtgcaggacggcgccgccgccgagctgctggtgagaggcgtggagcaggaggacgccggcgactacacctgcgacaccggccacacccagagcatggccagcctgagcgtgagagtgcccagacccaagttcaagaccagactgcagagcctggagcaggagaccggcgacatcgccagactgtgctgccagctgagcgacgccgagagcggcgccgtggtgcagtggctgaaggagggcgtggagctgcacgccggccccaagtacgagatgagaagccagggcgccaccagagagctgctgatccaccagctggaggccaaggacaccggcgagtacgcctgcgtgaccggcggccagaagaccgccgccagcctgagagtgaccgagcccgaggtgaccatcgtgagaggcctggtggacgccgaggtgaccgccgacgaggacgtggagttcagctgcgaggtgagcagagccggcgccaccggcgtgcagtggtgcctgcagggcctgcccctgcagagcaacgaggtgaccgaggtggccgtgagagacggcagaatccacaccctgagactgaagggcgtgacccccgaggacgccggcaccgtgagcttccacctgggcaaccacgccagcagcgcccagctgaccgtgagagcccccgaggtgaccatcctggagcccctgcaggacgtgcagctgagcgagggccaggacgccagcttccagtgcagactgagcagagccagcggccaggaggccagatgggccctgggcggcgtgcccctgcaggccaacgagatgaacgacatcaccgtggagcagggcaccctgcacctgctgaccctgcacaaggtgaccctggaggacgccggcaccgtgagcttccacgtgggcacctgcagcagcgaggcccagctgaaggtgaccgccaagaacaccgtggtgagaggcctggagaacgtggaggccctggagggcggcgaggccctgttcgagtgccagctgagccagcccgaggtggccgcccacacctggctgctggacgacgagcccgtgcacaccagcgagaacgccgaggtggtgttcttcgagaacggcctgagacacctgctgctgctgaagaacctgagaccccaggacagctgcagagtgaccttcctggccggcgacatggtgaccagcgccttcctgaccgtgagaggctggagactggagatcctggagcccctgaagaacgccgccgtgagagccggcgcccaggcctgcttcacctgcaccctgagcgaggccgtgcccgtgggcgaggccagctggtacatcaacggcgccgccgtgcagcccgacgacagcgactggaccgtgaccgccgacggcagccaccacgccctgctgctgagaagcgcccagccccaccacgccggcgaggtgaccttcgcctgcagagacgccgtggccagcgccagactgaccgtgctgggcctgcccgacccccccgaggacgccgaggtggtggccagaagcagccacaccgtgaccctgagctgggccgcccccatgagcgacggcggcggcggcctgtgcggctacagagtggaggtgaaggagggcgccaccggccagtggagactgtgccacgagctggtgcccggccccgagtgcgtggtggacggcctggcccccggcgagacctacagattcagagtggccgccgtgggccccgtgggcgccggcgagcccgtgcacctgccccagaccgtgagactggccgagccccccaagcccgtgcccccccagcccagcgcccccgagagcagacaggtggccgccggcgaggacgtgagcctggagctggaggtggtggccgaggccggcgaggtgatctggcacaagggcatggagagaatccagcccggcggcagattcgaggtggtgagccagggcagacagcagatgctggtgatcaagggcttcaccgccgaggaccagggcgagtaccactgcggcctggcccagggcagcatctgccccgccgccgccaccttccaggtggccctgagccccgccagcgtggacgaggccccccagcccagcctgccccccgaggccgcccaggagggcgacctgcacctgctgtgggaggccctggccagaaagagaagaatgagcagagagcccaccctggacagcatcagcgagctgcccgaggaggacggcagaagccagagactgccccaggaggccgaggaggtggcccccgacctgagcgagggctacagcaccgccgacgagctggccagaaccggcgacgccgacctgagccacaccagcagcgacgacgagagcagagccggcacccccagcctggtgacctacctgaagaaggccggcagacccggcaccagccccctggccagcaaggtgggcgcccccgccgcccccagcgtgaagccccagcagcagcaggagcccctggccgccgtgagaccccccctgggcgacctgagcaccaaggacctgggcgaccccagcatggacaaggccgccgtgaagatccaggccgccttcaagggctacaaggtgagaaaggagatgaagcagcaggagggccccatgttcagccacaccttcggcgacaccgaggcccaggtgggcgacgccctgagactggagtgcgtggtggccagcaaggccgacgtgagagccagatggctgaaggacggcgtggagctgaccgacggcagacaccaccacatcgaccagctgggcgacggcacctgcagcctgctgatcaccggcctggacagagccgacgccggctgctacacctgccaggtgagcaacaagttcggccaggtgacccacagcgcctgcgtggtggtgagcggcagcgagagcgaggccgagagcagcagcggcggcgagctggacgacgccttcagaagagccgccagaagactgcacagactgttcagaaccaagagccccgccgaggtgagcgacgaggagctgttcctgagcgccgacgagggccccgccgagcccgaggagcccgccgactggcagacctacagagaggacgagcacttcatctgcatcagattcgaggccctgaccgaggccagacaggccgtgaccagattccaggagatgttcgccaccctgggcatcggcgtggagatcaagctggtggagcagggccccagaagagtggagatgtgcatcagcaaggagacccccgcccccgtggtgccccccgagcccctgcccagcctgctgaccagcgacgccgcccccgtgttcctgaccgagctgcagaaccaggaggtgcaggacggctaccccgtgagcttcgactgcgtggtgaccggccagcccatgcccagcgtgagatggttcaaggacggcaagctgctggaggaggacgaccactacatgatcaacgaggaccagcagggcggccaccagctgatcatcaccgccgtggtgcccgccgacatgggcgtgtacagatgcctggccgagaacagcatgggcgtgagcagcaccaaggccgagctgagagtggacctgaccagcaccgactacgacaccgccgccgacgccaccgagagcagcagctacttcagcgcccagggctacctgagcagcagagagcaggagggcaccgagagcaccaccgacgagggccagctgccccaggtggtggaggagctgagagacctgcaggtggcccccggcaccagactggccaagttccagctgaaggtgaagggctaccccgcccccagactgtactggttcaaggacggccagcccctgaccgccagcgcccacatcagaatgaccgacaagaagatcctgcacaccctggagatcatcagcgtgaccagagaggacagcggccagtacgccgcctacatcagcaacgccatgggcgccgcctacagcagcgccagactgctggtgagaggccccgacgagcccgaggagaagcccgccagcgacgtgcacgagcagctggtgccccccagaatgctggagagattcacccccaagaaggtgaagaagggcagcagcatcaccttcagcgtgaaggtggagggcagacccgtgcccaccgtgcactggctgagagaggaggccgagagaggcgtgctgtggatcggccccgacacccccggctacaccgtggccagcagcgcccagcagcacagcctggtgctgctggacgtgggcagacagcaccagggcacctacacctgcatcgccagcaacgccgccggccaggccctgtgcagcgccagcctgcacgtgagcggcctgcccaaggtggaggagcaggagaaggtgaaggaggccctgatcagcaccttcctgcagggcaccacccaggccatcagcgcccagggcctggagaccgccagcttcgccgacctgggcggccagagaaaggaggagcccctggccgccaaggaggccctgggccacctgagcctggccgaggtgggcaccgaggagttcctgcagaagctgaccagccagatcaccgagatggtgagcgccaagatcacccaggccaagctgcaggtgcccggcggcgacagcgacgaggacagcaagacccccagcgccagccccagacacggcagaagcagacccagcagcagcatccaggagagcagcagcgagagcgaggacggcgacgccagaggcgagatcttcgacatctacgtggtgaccgccgactacctgcccctgggcgccgagcaggacgccatcaccctgagagagggccagtacgtggaggtgctggacgccgcccaccccctgagatggctggtgagaaccaagcccaccaagagcagccccagcagacagggctgggtgagccccgcctacctggacagaagactgaagctgagccccgagtggggcgccgccgaggcccccgagttccccggcgaggccgtgagcgaggacgagtacaaggccagactgagcagcgtgatccaggagctgctgagcagcgagcaggccttcgtggaggagctgcagttcctgcagagccaccacctgcagcacctggagagatgcccccacgtgcccatcgccgtggccggccagaaggccgtgatcttcagaaacgtgagagacatcggcagattccacagcagcttcctgcaggagctgcagcagtgcgacaccgacgacgacgtggccatgtgcttcatcaagaaccaggccgccttcgagcagtacctggagttcctggtgggcagagtgcaggccgagagcgtggtggtgagcaccgccatccaggagttctacaagaagtacgccgaggaggccctgctggccggcgaccccagccagcccccccccccccccctgcagcactacctggagcagcccgtggagagagtgcagagataccaggccctgctgaaggagctgatcagaaacaaggccagaaacagacagaactgcgccctgctggagcaggcctacgccgtggtgagcgccctgccccagagagccgagaacaagctgcacgtgagcctgatggagaactaccccggcaccctgcaggccctgggcgagcccatcagacagggccacttcatcgtgtgggagggcgcccccggcgccagaatgccctggaagggccacaacagacacgtgttcctgttcagaaaccacctggtgatctgcaagcccagaagagacagcagaaccgacaccgtgagctacgtgttcagaaacatgatgaagctgagcagcatcgacctgaacgaccaggtggagggcgacgacagagccttcgaggtgtggcaggagagagaggacagcgtgagaaagtacctgctgcaggccagaaccgccatcatcaagagcagctgggtgaaggagatctgcggcatccagcagagactggccctgcccgtgtggagaccccccgacttcgaggaggagctggccgactgcaccgccgagctgggcgagaccgtgaagctggcctgcagagtgaccggcacccccaagcccgtgatcagctggtacaaggacggcaaggccgtgcaggtggacccccaccacatcctgatcgaggaccccgacggcagctgcgccctgatcctggacagcctgaccggcgtggacagcggccagtacatgtgcttcgccgccagcgccgccggcaactgcagcaccctgggcaagatcctggtgcaggtgccccccagattcgtgaacaaggtgagagccagccccttcgtggagggcgaggacgcccagttcacctgcaccatcgagggcgccccctacccccagatcagatggtacaaggacggcgccctgctgaccaccggcaacaagttccagaccctgagcgagcccagaagcggcctgctggtgctggtgatcagagccgccagcaaggaggacctgggcctgtacgagtgcgagctggtgaacagactgggcagcgccagagccagcgccgagctgagaatccagagccccatgctgcaggcccaggagcagtgccacagagagcagctggtggccgccgtggaggtgaccgagcaggagaccaaggtgcccaagaagaccgtgatcatcgaggagaccatcaccaccgtggtgaagagccccagaggccagagaagaagccccagcaagagccccagcagaagccccagcagatgcagcgccagccccctgagacccggcctgctggcccccgacctgctgtacctgcccggcgccggccagcccagaagacccgaggccgagcccggccagaagcccgtggtgcccaccctgtacgtgaccgaggccgaggcccacagccccgccctgcccggcctgagcggcccccagcccaagtgggtggaggtggaggagaccatcgaggtgagagtgaagaagatgggcccccagggcgtgagccccaccaccgaggtgcccagaagcagcagcggccacctgttcaccctgcccggcgccacccccggcggcgaccccaacagcaacaacagcaacaacaagctgctggcccaggaggcctgggcccagggcaccgccatggtgggcgtgagagagcccctggtgttcagagtggacgccagaggcagcgtggactgggccgccagcggcatgggcagcctggaggaggagggcaccatggaggaggccggcgaggaggagggcgaggacggcgacgccttcgtgaccgaggagagccaggacacccacagcctgggcgacagagaccccaagatcctgacccacaacggcagaatgctgaccctggccgacctggaggactacgtgcccggcgagggcgagaccttccactgcggcggccccggccccggcgcccccgacgaccccccctgcgaggtgagcgtgatccagagagagatcggcgagcccaccgtgggccagcccgtgctgctgagcgtgggccacgccctgggccccagaggccccctgggcctgttcagacccgagcccagaggcgccagcccccccggcccccaggtgagaagcctggagggcaccagcttcctgctgagagaggcccccgccagacccgtgggcagcgccccctggacccagagcttctgcaccagaatcagaagaagcgccgacagcggccagagcagcttcaccaccgagctgagcacccagaccgtgaacttcggcaccgtgggcgagaccgtgaccctgcacatctgccccgacagagacggcgacgaggccgcccagccctag

SEQ ID NO: 9597 - DNA, 1407 bp, synthetic construct
  source 1..1407: mol_type = other DNA; note = Synthetic coding sequence
atggccgcccccgacctgagcaccaacctgcaggaggaggccacctgcgccatctgcctggactacttcaccgaccccgtgatgaccgactgcggccacaacttctgcagagagtgcatcagaagatgctggggccagcccgagggcccctacgcctgccccgagtgcagagagctgagcccccagagaaacctgagacccaacagacccctggccaagatggccgagatggccagaagactgcacccccccagccccgtgccccagggcgtgtgccccgcccacagagagcccctggccgccttctgcggcgacgagctgagactgctgtgcgccgcctgcgagagaagcggcgagcactgggcccacagagtgagacccctgcaggacgccgccgaggacctgaaggccaagctggagaagagcctggagcacctgagaaagcagatgcaggacgccctgctgttccaggcccaggccgacgagacctgcgtgctgtggcagaagatggtggagagccagagacagaacgtgctgggcgagttcgagagactgagaagactgctggccgaggaggagcagcagctgctgcagagactggaggaggaggagctggaggtgctgcccagactgagagagggcgccgcccacctgggccagcagagcgcccacctggccgagctgatcgccgagctggagggcagatgccagctgcccgccctgggcctgctgcaggacatcaaggacgccctgagaagagtgcaggacgtgaagctgcagccccccgaggtggtgcccatggagctgagaaccgtgtgcagagtgcccggcctggtggagaccctgagaagattcagaggcgacgtgaccctggaccccgacaccgccaaccccgagctgatcctgagcgaggacagaagaagcgtgcagagaggcgacctgagacaggccctgcccgacagccccgagagattcgaccccggcccctgcgtgctgggccaggagagattcaccagcggcagacactactgggaggtggaggtgggcgacagaaccagctgggccctgggcgtgtgcagagagaacgtgaacagaaaggagaagggcgagctgagcgccggcaacggcttctggatcctggtgttcctgggcagctactacaacagcagcgagagagccctggcccccctgagagacccccccagaagagtgggcatcttcctggactacgaggccggccacctgagcttctacagcgccaccgacggcagcctgctgttcatcttccccgagatccccttcagcggcaccctgagacccctgttcagccccctgagcagcagccccacccccatgaccatctgcagacccaagggcggcagcggcgacaccctggccccccagtag

SEQ ID NO: 9598 - DNA, 813 bp, synthetic construct
  source 1..813: mol_type = other DNA; note = Synthetic coding sequence
atgagccccggcagcggcgtgaagagcgagtacatgaagagataccaggagcccagatgggaggagtacggcccctgctacagagagctgctgcactacagactgggcagaagactgctggagcaggcccacgccccctggctgtgggacgactggggccccgccggcagcagcgaggacagcgccagcagcgagagcagcggcgccggcggccccgcccccagatgcgccccccccagcccccccccccccgtggagcccgccacccaggaggaggccgagagaagagccagaggcgcccccgaggagcaggacgccgaggccggcgacgccgaggccgaggacgccgaggacgccgccctgcccgccctgcccgtgaaggacgtggaggacaagcccgagcagcagaccagaaccagagagaccgacaagagccccaccagcaccgagcccagacagcagcccagcgccctgttcgccagaggcaacagaaaggccgtgaagagcccccagagaagcagcagcaagatcaaggagaacaagcaccccttcgccctgtacggctggggcgagaagcagaccgacaccggcagccagaagacccacaacgtgtgcgccagcgcccccgtgcacgagatccacgagagcgccctgagagccaagaacagaagacaggtggagaagagaaagctggtggcccagagacagagagcccacagcgtggacgtggagaagaacagaaagatgaaggccagcagcagcgagaacccctggatgaccgagtacatgagatgctacagcgccagagcctag

SEQ ID NO: 9599 - DNA, 2667 bp, synthetic construct
  source 1..2667: mol_type = other DNA; note = Synthetic coding sequence
atggacgagagcgccctgctggacctgctggagtgccccgtgtgcctggagagactggacgccagcgccaaggtgctgccctgccagcacaccttctgcaagagatgcctgctgggcatcgtgggcagcagaaacgagctgagatgccccgagtgcagaaccctggtgggcagcggcgtggaggagctgcccagcaacatcctgctggtgagactgctggacggcatcaagcagagaccctggaagcccggccccggcggcggcagcggcaccaactgcaccaacgccctgagaagccagagcagcaccgtggccaactgcagcagcaaggacctgcagagcagccagggcggccagcagcccagagtgcagagctggagcccccccgtgagaggcatcccccagctgccctgcgccaaggccctgtacaactacgagggcaaggagcccggcgacctgaagttcagcaagggcgacatcatcatcctgagaagacaggtggacgagaactggtaccacggcgaggtgaacggcatccacggcttcttccccaccaacttcgtgcagatcatcaagcccctgccccagccccccccccagtgcaaggccctgtacgacttcgaggtgaaggacaaggaggccgacaaggactgcctgcccttcgccaaggacgacgtgctgaccgtgatcagaagagtggacgagaactgggccgagggcatgctggccgacaagatcggcatcttccccatcagctacgtggagttcaacagcgccgccaagcagctgatcgagtgggacaagccccccgtgcccggcgtggacgccggcgagtgcagcagcgccgccgcccagagcagcaccgcccccaagcacagcgacaccaagaagaacaccaagaagagacacagcttcaccagcctgaccatggccaacaagagcagccaggccagccagaacagacacagcatggagatcagcccccccgtgctgatcagcagcagcaaccccaccgccgccgccagaatcagcgagctgagcggcctgagctgcagcgcccccagccaggtgcacatcagcaccaccggcctgatcgtgacccccccccccagcagccccgtgaccaccggccccagcttcaccttccccagcgacgtgccctaccaggccgccctgggcaccctgaacccccccctgccccccccccccctgctggccgccaccgtgctggccagcaccccccccggcgccaccgccgccgccgccgccgccggcatgggccccagacccatggccggcagcaccgaccagatcgcccacctgagaccccagaccagacccagcgtgtacgtggccatctacccctacacccccagaaaggaggacgagctggagctgagaaagggcgagatgttcctggtgttcgagagatgccaggacggctggttcaagggcaccagcatgcacaccagcaagatcggcgtgttccccggcaactacgtggcccccgtgaccagagccgtgaccaacgccagccaggccaaggtgcccatgagcaccgccggccagaccagcagaggcgtgaccatggtgagccccagcaccgccggcggccccgcccagaagctgcagggcaacggcgtggccggcagccccagcgtggtgcccgccgccgtggtgagcgccgcccacatccagaccagcccccaggccaaggtgctgctgcacatgaccggccagatgaccgtgaaccaggccagaaacgccgtgagaaccgtggccgcccacaaccaggagagacccaccgccgccgtgacccccatccaggtgcagaacgccgccggcctgagccccgccagcgtgggcctgagccaccacagcctggccagcccccagcccgcccccctgatgcccggcagcgccacccacaccgccgccatcagcatcagcagagccagcgcccccctggcctgcgccgccgccgcccccctgaccagccccagcatcaccagcgccagcctggaggccgagcccagcggcagaatcgtgaccgtgctgcccggcctgcccaccagccccgacagcgccagcagcgcctgcggcaacagcagcgccaccaagcccgacaaggacagcaagaaggagaagaagggcctgctgaagctgctgagcggcgccagcaccaagagaaagcccagagtgagcccccccgccagccccaccctggaggtggagctgggcagcgccgagctgcccctgcagggcgccgtgggccccgagctgccccccggcggcggccacggcagagccggcagctgccccgtggacggcgacggccccgtgaccaccgccgtggccggcgccgccctggcccaggacgccttccacagaaaggccagcagcctggacagcgccgtgcccatcgcccccccccccagacaggcctgcagcagcctgggccccgtgctgaacgagagcagacccgtggtgtgcgagagacacagagtggtggtgagctaccccccccagagcgaggccgagctggagctgaaggagggcgacatcgtgttcgtgcacaagaagagagaggacggctggttcaagggcaccctgcagagaaacggcaagaccggcctgttccccggcagcttcgtggagaacatctag

SEQ ID NO: 9600 - DNA, 570 bp, synthetic construct
  source 1..570: mol_type = other DNA; note = Synthetic coding sequence
atgccccagaccgtgatcctgcccggccccgccccctggggcttcagactgagcggcggcatcgacttcaaccagcccctggtgatcaccagaatcacccccggcagcaaggccgccgccgccaacctgtgccccggcgacgtgatcctggccatcgacggcttcggcaccgagagcatgacccacgccgacgcccaggacagaatcaaggccgccgcccaccagctgtgcctgaagatcgacagaggcgagacccacctgtggagcccccaggtgagcgaggacggcaaggcccaccccttcaagatcaacctggagagcgagccccaggagttcaagcccatcggcaccgcccacaacagaagagcccagcccttcgtggccgccgccaacatcgacgacaagagacaggtggtgagcgccagctacaacagccccatcggcctgtacagcaccagcaacatccaggacgccctgcacggccagctgagaggcctgatccccagcagcccccagaagaccggcaccaccctgaacaccagcatcatcttcggccccaacctgagctag

SEQ ID NO: 9601 - DNA, 1095 bp, synthetic construct
  source 1..1095: mol_type = other DNA; note = Synthetic coding sequence
atgccccagaccgtgatcctgcccggccccgccccctggggcttcagactgagcggcggcatcgacttcaaccagcccctggtgatcaccagaatcacccccggcagcaaggccgccgccgccaacctgtgccccggcgacgtgatcctggccatcgacggcttcggcaccgagagcatgacccacgccgacgcccaggacagaatcaaggccgccgcccaccagctgtgcctgaagatcgacagaggcgagacccacctgtggagcccccaggtgagcgaggacggcaaggcccaccccttcaagatcaacctggagagcgagccccaggacggcaactacttcgagcacaagcacaacatcagacccaagcccttcgtgatccccggcagaagcagcggctgcagcacccccagcggcatcgactgcggcagcggcagaagcacccccagcagcgtgagcaccgtgagcaccatctgccccggcgacctgaaggtggccgccaagctggcccccaacatccccctggagatggagctgcccggcgtgaagatcgtgcacgcccagttcaacacccccatgcagctgtacagcgacgacaacatcatggagaccctgcagggccaggtgagcaccgccctgggcgagacccccctgatgagcgagcccaccgccagcgtgccccccgagagcgacgtgtacagaatgctgcacgacaacagaaacgagcccacccagcccagacagagcggcagcttcagagtgctgcagggcatggtggacgacggcagcgacgacagacccgccggcaccagaagcgtgagagcccccgtgaccaaggtgcacggcggcagcggcggcgcccagagaatgcccctgtgcgacaagtgcggcagcggcatcgtgggcgccgtggtgaaggccagagacaagtacagacaccccgagtgcttcgtgtgcgccgactgcaacctgaacctgaagcagaagggctacttcttcatcgagggcgagctgtactgcgagacccacgccagagccagaaccaagccccccgagggctacgacaccgtgaccctgtaccccaaggcctag

SEQ ID NO: 9602 - DNA, 951 bp, synthetic construct
  source 1..951: mol_type = other DNA; note = Synthetic coding sequence
atgccccagaccgtgatcctgcccggccccgccccctggggcttcagactgagcggcggcatcgacttcaaccagcccctggtgatcaccagaatcacccccggcagcaaggccgccgccgccaacctgtgccccggcgacgtgatcctggccatcgacggcttcggcaccgagagcatgacccacgccgacgcccaggacagaatcaaggccgccgcccaccagctgtgcctgaagatcgacagaggcgagacccacctgtggagcccccaggtgagcgaggacggcaaggcccaccccttcaagatcaacctggagagcgagccccaggagttcaagcccatcggcaccgcccacaacagaagagcccagcccttcgtggccgccgccaacatcgacgacaagagacaggtggtgagcgccagctacaacagccccatcggcctgtacagcaccagcaacatccaggacgccctgcacggccagctgagaggcctgatccccagcagcccccagaacgagcccaccgccagcgtgccccccgagagcgacgtgtacagaatgctgcacgacaacagaaacgagcccacccagcccagacagagcggcagcttcagagtgctgcagggcatggtggacgacggcagcgacgacagacccgccggcaccagaagcgtgagagcccccgtgaccaaggtgcacggcggcagcggcggcgcccagagaatgcccctgtgcgacaagtgcggcagcggcatcgtgggcgccgtggtgaaggccagagacaagtacagacaccccgagtgcttcgtgtgcgccgactgcaacctgaacctgaagcagaagggctacttcttcatcgagggcgagctgtactgcgagacccacgccagagccagaaccaagccccccgagggctacgacaccgtgaccctgtaccccaaggcctag

SEQ ID NO: 9603 - DNA, 3303 bp, synthetic construct
  source 1..3303: mol_type = other DNA; note = Synthetic coding sequence
atgagctactaccagagacccttcagccccagcgcctacagcctgcccgccagcctgaacagcagcatcgtgatgcagcacggcaccagcctggacagcaccgacacctacccccagcacgcccagagcctggacggcaccaccagcagcagcatccccctgtacagaagcagcgaggaggagaagagagtgaccgtgatcaaggccccccactaccccggcatcggccccgtggacgagagcggcatccccaccgccatcagaaccaccgtggacagacccaaggactggtacaagaccatgttcaagcagatccacatggtgcacaagcccgacgacgacaccgacatgtacaacaccccctacacctacaacgccggcctgtacaaccccccctacagcgcccagagccaccccgccgccaagacccagacctacagacccctgagcaagagccacagcgacaacagccccaacgccttcaaggacgccagcagccccgtgccccccccccacgtgcccccccccgtgccccccctgagacccagagacagaagcagcaccgagaagcacgactgggacccccccgacagaaaggtggacaccagaaagttcagaagcgagcccagaagcatcttcgagtacgagcccggcaagagcagcatcctgcagcacgagagacccgccagcctgtaccagagcagcatcgacagaagcctggagagacccatgagcagcgccagcatggccagcgacttcagaaagagaagaaagagcgagcccgccgtgggcccccccagaggcctgggcgaccagagcgccagcagaaccagccccggcagagtggacctgcccggcagcagcaccaccctgaccaagagcttcaccagcagcagccccagcagccccagcagagccaagggcggcgacgacagcaagatctgccccagcctgtgcagctacagcggcctgaacggcaaccccagcagcgagctggactactgcagcacctacagacagcacctggacgtgcccagagacagccccagagccatcagcttcaagaacggctggcagatggccagacagaacgccgagatctggagcagcaccgaggagaccgtgagccccaagatcaagagcagaagctgcgacgacctgctgaacgacgactgcgacagcttccccgaccccaaggtgaagagcgagagcatgggcagcctgctgtgcgaggaggacagcaaggagagctgccccatggcctggggcagcccctacgtgcccgaggtgagaagcaacggcagaagcagaatcagacacagaagcgccagaaacgcccccggcttcctgaagatgtacaagaagatgcacagaatcaacagaaaggacctgatgaacagcgaggtgatctgcagcgtgaagagcagaatcctgcagtacgagagcgagcagcagcacaaggacctgctgagagcctggagccagtgcagcaccgaggaggtgcccagagacatggtgcccaccagaatcagcgagttcgagaagctgatccagaagagcaagagcatgcccaacctgggcgacgacatgctgagccccgtgaccctggagcccccccagaacggcctgtgccccaagagaagattcagcatcgagtacctgctggaggaggagaaccagagcggcccccccgccagaggcagaagaggctgccagagcaacgccctggtgcccatccacatcgaggtgaccagcgacgagcagcccagagcccacgtggagttcagcgacagcgaccaggacggcgtggtgagcgaccacagcgactacatccacctggagggcagcagcttctgcagcgagagcgacttcgaccacttcagcttcaccagcagcgagagcttctacggcagcagccaccaccaccaccaccaccaccaccaccaccacagacacctgatcagcagctgcaagggcagatgccccgccagctacaccagattcaccaccatgctgaagcacgagagagccagacacgagaacaccgaggagcccagaagacaggagatggaccccggcctgagcaagctggccttcctggtgagccccgtgcccttcagaagaaagaagaacagcgcccccaagaagcagaccgagaaggccaagtgcaaggccagcgtgttcgaggccctggacagcgccctgaaggacatctgcgaccagatcaaggccgagaagaagagaggcagcctgcccgacaacagcatcctgcacagactgatcagcgagctgctgcccgacgtgcccgagagaaacagcagcctgagagccctgagaagaagccccctgcaccagcccctgcaccccctgccccccgacggcgccatccactgccccccctaccagaacgactgcggcagaatgcccagaagcgccagcttccaggacgtggacaccgccaacagcagctgccaccaccaggacagaggcggcgccctgcaggacagagagagccccagaagctacagcagcaccctgaccgacatgggcagaagcgcccccagagagagaagaggcacccccgagaaggagaagctgcccgccaaggccgtgtacgacttcaaggcccagaccagcaaggagctgagcttcaagaagggcgacaccgtgtacatcctgagaaagatcgaccagaactggtacgagggcgagcaccacggcagagtgggcatcttccccatcagctacgtggagaagctgaccccccccgagaaggcccagcccgccagaccccccccccccgcccagcccggcgagatcggcgaggccatcgccaagtacaacttcaacgccgacaccaacgtggagctgagcctgagaaagggcgacagagtgatcctgctgaagagagtggaccagaactggtacgagggcaagatccccggcaccaacagacagggcatcttccccgtgagctacgtggaggtggtgaagaagaacaccaagggcgccgaggactaccccgacccccccatcccccacagctacagcagcgacagaatccacagcctgagcagcaacaagccccagagacccgtgttcacccacgagaacatccagggcggcggcgagcccttccaggccctgtacaactacacccccagaaacgaggacgagctggagctgagagagagcgacgtgatcgacgtgatggagaagtgcgacgacggctggttcgtgggcaccagcagaagaaccaagttcttcggcaccttccccggcaactacgtgaagagactgtag

SEQ ID NO: 9604 - DNA, 4389 bp, synthetic construct
  source 1..4389: mol_type = other DNA; note = Synthetic coding sequence
atgttcagaggccccaagccccccatcgcccccaagcccagactgaccgcccccaacgagtggagagccagcgtgtacctgaacgacagcctgaacaagtgcagcaacggcagactgccctgcgtggacagaggcctggacgagggccccagaagcatccccaagtgcagcgagagcgagaccgacgaggactacatcgtggtgcccagagtgcccctgagagaggacgagcccaaggacgagggcagcgtgggcaacaaggccctggtgagccccgagagcagcgccgaggaggaggaggagagagaggagggcggcgaggcctgcggcctggagggcaccggcgccggcgaggacagcgtggcccccgccgcccccggcgccggcgccctgagcagagagggcgaggagggcaccgacctggccctggaggacgagggcgagggctgcgccgacgagcccggcaccctggagcaggtgagcagaagcgaggaggaggagaagctggtgcagccccacagagagtgcagcctggaggacagcggcccctgggccggcgagggcgtgttccagagcgacctgctgctgccccacatccacggcgaggaccaggagccccccgacacccccggcgaggccgaggaggacgacgaggagggctgcgccagcaccgaccccgccggcgccgacgagggcagcggccccgacagacccaccgaggacatgggccaggacgccgaggacaccagcgaggagccccccgagaaggaggagctggccggcgtgcaggaggccgagaccgccaccgactgccccgaggtgctggaggagggctgcgaggaggccaccggcgtgaccggcggcgagcaggtggacctgagcgagccccccgaccacgagaagaagaccaaccaggaggtggccgccgccaccctggaggaccacgcccaggacgagagcgccgaggagagctgccagatcgtgcccttcgagaacgactgcatggaggacttcgtgaccagcctgaccggcagcccctacgagttcttccccaccgagagcaccagcttctgcagcgagagctgcagccccctgagcgagagcgccaagggcctggagagcgagcaggcccccaagctgggcctgagagccgaggagaaccccatggtgggcgccctgtgcggccagtgcggcagcctgcagggcggcgccgccgagggccccgccgcccccgacgtggtggtggtgctggaggaggaggccctggacgacgccctggccaacccctacgtgatgggcgtgggcctgcccggccaggccgcccccggcgagggcggccaggccgccagcgacgccctgggcggctacggcagcaaggaggagctgaactgcgaggccgagggcggcctggtgcccgccgacagaaagaacaccagcaccagagtgagaccccacagcggcaaggtggccggctacgtgcccgagaccgtgcccgaggagaccggccccgaggccggcagcagcgcccccggcatcggcggcgccgccgaggaggtgggcaagaccctgctgagcctggagggcaagcccctggaggccagcagagccctgcccgccaagcccagagccttcaccctgtaccccagaagcttcagcgtggagggcagagagatccccgtgagcgtgtaccaggagcccgagggcagcggcctggacgaccacagaatcaagagaaaggaggacaacctgagcctgagctgcgtgatcggcagcagcggcagcttcagccagagaaaccacctgcccagcagcggcaccagcacccccagcagcatggtggacatccccccccccttcgacctggcctgcatcaccaagaagcccatcaccaagagcagccccagcctgctgatcgagagcgacagccccgacaagtacaagaagaagaagagcagcttcaagagattcctggccctgaccttcaagaagaagaccgagaacaagctgcacgtggacgtgaacgtgagcagcagcagaagcagcagcgagagcagctaccacggccccagcagaatcctggaggtggacagaagaagcctgagcaacagcccccagctgaagagcagaaccggcaagctgagagccagcgagagccccagcagcctgatcttctacagagacggcaagagaaagggcgtgcccttcagcagaaccgtgagcagagtggagagcttcgaggacagaagcagaccccccttcctgcccctgcccctgaccaagcccagaagcatcagcttccccagcgccgacaccagcgactacgagaacatccccgccatgaacagcgactacgagaacatccagatcccccccagaagacccgccagagccggcgccttcaccaagctgttcgaggaccagagcagagccctgagcaccgccaacgagaacgacggctacgtggacatgagcagcttcaacgccttcgagagcaagcagcagagcgccgaccaggacgccgagagcgcctacaccgagccctacaaggtgtgccccatcagcagcgccgcccccaaggaggacctgaccagcgacgaggagcagagaagcagcgaggaggaggacagcgccagcagagaccccagcgtgacccacaaggtggagggccagagcagagccctggtgatcgcccaggagctgctgagcagcgagaaggcctacgtggagatgctgcagcacctgaacctggacttccacggcgccgtgatgagagccctggacgacatggaccacgagggcagagacaccctggccagagaggagctgagacagggcctgagcgagctgcccgccatccacgacctgcaccagggcatcctggaggagctggaggagagactgagcaactgggagagccagcagaaggtggccgacgtgttcctggccagagagcagggcttcgaccaccacgccacccacatcctgcagttcgacagatacctgggcctgctgagcgagaactgcctgcacagccccagactggccgccgccgtgagagagttcgagcagagcgtgcagggcggcagccagaccgccaagcacagactgctgagagtggtgcagagactgttccagtaccaggtgctgctgaccgactacctgaacaacctgtgccccgacagcgccgagtacgacaacacccagggcgccctgagcctgatcagcaaggtgaccgacagagccaacgacagcatggagcagggcgagaacctgcagaagctggtgcacatcgagcacagcgtgagaggccagggcgacctgctgcagcccggcagagagttcctgaaggagggcaccctgatgaaggtgaccggcaagaacagaagacccagacacctgttcctgatgaacgacgtgctgctgtacacctacccccagaaggacggcaagtacagactgaagaacaccctggccgtggccaacatgaaggtgagcagacccgtgatggagaaggtgccctacgccctgaagatcgagaccagcgagagctgcctgatgctgagcgccagcagctgcgccgagagagacgagtggtacggctgcctgagcagagccctgcccgaggactacaaggcccaggccctggccgccttccaccacagcgtggagatcagagagagactgggcgtgagcctgggcgagagaccccccaccctggtgcccgtgacccacgtgatgatgtgcatgaactgcggctgcgacttcagcctgaccctgagaagacaccactgccacgcctgcggcaagatcgtgtgcagaaactgcagcagaaacaagtaccccctgaagtacctgaaggacagaatggccaaggtgtgcgacggctgcttcggcgagctgaagaagagaggcagagccgtgcccggcctgatgagagagagacccgtgagcatgagcttccccctgagcagccccagattcagcggcagcgccttcagcagcgtgttccagagcatcaaccccagcaccttcaagaagcagaagaaggtgcccagcgccctgaccgaggtggccgccagcggcgagggcagcgccatcagcggctacctgagcagatgcaagagaggcaagagacactggaagaagctgtggttcgtgatcaagggcaaggtgctgtacacctacatggccagcgaggacaaggtggccctggagagcatgcccctgctgggcttcaccatcgcccccgagaaggaggagggcagcagcgaggtgggccccatcttccacctgtaccacaagaagaccctgttctacagcttcaaggccgaggacaccaacagcgcccagagatggatcgaggccatggaggacgccagcgtgctgtag

SEQ ID NO: 9605 - DNA, 768 bp, synthetic construct
  source 1..768: mol_type = other DNA; note = Synthetic coding sequence
atggccagcagcgacctggagcagctgtgcagccacgtgaacgagaagatcggcaacatcaagaagaccctgagcctgagaaactgcggccaggagcccaccctgaagaccgtgctgaacaagatcggcgacgagatcatcgtgatcaacgagctgctgaacaagctggagctggagatccagtaccaggagcagaccaacaacagcctgaaggagctgtgcgagagcctggaggaggactacaaggacatcgagcacctgaaggagaacgtgcccagccacctgccccaggtgaccgtgacccagagctgcgtgaagggcagcgacctggaccccgaggagcccatcaaggtggaggagcccgagcccgtgaagaagccccccaaggagcagagaagcatcaaggagatgcccttcatcacctgcgacgagttcaacggcgtgcccagctacatgaagagcagactgacctacaaccagatcaacgacgtgatcaaggagatcaacaaggccgtgatcagcaagtacaagatcctgcaccagcccaagaagagcatgaacagcgtgaccagaaacctgtaccacagattcatcgacgaggagaccaaggacaccaagggcagatacttcatcgtggaggccgacatcaaggagttcaccaccctgaaggccgacaagaagttccacgtgctgctgaacatcctgagacactgcagaagactgagcgaggtgagaggcggcggcctgaccagatacgtgatcacctag

SEQ ID NO: 9606 - DNA, 627 bp, synthetic construct
  source 1..627: mol_type = other DNA; note = Synthetic coding sequence
atgagcgccggcggcgacttcggcaaccccctgagaaagttcaagctggtgttcctgggcgagcagagcgtgggcaagaccagcctgatcaccagattcatgtacgacagcttcgacaacacctaccaggccaccatcggcatcgacttcctgagcaagaccatgtacctggaggacagaaccgtgagactgcagctgtgggacaccgccggccaggagagattcagaagcctgatccccagctacatcagagacagcaccgtggccgtggtggtgtacgacatcaccaacctgaacagcttccagcagaccagcaagtggatcgacgacgtgagaaccgagagaggcagcgacgtgatcatcatgctggtgggcaacaagaccgacctggccgacaagagacagatcaccatcgaggagggcgagcagagagccaaggagctgagcgtgatgttcatcgagaccagcgccaagaccggctacaacgtgaagcagctgttcagaagagtggccagcgccctgcccggcatggagaacgtgcaggagaagagcaaggagggcatgatcgacatcaagctggacaagccccaggagccccccgccagcgagggcggctgcagctgctag

SEQ ID NO: 9607 - DNA, 3168 bp, synthetic construct
  source 1..3168: mol_type = other DNA; note = Synthetic coding sequence
atgaccgtggagcagaacgtgctgcagcagagcgccgcccagaagcaccagcagaccttcctgaaccagctgagagagatcaccggcatcaacgacacccagatcctgcagcaggccctgaaggacagcaacggcaacctggagctggccgtggccttcctgaccgccaagaacgccaagaccccccagcaggaggagaccacctactaccagaccgccctgcccggcaacgacagatacatcagcgtgggcagccaggccgacaccaacgtgatcgacctgaccggcgacgacaaggacgacctgcagagagccatcgccctgagcctggccgagagcaacagagccttcagagagaccggcatcaccgacgaggagcaggccatcagcagagtgctggaggccagcatcgccgagaacaaggcctgcctgaagagaacccccaccgaggtgtggagagacagcagaaacccctacgacagaaagagacaggacaaggcccccgtgggcctgaagaacgtgggcaacacctgctggttcagcgccgtgatccagagcctgttcaacctgctggagttcagaagactggtgctgaactacaagccccccagcaacgcccaggacctgcccagaaaccagaaggagcacagaaacctgcccttcatgagagagctgagatacctgttcgccctgctggtgggcaccaagagaaagtacgtggaccccagcagagccgtggagatcctgaaggacgccttcaagagcaacgacagccagcagcaggacgtgagcgagttcacccacaagctgctggactggctggaggacgccttccagatgaaggccgaggaggagaccgacgaggagaagcccaagaaccccatggtggagctgttctacggcagattcctggccgtgggcgtgctggagggcaagaagttcgagaacaccgagatgttcggccagtaccccctgcaggtgaacggcttcaaggacctgcacgagtgcctggaggccgccatgatcgagggcgagatcgagagcctgcacagcgagaacagcggcaagagcggccaggagcactggttcaccgagctgccccccgtgctgaccttcgagctgagcagattcgagttcaaccaggccctgggcagacccgagaagatccacaacaagctggagttcccccaggtgctgtacctggacagatacatgcacagaaacagagagatcaccagaatcaagagagaggagatcaagagactgaaggactacctgaccgtgctgcagcagagactggagagatacctgagctacggcagcggccccaagagattccccctggtggacgtgctgcagtacgccctggagttcgccagcagcaagcccgtgtgcaccagccccgtggacgacatcgacgccagcagcccccccagcggcagcatccccagccagaccctgcccagcaccaccgagcagcagggcgccctgagcagcgagctgcccagcaccagccccagcagcgtggccgccatcagcagcagaagcgtgatccacaagcccttcacccagagcagaatcccccccgacctgcccatgcaccccgcccccagacacatcaccgaggaggagctgagcgtgctggagagctgcctgcacagatggagaaccgagatcgagaacgacaccagagacctgcaggagagcatcagcagaatccacagaaccatcgagctgatgtacagcgacaagagcatgatccaggtgccctacagactgcacgccgtgctggtgcacgagggccaggccaacgccggccactactgggcctacatcttcgaccacagagagagcagatggatgaagtacaacgacatcgccgtgaccaagagcagctgggaggagctggtgagagacagcttcggcggctacagaaacgccagcgcctactgcctgatgtacatcaacgacaaggcccagttcctgatccaggaggagttcaacaaggagaccggccagcccctggtgggcatcgagaccctgccccccgacctgagagacttcgtggaggaggacaaccagagattcgagaaggagctggaggagtgggacgcccagctggcccagaaggccctgcaggagaagctgctggccagccagaagctgagagagagcgagaccagcgtgaccaccgcccaggccgccggcgaccccgagtacctggagcagcccagcagaagcgacttcagcaagcacctgaaggaggagaccatccagatcatcaccaaggccagccacgagcacgaggacaagagccccgagaccgtgctgcagagcgccatcaagctggagtacgccagactggtgaagctggcccaggaggacaccccccccgagaccgactacagactgcaccacgtggtggtgtacttcatccagaaccaggcccccaagaagatcatcgagaagaccctgctggagcagttcggcgacagaaacctgagcttcgacgagagatgccacaacatcatgaaggtggcccaggccaagctggagatgatcaagcccgaggaggtgaacctggaggagtacgaggagtggcaccaggactacagaaagttcagagagaccaccatgtacctgatcatcggcctggagaacttccagagagagagctacatcgacagcctgctgttcctgatctgcgcctaccagaacaacaaggagctgctgagcaagggcctgtacagaggccacgacgaggagctgatcagccactacagaagagagtgcctgctgaagctgaacgagcaggccgccgagctgttcgagagcggcgaggacagagaggtgaacaacggcctgatcatcatgaacgagttcatcgtgcccttcctgcccctgctgctggtggacgagatggaggagaaggacatcctggccgtggaggacatgagaaacagatggtgcagctacctgggccaggagatggagccccacctgcaggagaagctgaccgacttcctgcccaagctgctggactgcagcatggagatcaagagcttccacgagccccccaagctgcccagctacagcacccacgagctgtgcgagagattcgccagaatcatgctgagcctgagcagaacccccgccgacggcagatag

SEQ ID NO: 9608 - DNA, 3264 bp, synthetic construct
  source 1..3264: mol_type = other DNA; note = Synthetic coding sequence
atgaccgtggagcagaacgtgctgcagcagagcgccgcccagaagcaccagcagaccttcctgaaccagctgagagagatcaccggcatcaacgacacccagatcctgcagcaggccctgaaggacagcaacggcaacctggagctggccgtggccttcctgaccgccaagaacgccaagaccccccagcaggaggagaccacctactaccagaccgccctgcccggcaacgacagatacatcagcgtgggcagccaggccgacaccaacgtgatcgacctgaccggcgacgacaaggacgacctgcagagagccatcgccctgagcctggccgagagcaacagagccttcagagagaccggcatcaccgacgaggagcaggccatcagcagagtgctggaggccagcatcgccgagaacaaggcctgcctgaagagaacccccaccgaggtgtggagagacagcagaaacccctacgacagaaagagacaggacaaggcccccgtgggcctgaagaacgtgggcaacacctgctggttcagcgccgtgatccagagcctgttcaacctgctggagttcagaagactggtgctgaactacaagccccccagcaacgcccaggacctgcccagaaaccagaaggagcacagaaacctgcccttcatgagagagctgagatacctgttcgccctgctggtgggcaccaagagaaagtacgtggaccccagcagagccgtggagatcctgaaggacgccttcaagagcaacgacagccagcagcaggacgtgagcgagttcacccacaagctgctggactggctggaggacgccttccagatgaaggccgaggaggagaccgacgaggagaagcccaagaaccccatggtggagctgttctacggcagattcctggccgtgggcgtgctggagggcaagaagttcgagaacaccgagatgttcggccagtaccccctgcaggtgaacggcttcaaggacctgcacgagtgcctggaggccgccatgatcgagggcgagatcgagagcctgcacagcgagaacagcggcaagagcggccaggagcactggttcaccgagctgccccccgtgctgaccttcgagctgagcagattcgagttcaaccaggccctgggcagacccgagaagatccacaacaagctggagttcccccaggtgctgtacctggacagatacatgcacagaaacagagagatcaccagaatcaagagagaggagatcaagagactgaaggactacctgaccgtgctgcagcagagactggagagatacctgagctacggcagcggccccaagagattccccctggtggacgtgctgcagtacgccctggagttcgccagcagcaagcccgtgtgcaccagccccgtggacgacatcgacgccagcagcccccccagcggcagcatccccagccagaccctgcccagcaccaccgagcagcagggcgccctgagcagcgagctgcccagcaccagccccagcagcgtggccgccatcagcagcagaagcgtgatccacaagcccttcacccagagcagaatcccccccgacctgcccatgcaccccgcccccagacacatcaccgaggaggagctgagcgtgctggagagctgcctgcacagatggagaaccgagatcgagaacgacaccagagacctgcaggagagcatcagcagaatccacagaaccatcgagctgatgtacagcgacaagagcatgatccaggtgccctacagactgcacgccgtgctggtgcacgagggccaggccaacgccggccactactgggcctacatcttcgaccacagagagagcagatggatgaagtacaacgacatcgccgtgaccaagagcagctgggaggagctggtgagagacagcttcggcggctacagaaacgccagcgcctactgcctgatgtacatcaacgacaaggcccagttcctgatccaggaggagttcaacaaggagaccggccagcccctggtgggcatcgagaccctgccccccgacctgagagacttcgtggaggaggacaaccagagattcgagaaggagctggaggagtgggacgcccagctggcccagaaggccctgcaggagaagctgctggccagccagaagctgagagagagcgagaccagcgtgaccaccgcccaggccgccggcgaccccgagtacctggagcagcccagcagaagcgacttcagcaagcacctgaaggaggagaccatccagatcatcaccaaggccagccacgagcacgaggacaagagccccgagaccgtgctgcagagcatcatgatgacccccaacatgcagggcatcatcatggccatcggcaagagcagaagcgtgtacgacagatgcggccccgaggccggcttcttcaaggccatcaagctggagtacgccagactggtgaagctggcccaggaggacaccccccccgagaccgactacagactgcaccacgtggtggtgtacttcatccagaaccaggcccccaagaagatcatcgagaagaccctgctggagcagttcggcgacagaaacctgagcttcgacgagagatgccacaacatcatgaaggtggcccaggccaagctggagatgatcaagcccgaggaggtgaacctggaggagtacgaggagtggcaccaggactacagaaagttcagagagaccaccatgtacctgatcatcggcctggagaacttccagagagagagctacatcgacagcctgctgttcctgatctgcgcctaccagaacaacaaggagctgctgagcaagggcctgtacagaggccacgacgaggagctgatcagccactacagaagagagtgcctgctgaagctgaacgagcaggccgccgagctgttcgagagcggcgaggacagagaggtgaacaacggcctgatcatcatgaacgagttcatcgtgcccttcctgcccctgctgctggtggacgagatggaggagaaggacatcctggccgtggaggacatgagaaacagatggtgcagctacctgggccaggagatggagccccacctgcaggagaagctgaccgacttcctgcccaagctgctggactgcagcatggagatcaagagcttccacgagccccccaagctgcccagctacagcacccacgagctgtgcgagagattcgccagaatcatgctgagcctgagcagaacccccgccgacggcagatag

SEQ ID NO: 9609 - DNA, 2559 bp, synthetic construct
  source 1..2559: mol_type = other DNA; note = Synthetic coding sequence
atgagcagcgtgagccccatccagatccccagcagactgcccctgctgctgacccacgagggcgtgctgctgcccggcagcaccatgagaaccagcgtggacagcgccagaaacctgcagctggtgagaagcagactgctgaagggcaccagcctgcagagcaccatcctgggcgtgatccccaacacccccgaccccgccagcgacgcccaggacctgccccccctgcacagaatcggcaccgccgccctggccgtgcaggtggtgggcagcaactggcccaagccccactacaccctgctgatcaccggcctgtgcagattccagatcgtgcaggtgctgaaggagaagccctaccccatcgccgaggtggagcagctggacagactggaggagttccccaacacctgcaagatgagagaggagctgggcgagctgagcgagcagttctacaagtacgccgtgcagctggtggagatgctggacatgagcgtgcccgccgtggccaagctgagaagactgctggacagcctgcccagagaggccctgcccgacatcctgaccagcatcatcagaaccagcaacaaggagaagctgcagatcctggacgccgtgagcctggaggagagattcaagatgaccatccccctgctggtgagacagatcgagggcctgaagctgctgcagaagaccagaaagcccaagcaggacgacgacaagagagtgatcgccatcagacccatcagaagaatcacccacatcagcggcaccctggaggacgaggacgaggacgaggacaacgacgacatcgtgatgctggagaagaagatcagaaccagcagcatgcccgagcaggcccacaaggtgtgcgtgaaggagatcaagagactgaagaagatgccccagagcatgcccgagtacgccctgaccagaaactacctggagctgatggtggagctgccctggaacaagagcaccaccgacagactggacatcagagccgccagaatcctgctggacaacgaccactacgccatggagaagctgaagaagagagtgctggagtacctggccgtgagacagctgaagaacaacctgaagggccccatcctgtgcttcgtgggcccccccggcgtgggcaagaccagcgtgggcagaagcgtggccaagaccctgggcagagagttccacagaatcgccctgggcggcgtgtgcgaccagagcgacatcagaggccacagaagaacctacgtgggcagcatgcccggcagaatcatcaacggcctgaagaccgtgggcgtgaacaaccccgtgttcctgctggacgaggtggacaagctgggcaagagcctgcagggcgaccccgccgccgccctgctggaggtgctggaccccgagcagaaccacaacttcaccgaccactacctgaacgtggccttcgacctgagccaggtgctgttcatcgccaccgccaacaccaccgccaccatccccgccgccctgctggacagaatggagatcatccaggtgcccggctacacccaggaggagaagatcgagatcgcccacagacacctgatccccaagcagctggagcagcacggcctgaccccccagcagatccagatcccccaggtgaccaccctggacatcatcaccagatacaccagagaggccggcgtgagaagcctggacagaaagctgggcgccatctgcagagccgtggccgtgaaggtggccgagggccagcacaaggaggccaagctggacagaagcgacgtgaccgagagagagggctgcagagagcacatcctggaggacgagaagcccgagagcatcagcgacaccaccgacctggccctgccccccgagatgcccatcctgatcgacttccacgccctgaaggacatcctgggcccccccatgtacgagatggaggtgagccagagactgagccagcccggcgtggccatcggcctggcctggacccccctgggcggcgagatcatgttcgtggaggccagcagaatggacggcgagggccagctgaccctgaccggccagctgggcgacgtgatgaaggagagcgcccacctggccatcagctggctgagaagcaacgccaagaagtaccagctgaccaacgccttcggcagcttcgacctgctggacaacaccgacatccacctgcacttccccgccggcgccgtgaccaaggacggccccagcgccggcgtgaccatcgtgacctgcctggccagcctgttcagcggcagactggtgagaagcgacgtggccatgaccggcgagatcaccctgagaggcctggtgctgcccgtgggcggcatcaaggacaaggtgctggccgcccacagagccggcctgaagcaggtgatcatccccagaagaaacgagaaggacctggagggcatccccggcaacgtgagacaggacctgagcttcgtgaccgccagctgcctggacgaggtgctgaacgccgccttcgacggcggcttcaccgtgaagaccagacccggcctgctgaacagcaagctgtag

SEQ ID NO: 9610 - DNA, 390 bp, synthetic construct
  source 1..390: mol_type = other DNA; note = Synthetic coding sequence
atggccgacggcggcggcggcggcggcaccggcgccgtgggcggcggcggcaccagccaggccagcgccggcgccgccaccggcgccaccggcgccagcggcggcggcggccccatcaaccccgccagcctgccccccggcgacccccagctgatcgccctgatcgtggagcagctgaagagcagaggcctgttcgacagcttcagaagagactgcctggccgacgtggacaccaagcccgcctaccagaacctgagacagaaggtggacaacttcgtgagcacccacctggacaagcaggagtggaaccccaccatgaacaagaaccagctgagaaacggcctgagacagagcgtggtgcagatcagacagacccccttcgagagctag

SEQ ID NO: 9611 - DNA, 1425 bp, synthetic construct
  source 1..1425: mol_type = other DNA; note = Synthetic coding sequence
atggacgaggccggcagcagcgccagcggcggcggcttcagacccggcgtggacagcctggacgagccccccaacagcagaatcttcctggtgatcagcaagtacacccccgagagcgtgctgagagagagattcagccccttcggcgacatccaggacatctgggtggtgagagacaagcacaccaaggagagcaagggcatcgccttcgtgaagttcgccagaagcagccaggcctgcagagccatggaggagatgcacggccagtgcctgggccccaacgacaccaagcccatcaaggtgttcatcgcccagagcagaagcagcggcagccacagagacgtggaggacgaggagctgaccagaatcttcgtgatgatccccaagagctacaccgaggaggacctgagagagaagttcaaggtgtacggcgacatcgagtactgcagcatcatcaagaacaaggtgaccggcgagagcaagggcctgggctacgtgagatacctgaagcccagccaggccgcccaggccatcgagaactgcgacagaagcttcagagccatcctggccgagcccaagaacaaggccagcgagagcagcgagcaggactactacagcaacatgagacaggaggccctgggccacgagcccagagtgaacatgttccccttcgagcagcagagcgagttcagcagcttcgacaagaacgacagcagaggccaggaggccatcagcaagagactgagcgtggtgagcagagtgcccttcaccgaggagcagctgttcagcatcttcgacatcgtgcccggcctggagtactgcgaggtgcagagagacccctacagcaactacggccacggcgtggtgcagtacttcaacgtggccagcgccatctacgccaagtacaagctgcacggcttccagtacccccccggcaacagaatcggcgtgagcttcatcgacgacggcagcaacgccaccgacctgctgagaaagatggccacccagatggtggccgcccagctggccagcatggtgtggaacaaccccagccagcagcagttcatgcagttcggcggcagcagcggcagccagctgccccagatccagaccgacgtggtgctgcccagctgcaagaagaaggcccccgccgagacccccgtgaaggagagactgttcatcgtgttcaacccccaccccctgcccctggacgtgctggaggacatcttctgcagattcggcaacctgatcgaggtgtacctggtgagcggcaagaacgtgggctacgccaagtacgccgacagaatcagcgccaacgacgccatcgccaccctgcacggcaagatcctgaacggcgtgagactgaaggtgatgctggccgacagccccagagaggagagcaacaagagacagagaacctactag

SEQ ID NO: 9612 - DNA, 1938 bp, synthetic construct
  source 1..1938: mol_type = other DNA; note = Synthetic coding sequence
atgagacccagaaaggccttcctgctgctgctgctgctgggcctggtgcagctgctggccgtggccggcgccgagggccccgacgaggacagcagcaacagagagaacgccatcgaggacgaggaggaggaggaggaggaggacgacgacgaggaggaggacgacctggaggtgaaggaggagaacggcgtgctggtgctgaacgacgccaacttcgacaacttcgtggccgacaaggacaccgtgctgctggagttctacgccccctggtgcggccactgcaagcagttcgcccccgagtacgagaagatcgccaacatcctgaaggacaaggacccccccatccccgtggccaagatcgacgccaccagcgccagcgtgctggccagcagattcgacgtgagcggctaccccaccatcaagatcctgaagaagggccaggccgtggactacgagggcagcagaacccaggaggagatcgtggccaaggtgagagaggtgagccagcccgactggacccccccccccgaggtgaccctggtgctgaccaaggagaacttcgacgaggtggtgaacgacgccgacatcatcctggtggagttctacgccccctggtgcggccactgcaagaagctggcccccgagtacgagaaggccgccaaggagctgagcaagagaagcccccccatccccctggccaaggtggacgccaccgccgagaccgacctggccaagagattcgacgtgagcggctaccccaccctgaagatcttcagaaagggcagaccctacgactacaacggccccagagagaagtacggcatcgtggactacatgatcgagcagagcggcccccccagcaaggagatcctgaccctgaagcaggtgcaggagttcctgaaggacggcgacgacgtgatcatcatcggcgtgttcaagggcgagagcgaccccgcctaccagcagtaccaggacgccgccaacaacctgagagaggactacaagttccaccacaccttcagcaccgagatcgccaagttcctgaaggtgagccagggccagctggtggtgatgcagcccgagaagttccagagcaagtacgagcccagaagccacatgatggacgtgcagggcagcacccaggacagcgccatcaaggacttcgtgctgaagtacgccctgcccctggtgggccacagaaaggtgagcaacgacgccaagagatacaccagaagacccctggtggtggtgtactacagcgtggacttcagcttcgactacagagccgccacccagttctggagaagcaaggtgctggaggtggccaaggacttccccgagtacaccttcgccatcgccgacgaggaggactacgccggcgaggtgaaggacctgggcctgagcgagagcggcgaggacgtgaacgccgccatcctggacgagagcggcaagaagttcgccatggagcccgaggagttcgacagcgacaccctgagagagttcgtgaccgccttcaagaagggcaagctgaagcccgtgatcaagagccagcccgtgcccaagaacaacaagggccccgtgaaggtggtggtgggcaagaccttcgacagcatcgtgatggaccccaagaaggacgtgctgatcgagttctacgccccctggtgcggccactgcaagcagctggagcccgtgtacaacagcctggccaagaagtacaagggccagaagggcctggtgatcgccaagatggacgccaccgccaacgacgtgcccagcgacagatacaaggtggagggcttccccaccatctacttcgcccccagcggcgacaagaagaaccccgtgaagttcgagggcggcgacagagacctggagcacctgagcaagttcatcgaggagcacgccaccaagctgagcagaaccaaggaggagctgtag

SEQ ID NO: 9613 - DNA, 1338 bp, synthetic construct
  source 1..1338: mol_type = other DNA; note = Synthetic coding sequence
atgtaccccaaccccctgatctactgcacctgctgggacccctggaacctgggccccagaaagctgatcaagaccccccagctgcccagaaagaacagcaccggcagcagcaagctgacccccctggtgcccgcccccaagaaccacaactacctgcagcccaccaagcccgtggtgagccccaagatgaagatccacagcgccagacaggaggagaccaacaagagcttctacgaggtgatcaacgtgagccccggctaccagctggtgagaaacagagagcagatcagcgtgaccctgggcgacgagatgttcgacagaaagaagagatgggagagcgagatccccgacaagggcagattcagcagaaccaacatcatcagcgacctggaggagcagatcagcgagctgaccgccatcatcgagcagatgaacagagaccaccagagcgcccagaagctgctgagcagcgagatggacctgagatgcgccgagatgaagcagaacttcgagaacaagaacagagagctgaaggaggcccacgaggccgagctgagcgagctggagaacaactacaaggccgccctgaaggccgagaagctggccgcccaggagaagctggaggagatgggcaaggagtacaagtacctgaagaacatgttcagaacctaccaggacagcatctacgacgagatggaggagaagtggagcaagcagaaggccaagtggaagaaggacgagaagttcgagagagagaacatcctgctgcagcagaagaagaagatgaccaagaagttcgagatggagagcggcgaggaggacaagaagatcaacgagagctgcagcgccgtgttcgagaacttcatccaggagaaggaggagctgctgaagcagcaccagagcgacaccctgcagctggaggagctgagaaagaccaaggaggtgccctggagaagagaccagatcaacagacactggcacgacgtgctgcagcagctgctgctgatgcaggtgatgcaggaggagctgcacgcccaggccctgatcctggagagcctgaacaccaacctgtactacacccagctggagctgcagaaggagaaggccatcgtgggcaacctggagaagatgctgcagaccaagttcgccgagaccgaggagaagtacaagcacaccatccagatcctgaccgaggagaacatccacctgaagcagaagatcatcagcaagaacgaggagatctgcgagggctgcagcggcagactggccagcatcaccgtgagcaaggacgacagcgacaccgtgcaggacggcagcaagaagggccaggagagctag

SEQ ID NO: 9614 - DNA, 1872 bp, synthetic construct
  source 1..1872: mol_type = other DNA; note = Synthetic coding sequence
atggagcccccccaggagaccaacagacccttcagcaccctggacaacagaagcggccaggtgcaggtgctgagcgccacccccctgctgcagagaaacccctacagcagccccgacatcatgcacatcaagggcagcgaggccagcagcgtgccctacgccctgaaccagggcaccaccgccctgcccaagaacaagaaccaggagggcaccggccacagactgctgaacatgctgagaaagaccctgaaggagagcgacagcgaggagctggagatcacccaggagacccccaacctggtgcccttcggcgacgtggtgggctgcctgggcatccacatcaagaactgcagacacttcatgcccaagatcagcctgcagcactacgccaacctgttcatcagaatcagcatcaacaaggccgtgaagtgcaccaagatgtgcagcctgctgagcaagaacgacgagaagaacaccgtgatcaagttcgacgaggtgaagtacttcagcgtgcaggtgcccagaagatacgacgacaagagaaacaacatcctgctggagctgatccagtacgacaacagagagaagagagccttcctgctgggcagcgtgcagatccacctgtacgaggtgatccagaagggctgcttcatcgaggaggtgcaggtgctgcacggcaacatcttcgtgtgcagactggaggtggagttcatgttcagctacggcaacttcggctacggcttcagccaccagctgaagcccctgcagaagatcaccgagcccagcatgttcatgaacctggcccccccccccgagagaaccgaccccgtgaccaaggtgatcaccccccagaccgtggagtaccccgccttcctgagccccgacctgaacgtgaccgtgggcacccccgccgtgcagagcagcaaccagcccagcgtggtgagactggagaagctgcagcagcagcccagagagagactggagaagatgaagaaggagtacagaaacctgaacacctggatcgacaaggccaactacctggagagcatcctgatgcccaagctggagcacaaggacagcgaggagaccaacatcgacgaggccagcgagaacaccaagagcaaccaccccgaggaggagctggagaacatcgtgggcgtggacatccccctggtgaacgaggaggccgagaccaccgccaacgagctgctggacaacgacagcgagaagggcctgaccatccccaccctgaaccagagcgaccaggacaacagcaccgccgacgccagcaagaacgacgagagcacccccagccccaccgaggtgcacagcctgtgcaccatcagcaaccaggagaccatcaaggccggcagaatcccccccctgggcgagagacagagcgagagcatgcccgacagaaagatgaagaacgtgttcttccccctggaggtgaagctgaaggacaactaccccagcatcctgaaggccgacagcagcctgagcgaggtggccttcagccccaaggagtacaacagccccagcttcagacccgagtacatcgagttcaagcccaagttccaggactgcagcgacaagttcgaggacctgcacgacatgaccagcttcacccacctgaagaaggtgaagagcagaagcagactgctgggcaagagcagcgacgacatccacaaccacgccagacacagcgccagaccctacaccgcccccgaggtgaacaagcagagagagagctacagcggcaagttcaccagcagaagaatggtgagcagcggcctggtgcacatcaacgacaagaccagcgactacgagatgcacaagatgagacccaagaagatcaagagaggctactag

SEQ ID NO: 9615 - DNA, 3594 bp, synthetic construct
  source 1..3594: mol_type = other DNA; note = Synthetic coding sequence
atgcacatcaagagcatcatcctggagggcttcaagagctacgcccagagaaccgaggtgaacggcttcgaccccctgttcaacgccatcaccggcctgaacggcagcggcaagagcaacatcctggacagcatctgcttcctgctgggcatcagcaacctgagccaggtgagagccagcaacctgcaggacctggtgtacaagaacggccaggccggcatcaccaaggccagcgtgagcatcaccttcgacaacagcgacaagaagcagagccccctgggcttcgaggtgcacgacgagatcaccgtgaccagacaggtggtgatcggcggcagaaacaagtacctgatcaacggcgtgaacgccaacaacaccagagtgcaggacctgttctgcagcgtgggcctgaacgtgaacaacccccacttcctgatcatgcagggcagaatcaccaaggtgctgaacatgaagccccccgagatcctgagcatgatcgaggaggccgccggcaccagaatgtacgagtacaagaagatcgccgcccagaagaccatcgagaagaaggaggccaagctgaaggagatcaagaccatcctggaggaggagatcacccccaccatccagaagctgaaggaggagagaagcagctacctggagtaccagaaggtgatgagagagatcgagcacctgagcagactgtacatcgcctaccagttcctgctggccgaggacaccaaggtgagaagcgccgaggagctgaaggagatgcaggacaaggtgatcaagctgcaggaggagctgagcgagaacgacaagaagatcaaggccctgaaccacgagatcgaggagctggagaagagaaaggacaaggagaccggcggcatcctgagaagcctggaggacgccctggccgaggcccagagagtgaacaccaagagccagagcgccttcgacctgaagaagaagaacctggcctgcgaggagagcaagagaaaggagctggagaagaacatggtggaggacagcaagaccctggccgccaaggagaaggaggtgaagaagatcaccgacggcctgcacgccctgcaggaggccagcaacaaggacgccgaggccctggccgccgcccagcagcacttcaacgccgtgagcgccggcctgagcagcaacgaggacggcgccgaggccaccctggccggccagatgatggcctgcaagaacgacatcagcaaggcccagaccgaggccaagcaggcccagatgaagctgaagcacgcccagcaggagctgaagaacaagcaggccgaggtgaagaagatggacagcggctacagaaaggaccaggaggccctggaggccgtgaagagactgaaggagaagctggaggccgagatgaagaagctgaactacgaggagaacaaggaggagagcctgctggagaagagaagacagctgagcagagacatcggcagactgaaggagacctacgaggccctgctggccagattccccaacctgagattcgcctacaaggaccccgagaagaactggaacagaaactgcgtgaagggcctggtggccagcctgatcagcgtgaaggacaccagcgccaccaccgccctggagctggtggccggcgagagactgtacaacgtggtggtggacaccgaggtgaccggcaagaagctgctggagagaggcgagctgaagagaagatacaccatcatccccctgaacaagatcagcgccagatgcatcgcccccgagaccctgagagtggcccagaacctggtgggccccgacaacgtgcacgtggccctgagcctggtggagtacaagcccgagctgcagaaggccatggagttcgtgttcggcaccaccttcgtgtgcgacaacatggacaacgccaagaaggtggccttcgacaagagaatcatgaccagaaccgtgaccctgggcggcgacgtgttcgacccccacggcaccctgagcggcggcgccagaagccaggccgccagcatcctgaccaagttccaggagctgaaggacgtgcaggacgagctgagaatcaaggagaacgagctgagagccctggaggaggagctggccggcctgaagaacaccgccgagaagtacagacagctgaagcagcagtgggagatgaagaccgaggaggccgacctgctgcagaccaagctgcagcagagcagctaccacaagcagcaggaggagctggacgccctgaagaagaccatcgaggagagcgaggagaccctgaagaacaccaaggagatccagagaaaggccgaggagaagtacgaggtgctggagaacaagatgaagaacgccgaggccgagagagagagagagctgaaggacgcccagaagaagctggactgcgccaagaccaaggccgacgccagcagcaagaagatgaaggagaagcagcaggaggtggaggccatcaccctggagctggaggagctgaagagagagcacaccagctacaagcagcagctggaggccgtgaacgaggccatcaagagctacgagagccagatcgaggtgatggccgccgaggtggccaagaacaaggagagcgtgaacaaggcccaggaggaggtgaccaagcagaaggaggtgatcaccgcccaggacaccgtgatcaaggccaagtacgccgaggtggccaagcacaaggagcagaacaacgacagccagctgaagatcaaggagctggaccacaacatcagcaagcacaagagagaggccgaggacggcgccgccaaggtgagcaagatgctgaaggactacgactggatcaacgccgagagacacctgttcggccagcccaacagcgcctacgacttcaagaccaacaaccccaaggaggccggccagagactgcagaagctgcaggagatgaaggagaagctgggcagaaacgtgaacatgagagccatgaacgtgctgaccgaggccgaggagagatacaacgacctgatgaagaagaagagaatcgtggagaacgacaagagcaagatcctgaccaccatcgaggacctggaccagaagaagaaccaggccctgaacatcgcctggcagaaggtgaacaaggacttcggcagcatcttcagcaccctgctgcccggcgccaacgccatgctggccccccccgagggccagaccgtgctggacggcctggagttcaaggtggccctgggcaacacctggaaggagaacctgaccgagctgagcggcggccagagaagcctggtggccctgagcctgatcctgagcatgctgctgttcaagcccgcccccatctacatcctggacgaggtggacgccgccctggacctgagccacacccagaacatcggccagatgctgagaacccacttcacccacagccagttcatcgtggtgagcctgaaggagggcatgttcaacaacgccaacgtgctgttcaagaccaagttcgtggacggcgtgagcaccgtggccagattcacccagtgccagaacggcaagatcagcaaggaggccaagagcaaggccaagccccccaagggcgcccacgtggaggtgtag

SEQ ID NO: 9616 - DNA, 1080 bp, synthetic construct
  source 1..1080: mol_type = other DNA; note = Synthetic coding sequence
atgagaaccgccgacagagaggccagacccggcctgcccagcctgctgctgctgctgctggccggcgccggcctgagcgccgccagcccccccgccgcccccagattcaacgtgagcctggacagcgtgcccgagctgagatggctgcccgtgctgagacactacgacctggacctggtgagagccgccatggcccaggtgatcggcgacagagtgcccaagtgggtgcacgtgctgatcggcaaggtggtgctggagctggagagattcctgccccagcccttcaccggcgagatcagaggcatgtgcgacttcatgaacctgagcctggccgactgcctgctggtgaacctggcctacgagagcagcgtgttctgcaccagcatcgtggcccaggacagcagaggccacatctaccacggcagaaacctggactaccccttcggcaacgtgctgagaaagctgaccgtggacgtgcagttcctgaagaacggccagatcgccttcaccggcaccaccttcatcggctacgtgggcctgtggaccggccagagcccccacaagttcaccgtgagcggcgacgagagagacaagggctggtggtgggagaacgccatcgccgccctgttcagaagacacatccccgtgagctggctgatcagagccaccctgagcgagagcgagaacttcgaggccgccgtgggcaagctggccaagacccccctgatcgccgacgtgtactacatcgtgggcggcaccagccccagagagggcgtggtgatcaccagaaacagagacggccccgccgacatctggcccctggaccccctgaacggcgcctggttcagagtggagaccaactacgaccactggaagcccgcccccaaggaggacgacagaagaaccagcgccatcaaggccctgaacgccaccggccaggccaacctgagcctggaggccctgttccagatcctgagcgtggtgcccgtgtacaacaacttcaccatctacaccaccgtgatgagcgccggcagccccgacaagtacatgaccagaatcagaaaccccagcagaaagtag

SEQ ID NO: 9617 - DNA, 1647 bp, synthetic construct
  source 1..1647: mol_type = other DNA; note = Synthetic coding sequence
atggccctgcacgtgcccaaggcccccggcttcgcccagatgctgaaggagggcgccaagcacttcagcggcctggaggaggccgtgtacagaaacatccaggcctgcaaggagctggcccagaccaccagaaccgcctacggccccaacggcatgaacaagatggtgatcaaccacctggagaagctgttcgtgaccaacgacgccgccaccatcctgagagagctggaggtgcagcaccccgccgccaagatgatcgtgatggccagccacatgcaggagcaggaggtgggcgacggcaccaacttcgtgctggtgttcgccggcgccctgctggagctggccgaggagctgctgagaatcggcctgagcgtgagcgaggtgatcgagggctacgagatcgcctgcagaaaggcccacgagatcctgcccaacctggtgtgctgcagcgccaagaacctgagagacatcgacgaggtgagcagcctgctgagaaccagcatcatgagcaagcagtacggcaacgaggtgttcctggccaagctgatcgcccaggcctgcgtgagcatcttccccgacagcggccacttcaacgtggacaacatcagagtgtgcaagatcctgggcagcggcatcagcagcagcagcgtgctgcacggcatggtgttcaagaaggagaccgagggcgacgtgaccagcgtgaaggacgccaagatcgccgtgtacagctgccccttcgacggcatgatcaccgagaccaagggcaccgtgctgatcaagaccgccgaggagctgatgaacttcagcaagggcgaggagaacctgatggacgcccaggtgaaggccatcgccgacaccggcgccaacgtggtggtgaccggcggcaaggtggccgacatggccctgcactacgccaacaagtacaacatcatgctggtgagactgaacagcaagtgggacctgagaagactgtgcaagaccgtgggcgccaccgccctgcccagactgaccccccccgtgctggaggagatgggccactgcgacagcgtgtacctgagcgaggtgggcgacacccaggtggtggtgttcaagcacgagaaggaggacggcgccatcagcaccatcgtgctgagaggcagcaccgacaacctgatggacgacatcgagagagccgtggacgacggcgtgaacaccttcaaggtgctgaccagagacaagagactggtgcccggcggcggcgccaccgagatcgagctggccaagcagatcaccagctacggcgagacctgccccggcctggagcagtacgccatcaagaagttcgccgaggccttcgaggccatccccagagccctggccgagaacagcggcgtgaaggccaacgaggtgatcagcaagctgtacgccgtgcaccaggagggcaacaagaacgtgggcctggacatcgaggccgaggtgcccgccgtgaaggacatgctggaggccggcatcctggacacctacctgggcaagtactgggccatcaagctggccaccaacgccgccgtgaccgtgctgagagtggaccagatcatcatggccaagcccgccggcggccccaagccccccagcggcaagaaggactgggacgacgaccagaacgactag

SEQ ID NO: 9618 - DNA, 690 bp, synthetic construct
  source 1..690: mol_type = other DNA; note = Synthetic coding sequence
atgaacatcagaaacgcccagcccgacgacctgatgaacatgcagcactgcaacctgctgtgcctgcccgagaactaccagatgaagtactacctgtaccacggcctgagctggccccagctgagctacatcgccgaggacgaggacggcaagatcgtgggctacgtgctggccaagatggaggaggagcccgacgacgtgccccacggccacatcaccagcctggccgtgaagagaagccacagaagactgggcctggcccagaagctgatggaccaggccagcagagccatgatcgagaacttcaacgccaagtacgtgagcctgcacgtgagaaagagcaacagacccgccctgcacctgtacagcaacaccctgaacttccagatcagcgaggtggagcccaagtactacgccgacggcgaggacgcctacgccatgaagagagacctgagccagatggccgacgagctgagaagacagatggacctgaagaagggcggctacgtggtgctgggcagcagagagaaccaggagacccagggcagcaccctgagcgacagcgaggaggcctgccagcagaagaaccccgccaccgaggagagcggcagcgacagcaaggagcccaaggagagcgtggagagcaccaacgtgcaggacagcagcgagagcagcgacagcaccagctag

SEQ ID NO: 9619 - DNA, 1374 bp, synthetic construct
  source 1..1374: mol_type = other DNA; note = Synthetic coding sequence
atgagcgccctgagaagaagcggctacggccccagcgacggccccagctacggcagatactacggccccggcggcggcgacgtgcccgtgcacccccccccccccctgtaccccctgagacccgagcccccccagccccccatcagctggagagtgagaggcggcggccccgccgagaccacctggctgggcgagggcggcggcggcgacggctactaccccagcggcggcgcctggcccgagcccggcagagccggcggcagccaccaggagcagcccccctaccccagctacaacagcaactactggaacagcaccgccagaagcagagccccctaccccagcacctaccccgtgagacccgagctgcagggccagagcctgaacagctacaccaacggcgcctacggccccacctacccccccggccccggcgccaacaccgccagctacagcggcgcctactacgcccccggctacacccagaccagctacagcaccgaggtgcccagcacctacagaagcagcggcaacagccccacccccgtgagcagatggatctacccccagcaggactgccagaccgaggccccccccctgagaggccaggtgcccggctacccccccagccagaaccccggcatgaccctgccccactacccctacggcgacggcaacagaagcgtgccccagagcggccccaccgtgagaccccaggaggacgcctgggccagccccggcgcctacggcatgggcggcagatacccctggcccagcagcgcccccagcgccccccccggcaacctgtacatgaccgagagcaccagcccctggcccagcagcggcagcccccagagcccccccagcccccccgtgcagcagcccaaggacagcagctacccctacagccagagcgaccagagcatgaacagacacaacttcccctgcagcgtgcaccagtacgagagcagcggcaccgtgaacaacgacgacagcgacctgctggacagccaggtgcagtacagcgccgagccccagctgtacggcaacgccaccagcgaccaccccaacaaccaggaccagagcagcagcctgcccgaggagtgcgtgcccagcgacgagagcaccccccccagcatcaagaagatcatccacgtgctggagaaggtgcagtacctggagcaggaggtggaggagttcgtgggcaagaagaccgacaaggcctactggctgctggaggagatgctgaccaaggagctgctggagctggacagcgtggagaccggcggccaggacagcgtgagacaggccagaaaggaggccgtgtgcaagatccaggccatcctggagaagctggagaagaagggcctgtag

SEQ ID NO: 9620 - DNA, 3201 bp, synthetic construct
  source 1..3201: mol_type = other DNA; note = Synthetic coding sequence
atgcagagcaccgacctgggcaacaaggagagcggcaagatctggcacagaaagcccagccccgccaccagagacggcatcatcgtgaacatcatccacaacaccagcgactaccaccccaaggtgctgagattcctgaacgtggccttcgacggcaccggcgactgcctgatcgccggcgaccaccagggcaacatctacgtgttcgacctgcacggcaacagattcaacctggtgcagagaaccgcccaggcctgcaccgccctggccttcaacctgagaagaaagagcgagttcctggtggccctggccgactacagcatcaagtgcttcgacaccgtgaccaaggagctggtgagctggatgagaggccacgagagcagcgtgttcagcatcagcgtgcacgccagcggcaagtacgccatcaccaccagcagcgacaccgcccagctgtgggacctggacaccttccagagaaagagaaagctgaacatcagacagagcgtgggcatccagaaggtgttcttcctgcccctgagcaacaccatcctgagctgcttcaaggacaacagcatcttcgcctgggagtgcgacaccctgttctgcaagtaccagctgcccgccccccccgagagcagcagcatcctgtacaaggtgttcgccgtgaccagagacggcagaatcctggccgccggcggcaagagcaaccacctgcacctgtggtgcctggaggccagacagctgttcagaatcatccagatgcccaccaaggtgagagccatcagacacctggagttcctgcccgacagcttcgacgccggcagcaaccaggtgctgggcgtgctgagccaggacggcatcatgagattcatcaacatgcagacctgcaagctgctgttcgagatcggcagcctggacgagggcatcagcagcagcgccatcagcccccacggcagatacatcgccagcatcatggagaacggcagcctgaacatctacagcgtgcaggccctgacccaggagatcaacaagccccccccccccctggtgaaggtgatcgaggacctgcccaagaacaagctgagcagcagcgacctgaagatgaaggtgaccagcggcagagtgcagcagcccgccaagagcagagagagcaagatgcagaccagaatcctgaagcaggacctgaccggcgacttcgagagcaagaagaacgagctgcccgacggcctgaacaagaagagactgcagatcctgctgaagggctacggcgagtaccccaccaagtacagaatgttcatctggagaagcctgctgcagctgcccgagaaccacaccgccttcagcaccctgatcgacaagggcacccacgtggccttcctgaacctgcagaagaagtaccccatcaagagcagaaagctgctgagagtgctgcagagaaccctgagcgccctggcccactggagcgtgatcttcagcgacaccccctacctgcccctgctggccttccccttcgtgaagctgttccagaacaaccagctgatctgcttcgaggtgatcgccaccctgatcatcaactggtgccagcactggttcgagtacttccccaacccccccatcaacatcctgagcatgatcgagaacgtgctggccttccacgacaaggagctgctgcagcacttcatcgaccacgacatcaccagccagctgtacgcctggcccctgctggagaccgtgttcagcgaggtgctgaccagagaggagtggctgaagctgttcgacaacatcttcagcaaccaccccagcttcctgctgatgaccgtggtggcctacaacatctgcagcagaacccccctgctgagctgcaacctgaaggacgacttcgagttcttcttccaccacagaaacaacctggacatcaacgtggtgatcagacaggtgtaccacctgatggagaccacccccaccgacatccaccccgacagcatgctgaacgtgttcgtggccctgaccaagggccagtaccccgtgttcaaccagtaccccaagttcatcgtggactaccagacccaggagagagagagaatcagaaacgacgagctggactacctgagagagagacagaccgtggaggacatgcaggccaaggtggaccagcagagagtggaggacgaggcctggtaccagaagcaggagctgctgagaaaggccgaggagaccagaagagagatgctgctgcaggaggaggagaagatgatccagcagagacagagactggccgccgtgaagagagagctgaaggtgaaggagatgcacctgcaggacgccgccagaagaagattcctgaagctgcagcaggaccagcaggagatggagctgagaagactggacgacgagatcggcagaaaggtgtacatgagagacagagagatcgccgccaccgccagagacctggagatgagacagctggagctggagagccagaagagactgtacgagaagaacctgaccgagaaccaggaggccctggccaaggagatgagagccgacgccgacgcctacagaagaaaggtggacctggaggagcacatgttccacaagctgatcgaggccggcgagacccagagccagaagacccagaaggtgatcaaggagaacctggccaaggccgagcaggcctgcctgaacaccgactggcagatccagagcctgcacaagcagaagtgcgacgacctgcagagaaacaagtgctaccaggaggtggccaagctgctgagagagaacagaagaaaggagatcgagatcatcaacgccatggtggaggaggaggccaagaagtggaaggaggccgagggcaaggagttcagactgagaagcgccaagaaggccagcgccctgagcgacgccagcagaaagtggttcctgaagcaggagatcaacgccgccgtggagcacgccgagaacccctgccacaaggaggagcccagattccagaacgagcaggacagcagctgcctgcccagaaccagccagctgaacgacagcagcgagatggaccccagcacccagatcagcctgaacagaagagccgtggagtgggacaccaccggccagaacctgatcaagaaggtgagaaacctgagacagagactgaccgccagagccagacacagatgccagaccccccacctgctggccgcctag

SEQ ID NO: 9621 - DNA, 618 bp, synthetic construct
  source 1..618: mol_type = other DNA; note = Synthetic coding sequence
atggagggcaacggccccgccgccgtgcactaccagcccgccagcccccccagagacgcctgcgtgtacagcagctgctactgcgaggagaacatctggaagctgtgcgagtacatcaagaaccacgaccagtaccccctggaggagtgctacgccgtgttcatcagcaacgagagaaagatgatccccatctggaagcagcaggccagacccggcgacggccccgtgatctgggactaccacgtggtgctgctgcacgtgagcagcggcggccagaacttcatctacgacctggacaccgtgctgcccttcccctgcctgttcgacacctacgtggaggacgccttcaagagcgacgacgacatccacccccagttcagaagaaagttcagagtgatcagagccgacagctacctgaagaacttcgccagcgacagaagccacatgaaggacagcagcggcaactggagagagcccccccccccctacccctgcatcgagaccggcgacagcaagatgaacctgaacgacttcatcagcatggaccccaaggtgggctggggcgccgtgtacaccctgagcgagttcacccacagattcggcagcaagaactgctag

SEQ ID NO: 9622 - DNA, 1974 bp, synthetic construct
  source 1..1974: mol_type = other DNA; note = Synthetic coding sequence
atgagccaggtgctgttccaccagctggtgcccctgcaggtgaagtgcaaggactgcgaggagagaagagtgagcatcagaatgagcatcgagctgcagagcgtgagcaaccccgtgcacagaaaggacctggtgatcagactgaccgacgacaccgaccccttcttcctgtacaacctggtgatcagcgaggaggacttccagagcctgaagttccagcagggcctgctggtggacttcctggccttcccccagaagttcatcgacctgctgcagcagtgcacccaggagcacgccaaggagatccccagattcctgctgcagctggtgagccccgccgccatcctggacaacagccccgccttcctgaacgtggtggagaccaaccccttcaagcacctgacccacctgagcctgaagctgctgcccggcaacgacgtggagatcaagaagttcctggccggctgcctgaagtgcagcaaggaggagaagctgagcctgatgcagagcctggacgacgccaccaagcagctggacttcaccagaaagaccctggccgagaagaagcaggagctggacaagctgagaaacgagtgggccagccacaccgccgccctgaccaacaagcacagccaggagctgaccaacgagaaggagaaggccctgcaggcccaggtgcagtaccagcagcagcacgagcagcagaagaaggacctggagatcctgcaccagcagaacatccaccagctgcagaacagactgagcgagctggaggccgccaacaaggacctgaccgagagaaagtacaagggcgacagcaccatcagagagctgaaggccaagctgagcggcgtggaggaggagctgcagagaaccaagcaggaggtgctgagcctgagaagagagaacagcaccctggacgtggagtgccacgagaaggagaagcacgtgaaccagctgcagaccaaggtggccgtgctggagcaggagatcaaggacaaggaccagctggtgctgagaaccaaggaggccttcgacaccatccaggagcagaaggtggtgctggaggagaacggcgagaagaaccaggtgcagctgggcaagctggaggccaccatcaagagcctgagcgccgagctgctgaaggccaacgagatcatcaagaagctgcagggcgacctgaagaccctgatgggcaagctgaagctgaagaacaccgtgaccatccagcaggagaagctgctggccgagaaggaggagaagctgcagaaggagcagaaggagctgcaggacgtgggccagagcctgagaatcaaggagcaggaggtgtgcaagctgcaggagcagctggaggccaccgtgaagaagctggaggagagcaagcagctgctgaagaacaacgagaagctgatcacctggctgaacaaggagctgaacgagaaccagctggtgagaaagcaggacgtgctgggccccagcaccaccccccccgcccacagcagcagcaacaccatcagaagcggcatcagccccaacctgaacgtggtggacggcagactgacctaccccacctgcggcatcggctaccccgtgagcagcgccttcgccttccagaacaccttcccccacagcatcagcgccaagaacaccagccaccccggcagcggcaccaaggtgcagttcaacctgcagttcaccaagcccaacgccagcctgggcgacgtgcagagcggcgccaccatcagcatgccctgcagcaccgacaaggagaacggcgagaacgtgggcctggagagcaagtacctgaagaagagagaggacagcatccccctgagaggcctgagccagaacctgttcagcaacagcgaccaccagagagacggcaccctgggcgccctgcacaccagcagcaagcccaccgccctgcccagcgccagcagcgcctacttccccggccagctgcccaacagctag

SEQ ID NO: 9623 - DNA, 237 bp, synthetic construct
  source 1..237: mol_type = other DNA; note = Synthetic coding sequence
atgagattcatgatgatgagagccgagaacttcttcatcctgagaagaaagcccgtggagggctacgacatcagcttcctgatcaccaacttccacaccgagcagatgtacaagcacaagctggtggacttcgtgatccacttcatggaggagatcgacaaggagatcagcgagatgaagctgagcgtgaacgccagagccagaatcgtggccgaggagttcctgaagaacttctag

SEQ ID NO: 9624 - DNA, 933 bp, synthetic construct
  source 1..933: mol_type = other DNA; note = Synthetic coding sequence
atgcccctgctggtggagggcagaagagtgagactgccccagagcgccggcgacctggtgagagcccacccccccctggaggagagagccagactgctgagaggccagagcgtgcagcaggtgggcccccagggcctgctgtacgtgcagcagagagagctggccgtgaccagccccaaggacggcagcatcagcatcctgggcagcgacgacgccaccacctgccacatcgtggtgctgagacacaccggcaacggcgccacctgcctgacccactgcgacggcaccgacaccaaggccgaggtgcccctgatcatgaacagcatcaagagcttcagcgaccacgcccagtgcggcagactggaggtgcacctggtgggcggcttcagcgacgacagacagctgagccagaagctgacccaccagctgctgagcgagttcgacagacaggaggacgacatccacctggtgaccctgtgcgtgaccgagctgaacgacagagaggagaacgagaaccacttccccgtgatctacggcatcgccgtgaacatcaagaccgccgagatctacagagccagcttccaggacagaggccccgaggagcagctgagagccgccagaaccctggccggcggccccatgatcagcatctacgacgccgagaccgagcagctgagaatcggcccctacagctggacccccttcccccacgtggacttctggctgcaccaggacgacaagcagatcctggagaacctgagcaccagccccctggccgagcccccccacttcgtggagcacatcagaagcaccctgatgttcctgaagaagcaccccagccccgcccacaccctgttcagcggcaacaaggccctgctgtacaagaagaacgaggacggcctgtgggagaagatcagcagccccggcagctag

SEQ ID NO: 9625 - DNA, 924 bp, synthetic construct
  source 1..924: mol_type = other DNA; note = Synthetic coding sequence
atgaccgagaccaccaagacccacgtgatcctgctggcctgcggcagcttcaaccccatcaccaagggccacatccagatgttcgagagagccagagactacctgcacaagaccggcagattcatcgtgatcggcggcatcgtgagccccgtgcacgacagctacggcaagcagggcctggtgagcagcagacacagactgatcatgtgccagctggccgtgcagaacagcgactggatcagagtggacccctgggagtgctaccaggacacctggcagaccacctgcagcgtgctggagcaccacagagacctgatgaagagagtgaccggctgcatcctgagcaacgtgaacacccccagcatgacccccgtgatcggccagccccagaacgagaccccccagcccatctaccagaacagcaacgtggccaccaagcccaccgccgccaagatcctgggcaaggtgggcgagagcctgagcagaatctgctgcgtgagaccccccgtggagagattcaccttcgtggacgagaacgccaacctgggcaccgtgatgagatacgaggagatcgagctgagaatcctgctgctgtgcggcagcgacctgctggagagcttctgcatccccggcctgtggaacgaggccgacatggaggtgatcgtgggcgacttcggcatcgtggtggtgcccagagacgccgccgacaccgacagaatcatgaaccacagcagcatcctgagaaagtacaagaacaacatcatggtggtgaaggacgacatcaaccaccccatgagcgtggtgagcagcaccaagagcagactggccctgcagcacggcgacggccacgtggtggactacctgagccagcccgtgatcgactacatcctgaagagccagctgtacatcaacgccagcggctag

SEQ ID NO: 9626 - DNA, 1476 bp, synthetic construct
  source 1..1476: mol_type = other DNA; note = Synthetic coding sequence
atggaggagggcaagatggacgagaacgagtggggctaccacggcgagggcaacaagagcctggtggtggcccacgcccagagatgcgtggtgctgagattcctgaagttcccccccaacagaaagaagaccagcgaggagatcttccagcacctgcagaacatcgtggacttcggcaagaacgtgatgaaggagttcctgggcgagaactacgtgcactacggcgaggtggtgcagctgcccctggagttcgtgaagcagctgtgcctgaagatccagagcgagagacccgagagcagatgcgacaaggacctggacaccctgagcggctacgccatgtgcctgcccaacctgaccagactgcagacctacagattcgccgagcacagacccatcctgtgcgtggagatcaagcccaagtgcggcttcatccccttcagcagcgacgtgacccacgagatgaagcacaaggtgtgcagatactgcatgcaccagcacctgaaggtggccaccggcaagtggaagcagatcagcaagtactgccccctggacctgtacagcggcaacaagcagagaatgcacttcgccctgaagagcctgctgcaggaggcccagaacaacctgaagatcttcaagaacggcgagctgatctacggctgcaaggacgccagaagccccgtggccgactggagcgagctggcccaccacctgaagcccttcttcttccccagcaacggcctggccagcggcccccactgcaccagagccgtgatcagagagctggtgcacgtgatcaccagagtgctgctgagcggcagcgacaagggcagagccggcaccctgagccccggcctgggcccccagggccccagagtgtgcgaggccagccccttcagcagaagcctgagatgccagggcaagaacacccccgagagaagcggcctgcccaagggctgcctgctgtacaagaccctgcaggtgcagatgctggacctgctggacatcgagggcctgtaccccctgtacaacagagtggagagatacctggaggagttccccgaggagagaaagaccctgcagatcgacggcccctacgacgaggccttctaccagaagctgctggacctgagcaccgaggacgacggcaccgtggccttcgccctgaccaaggtgcagcagtacagagtggccatgaccgccaaggactgcagcatcatgatcgccctgagcccctgcctgcaggacgccagcagcgaccagagacccgtggtgcccagcagcagaagcagattcgccttcagcgtgagcgtgctggacctggacctgaagccctacgagagcatcccccaccagtacaagctggacggcaagatcgtgaactactacagcaagaccgtgagagccaaggacaacgccgtgatgagcaccagattcaaggagagcgaggactgcaccctggtgctgcacaaggtgtag

SEQ ID NO: 9627 - DNA, 2640 bp, synthetic construct
  source 1..2640: mol_type = other DNA; note = Synthetic coding sequence
atgatgttctacagactgctgagcatcgtgggcagacagagagccagccccggctggcagaactggagcagcgccagaaacagcaccagcgccgccgaggccagaagcatggccctgcccacccaggcccaggtggtgatctgcggcggcggcatcaccggcaccagcgtggcctaccacctgagcaagatgggctggaaggacatcgtgctgctggagcagggcagactggccgccggcagcaccagattctgcgccggcatcctgagcaccgccagacacctgaccatcgagcagaagatggccgactacagcaacaagctgtactaccagctggagcaggagaccggcatccagaccggctacaccagaaccggcagcatcttcctggcccagacccaggacagactgatcagcctgaagagaatcaacgccggcctgaacgtgatcggcatccccagcgagatcatcagccccaagaaggtggccgagctgcaccacctgctgaacgtgcacgacctggtgggcgccatgcacgtgcccgaggacgccgtggtgagcagcgccgacgtggccctggccctggccagcgccgccagccagaacggcgtgcagatctacgacagaaccagcgtgctgcacgtgatggtgaagaagggccaggtgaccggcgtggagaccgacaagggccagatcgagtgccagtacttcgtgaactgcgccggccagtgggcctacgagctgggcctgagcaacgaggagcccgtgagcatccccctgcacgcctgcgagcacttctacctgctgaccagacccctggagacccccctgcagagcagcacccccaccatcgtggacgccgacggcagaatctacatcagaaactggcagggcggcatcctgagcggcggcttcgagaagaaccccaagcccatcttcaccgagggcaagaaccagctggagatccagaacctgcaggaggactgggaccacttcgagcccctgctgagcagcctgctgagaagaatgcccgagctggagaccctggagatcatgaagctggtgaactgccccgagaccttcacccccgacatgagatgcatcatgggcgagagccccgccgtgcagggctacttcgtgctggccggcatgaacagcgccggcctgagcttcggcggcggcgccggcaagtacctggccgagtggatggtgcacggctaccccagcgagaacgtgtgggagctggacctgaagagattcggcgccctgcagagcagcagaaccttcctgagacacagagtgatggaggtgatgcccctgatgtacgacctgaaggtgcccagatgggacttccagaccggcagacagctgagaaccagccccctgtacgacagactggacgcccagggcgccagatggatggagaagcacggcttcgagagacccaagtacttcgtgccccccgacaaggacctgctggccctggagcagagcaagaccttctacaagcccgactggttcgacatcgtggagagcgaggtgaagtgctgcaaggaggccgtgtgcgtgatcgacatgagcagcttcaccaagttcgagatcaccagcaccggcgaccaggccctggaggtgctgcagtacctgttcagcaacgacctggacgtgcccgtgggccacatcgtgcacaccggcatgctgaacgagggcggcggctacgagaacgactgcagcatcgccagactgaacaagagaagcttcttcatgatcagccccaccgaccagcaggtgcactgctgggcctggctgaagaagcacatgcccaaggacagcaacctgctgctggaggacgtgacctggaagtacaccgccctgaacctgatcggccccagagccgtggacgtgctgagcgagctgagctacgcccccatgacccccgaccacttccccagcctgttctgcaaggagatgagcgtgggctacgccaacggcatcagagtgatgagcatgacccacaccggcgagcccggcttcatgctgtacatccccatcgagtacgccctgcacgtgtacaacgaggtgatgagcgtgggccagaagtacggcatcagaaacgccggctactacgccctgagaagcctgagaatcgagaagttcttcgccttctggggccaggacatcaacaacctgaccacccccctggagtgcggcagagagagcagagtgaagctggagaagggcatggacttcatcggcagagacgccctgctgcagcagaagcagaacggcgtgtacaagagactgaccatgttcatcctggacgaccacgacagcgacctggacctgtggccctggtggggcgagcccatctacagaaacggccagtacgtgggcaagaccaccagcagcgcctacagctacagcctggagagacacgtgtgcctgggcttcgtgcacaacttcagcgaggacaccggcgaggagcaggtggtgaccgccgacttcatcaacagaggcgagtacgagatcgacatcgccggctacagattccaggccaaggccaagctgtaccccgtggccagcctgttcacccagaagagaagaaaggacgacatggagctgagcgacctgcacggcaagtag

SEQ ID NO: 9628 - DNA, 1440 bp, synthetic construct
  source 1..1440: mol_type = other DNA; note = Synthetic coding sequence
atggccaccgacagctgggccctggccgtggacgagcaggaggccgccgccgagagcctgagcaacctgcacctgaaggaggagaagatcaagcccgacaccaacggcgccgtggtgaagaccaacgccaacgccgagaagaccgacgaggaggagaaggaggacagagccgcccagagcctgctgaacaagctgatcagaagcaacctggtggacaacaccaaccaggtggaggtgctgcagagagaccccaacagccccctgtacagcgtgaagagcttcgaggagctgagactgaagccccagctgctgcagggcgtgtacgccatgggcttcaacagacccagcaagatccaggagaacgccctgcccctgatgctggccgagcccccccagaacctgatcgcccagagccagagcggcaccggcaagaccgccgccttcgtgctggccatgctgagccaggtggagcccgccaacaagtacccccagtgcctgtgcctgagccccacctacgagctggccctgcagaccggcaaggtgatcgagcagatgggcaagttctaccccgagctgaagctggcctacgccgtgagaggcaacaagctggagagaggccagaagatcagcgagcagatcgtgatcggcacccccggcaccgtgctggactggtgcagcaagctgaagttcatcgaccccaagaagatcaaggtgttcgtgctggacgaggccgacgtgatgatcgccacccagggccaccaggaccagagcatcagaatccagagaatgctgcccagaaactgccagatgctgctgttcagcgccaccttcgaggacagcgtgtggaagttcgcccagaaggtggtgcccgaccccaacgtgatcaagctgaagagagaggaggagaccctggacaccatcaagcagtactacgtgctgtgcagcagcagagacgagaagttccaggccctgtgcaacctgtacggcgccatcaccatcgcccaggccatgatcttctgccacaccagaaagaccgccagctggctggccgccgagctgagcaaggagggccaccaggtggccctgctgagcggcgagatgatggtggagcagagagccgccgtgatcgagagattcagagagggcaaggagaaggtgctggtgaccaccaacgtgtgcgccagaggcatcgacgtggagcaggtgagcgtggtgatcaacttcgacctgcccgtggacaaggacggcaaccccgacaacgagacctacctgcacagaatcggcagaaccggcagattcggcaagagaggcctggccgtgaacatggtggacagcaagcacagcatgaacatcctgaacagaatccaggagcacttcaacaagaagatcgagagactggacaccgacgacctggacgagatcgagaagatcgccaactag

SEQ ID NO: 9629 - DNA, 3255 bp, synthetic construct
  source 1..3255: mol_type = other DNA; note = Synthetic coding sequence
atggagcagcccaagggcgtggactggaccgtgatcatcctgacctgccagtacaaggacagcgtgcaggtgttccagagagagctggaggtgagacagaagagagagcagatccccgccggcaccctgctgctggccgtggaggaccccgagaagagagtgggcagcggcggcgccaccctgaacgccctgctggtggccgccgagcacctgagcgccagagccggcttcaccgtggtgaccagcgacgtgctgcacagcgcctggatcctgatcctgcacatgggcagagacttccccttcgacgactgcggcagagccttcacctgcctgcccgtggagaaccccgaggcccccgtggaggccctggtgtgcaacctggactgcctgctggacatcatgacctacagactgggccccggcagcccccccggcgtgtgggtgtgcagcaccgacatgctgctgagcgtgcccgccaaccccggcatcagctgggacagcttcagaggcgccagagtgatcgccctgcccggcagccccgcctacgcccagaaccacggcgtgtacctgaccgacccccagggcctggtgctggacatctactaccagggcaccgaggccgagatccagagatgcgtgagacccgacggcagagtgcccctggtgagcggcgtggtgttcttcagcgtggagaccgccgagagactgctggccacccacgtgagcccccccctggacgcctgcacctacctgggcctggacagcggcgccagacccgtgcagctgagcctgttcttcgacatcctgcactgcatggccgagaacgtgaccagagaggacttcctggtgggcagaccccccgagctgggccagggcgacgccgacgtggccggctacctgcagagcgccagagcccagctgtggagagagctgagagaccagcccctgaccatggcctacgtgagcagcggcagctacagctacatgaccagcagcgccagcgagttcctgctgagcctgaccctgcccggcgcccccggcgcccagatcgtgcacagccaggtggaggagcagcagctgctggccgccggcagcagcgtggtgagctgcctgctggagggccccgtgcagctgggccccggcagcgtgctgcagcactgccacctgcagggccccatccacatcggcgccggctgcctggtgaccggcctggacaccgcccacagcaaggccctgcacggcagagagctgagagacctggtgctgcagggccaccacaccagactgcacggcagccccggccacgccttcaccctggtgggcagactggacagctgggagagacagggcgccggcacctacctgaacgtgccctggagcgagttcttcaagagaaccggcgtgagagcctgggacctgtgggaccccgagaccctgcccgccgagtactgcctgcccagcgccagactgttccccgtgctgcaccccagcagagagctgggcccccaggacctgctgtggatgctggaccaccaggaggacggcggcgaggccctgagagcctggagagccagctggagactgagctgggagcagctgcagccctgcctggacagagccgccaccctggccagcagaagagacctgttcttcagacaggccctgcacaaggccagacacgtgctggaggccagacaggacctgagcctgagacccctgatctgggccgccgtgagagagggctgccccggccccctgctggccaccctggaccaggtggccgccggcgccggcgaccccggcgtggccgccagagccctggcctgcgtggccgacgtgctgggctgcatggccgagggcagaggcggcctgagaagcggccccgccgccaaccccgagtggatgagacccttcagctacctggagtgcggcgacctggccgccggcgtggaggccctggcccaggagagagacaagtggctgagcagacccgccctgctggtgagagccgccagacactacgagggcgccggccagatcctgatcagacaggccgtgatgagcgcccagcacttcgtgagcaccgagcaggtggagctgcccggccccggccagtgggtggtggccgagtgccccgccagagtggacttcagcggcggctggagcgacaccccccccctggcctacgagctgggcggcgccgtgctgggcctggccgtgagagtggacggcagaagacccatcggcgccagagccagaagaatccccgagcccgagctgtggctggccgtgggccccagacaggacgagatgaccgtgaagatcgtgtgcagatgcctggccgacctgagagactactgccagccccacgcccccggcgccctgctgaaggccgccttcatctgcgccggcatcgtgcacgtgcacagcgagctgcagctgagcgagcagctgctgagaaccttcggcggcggcttcgagctgcacacctggagcgagctgccccacggcagcggcctgggcaccagcagcatcctggccggcaccgccctggccgccctgcagagagccgccggcagagtggtgggcaccgaggccctgatccacgccgtgctgcacctggagcaggtgctgaccaccggcggcggctggcaggaccaggtgggcggcctgatgcccggcatcaaggtgggcagaagcagagcccagctgcccctgaaggtggaggtggaggaggtgaccgtgcccgagggcttcgtgcagaagctgaacgaccacctgctgctggtgtacaccggcaagaccagactggccagaaacctgctgcaggacgtgctgagaagctggtacgccagactgcccgccgtggtgcagaacgcccacagcctggtgagacagaccgaggagtgcgccgagggcttcagacagggcagcctgcccctgctgggccagtgcctgaccagctactgggagcagaagaagctgatggcccccggctgcgagcccctgaccgtgagaagaatgatggacgtgctggccccccacgtgcacggccagagcctggccggcgccggcggcggcggcttcctgtacctgctgaccaaggagccccagcagaaggaggccctggaggccgtgctggccaagaccgagggcctgggcaactacagcatccacctggtggaggtggacacccagggcctgagcctgaagctgctgggcaccgaggccagcacctgctgccccttcccctag

SEQ ID NO: 9630 - DNA, 2139 bp, synthetic construct
  source 1..2139: mol_type = other DNA; note = Synthetic coding sequence
atgcagcccggcagcgcccccccccccggcagaatggaccccagcgccccccagcccagagccgagaccagcggcaaggacatctggcaccccggcgagagatgcctggcccccagccccgacaacggcaagctgtgcgaggccagcatcaagagcatcaccgtggacgagaacggcaagagcttcgccgtggtgctgtacgccgacttccaggagagaaagatccccctgaagcagctgcaggaggtgaagttcgtgaaggactgccccagaaacctgatcttcgacgacgaggacctggagaagccctacttccccaacagaaagttccccagcagcagcgtggccttcaagctgagcgacaacggcgacagcatcccctacaccatcaacagatacctgagagactaccagagagagggcaccagattcctgtacggccactacatccacggcggcggctgcatcctgggcgacgacatgggcctgggcaagaccgtgcaggtgatcagcttcctggccgccgtgctgcacaagaagggcaccagagaggacatcgagaacaacatgcccgagttcctgctgagaagcatgaagaaggagcccctgagcagcaccgccaagaagatgttcctgatcgtggcccccctgagcgtgctgtacaactggaaggacgagctggacacctggggctacttcagagtgaccgtgctgcacggcaacagaaaggacaacgagctgatcagagtgaagcagagaaagtgcgagatcgccctgaccacctacgagaccctgagactgtgcctggacgagctgaacagcctggagtggagcgccgtgatcgtggacgaggcccacagaatcaagaaccccaaggccagagtgaccgaggtgatgaaggccctgaagtgcaacgtgagaatcggcctgaccggcaccatcctgcagaacaacatgaaggagctgtggtgcgtgatggactgggccgtgcccggcctgctgggcagcggcacctacttcaagaagcagttcagcgaccccgtggagcacggccagagacacaccgccaccaagagagagctggccaccggcagaaaggccatgcagagactggccaagaagatgagcggctggttcctgagaagaaccaagaccctgatcaaggaccagctgcccaagaaggaggacagaatggtgtactgcagcctgaccgacttccagaaggccgtgtaccagaccgtgctggagaccgaggacgtgaccctgatcctgcagagcagcgagccctgcacctgcagaagcggccagaagagaagaaactgctgctacaagaccaacagccacggcgagaccgtgaagaccctgtacctgagctacctgaccgtgctgcagaaggtggccaaccacgtggccctgctgcaggccgccagcaccagcaagcagcaggagaccctgatcaagagaatctgcgaccaggtgttcagcagattccccgacttcgtgcagaagagcaaggacgccgccttcgagaccctgagcgaccccaagtacagcggcaagatgaaggtgctgcagcagctgctgaaccactgcagaaagaacagagacaaggtgctgctgttcagcttcagcaccaagctgctggacgtgctgcagcagtactgcatggccagcggcctggactacagaagactggacggcagcaccaagagcgaggagagactgaagatcgtgaaggagttcaacagcacccaggacgtgaacatctgcctggtgagcaccatggccggcggcctgggcctgaacttcgtgggcgccaacgtggtggtgctgttcgaccccacctggaaccccgccaacgacctgcaggccatcgacagagcctacagaatcggccagtgcagagacgtgaaggtgctgagactgatcagcctgggcaccgtggaggagatcatgtacctgagacagatctacaagcagcagctgcactgcgtggtggtgggcagcgagaacgccaagagatacttcgaggccgtgcagggcagcaaggagcaccagggcgagctgttcggcatccacaacctgttcaagttcagaagccagggcagctgcctgaccaaggacatcctggaggtgtag

SEQ ID NO: 9631 - DNA, 1212 bp, synthetic construct
  source 1..1212: mol_type = other DNA; note = Synthetic coding sequence
atgaagcagagaaagggccagggcagcggcggcagcagaggcagaaagaagagaggcctgagcgacatcagccccagcaccagcctgccccccctggtggagggccagctgagatgcttcctgaagctgaccgtgaacagagtgatctggaagatcgccaagccccccacctgcgtgctggtgagagtgagatggtggggcgagaccagcgacggcaccctgttctgccccagagacgccctgcagaccgagcccaaggccgtgagaaccaccaccagatacgccatcagatgcggccccaagcagttcaccagctacctgaccgacatggccgtgctggtgctggaggtgatcaccaagctggacggcctgcccatcggcagagtgcagatcaacggcctggcccagctgagccccacccaccagatcaacggcttcttcaccatcgtgagcagcaccagcaagaagctgggcgagctgcaggtgagcctggccctggagcccctgagcgagacctacgacagctaccaccccctgcccaccaccgacatgaccgagaacgtgctgctgagcaagcagggcttcagagagaacaccgagcccagcagcacccagttccaggtgcccagcagacccagagacatccacaccatcaagatcgacggcaaggagctggccgccaacagcagcagaagcaccacccccagaggcaaggaccacgtgtgcttcgccgagaaccccgacaccatcaaggacagcagcttcggcctgcagcacagcctgaacagcggccagagcctggagagcgtgaccctgaagggcagagcccccagaaagcagatgagcctgctgaacagcagcgagttccagccccagatcagaaccgtggccaagagccacagcgacagctgcatcctgagcagcaacaacctgcccaccaaggacctgctgagcgccctgctggagcagggcaacaagctgagaaacgccatggtgatcagcgccatgaagagcagccccgagaccagcatgctgctggaccaggtgcaccccctgctgatgaagatcctgctggagcaccagcacagaagcgagcccttcctgggcatcggcctgaagaccaccctgaagatcaccagcagcctgcagctgagaatccacttcggcgacatgacccagaagctgatccccgagctgtacagctgctactag

SEQ ID NO: 9632 - DNA, 3663 bp, synthetic construct
  source 1..3663: mol_type = other DNA; note = Synthetic coding sequence
atgggcaagaagcagaagaacaagagcgaggacagcaccaaggacgacatcgacctggacgccctggccgccgagatcgagggcgccggcgccgccaaggagcaggagccccagaagagcaagggcaagaagaagaaggagaagaagaagcaggacttcgacgaggacgacatcctgaaggagctggaggagctgagcctggaggcccagggcatcaaggccgacagagagaccgtggccgtgaagcccaccgagaacaacgaggaggagttcaccagcaaggacaagaagaagaagggccagaagggcaagaagcagagcttcgacgacaacgacagcgaggagctggaggacaaggacagcaagagcaagaagaccgccaagcccaaggtggagatgtacagcggcagcgacgacgacgacgacttcaacaagctgcccaagaaggccaagggcaaggcccagaagagcaacaagaagtgggacggcagcgaggaggacgaggacaacagcaagaagatcaaggagagaagcagaatcaacagcagcggcgagagcggcgacgagagcgacgagttcctgcagagcagaaagggccagaagaagaaccagaagaacaagcccggccccaacatcgagagcggcaacgaggacgacgacgccagcttcaagatcaagaccgtggcccagaagaaggccgagaagaaggagagagagagaaagaagagagacgaggagaaggccaagctgagaaagctgaaggagaaggaggagctggagaccggcaagaaggaccagagcaagcagaaggagagccagagaaagttcgaggaggagaccgtgaagagcaaggtgaccgtggacaccggcgtgatccccgccagcgaggagaaggccgagacccccaccgccgccgaggacgacaacgagggcgacaagaagaagaaggacaagaagaagaagaagggcgagaaggaggagaaggagaaggagaagaagaagggccccagcaaggccaccgtgaaggccatgcaggaggccctggccaagctgaaggaggaggaggagagacagaagagagaggaggaggagagaatcaagagactggaggagctggaggccaagagaaaggaggaggagagactggagcaggagaagagagagagaaagaagcagaaggagaaggagagaaaggagagactgaagaaggagggcaagctgctgaccaagagccagagagaggccagagccagagccgaggccaccctgaagctgctgcaggcccagggcgtggaggtgcccagcaaggacagcctgcccaagaagagacccatctacgaggacaagaagagaaagaagatcccccagcagctggagagcaaggaggtgagcgagagcatggagctgtgcgccgccgtggaggtgatggagcagggcgtgcccgagaaggaggagacccccccccccgtggagcccgaggaggaggaggacaccgaggacgccggcctggacgactgggaggccatggccagcgacgaggagaccgagaaggtggagggcaacaaggtgcacatcgaggtgaaggagaaccccgaggaggaggaggaggaggaggaggaggaggaggaggacgaggagagcgaggaggaggaggaggaggagggcgagagcgagggcagcgagggcgacgaggaggacgagaaggtgagcgacgagaaggacagcggcaagaccctggacaagaagcccagcaaggagatgagcagcgacagcgagtacgacagcgacgacgacagaaccaaggaggagagagcctacgacaaggccaagagaagaatcgagaagagaagactggagcacagcaagaacgtgaacaccgagaagctgagagcccccatcatctgcgtgctgggccacgtggacaccggcaagaccaagatcctggacaagctgagacacacccacgtgcaggacggcgaggccggcggcatcacccagcagatcggcgccaccaacgtgcccctggaggccatcaacgagcagaccaagatgatcaagaacttcgacagagagaacgtgagaatccccggcatgctgatcatcgacacccccggccacgagagcttcagcaacctgagaaacagaggcagcagcctgtgcgacatcgccatcctggtggtggacatcatgcacggcctggagccccagaccatcgagagcatcaacctgctgaagagcaagaagtgccccttcatcgtggccctgaacaagatcgacagactgtacgactggaagaagagccccgacagcgacgtggccgccaccctgaagaagcagaagaagaacaccaaggacgagttcgaggagagagccaaggccatcatcgtggagttcgcccagcagggcctgaacgccgccctgttctacgagaacaaggaccccagaaccttcgtgagcctggtgcccaccagcgcccacaccggcgacggcatgggcagcctgatctacctgctggtggagctgacccagaccatgctgagcaagagactggcccactgcgaggagctgagagcccaggtgatggaggtgaaggccctgcccggcatgggcaccaccatcgacgtgatcctgatcaacggcagactgaaggagggcgacaccatcatcgtgcccggcgtggagggccccatcgtgacccagatcagaggcctgctgctgcccccccccatgaaggagctgagagtgaagaaccagtacgagaagcacaaggaggtggaggccgcccagggcgtgaagatcctgggcaaggacctggagaagaccctggccggcctgcccctgctggtggcctacaaggaggacgagatccccgtgctgaaggacgagctgatccacgagctgaagcagaccctgaacgccatcaagctggaggagaagggcgtgtacgtgcaggccagcaccctgggcagcctggaggccctgctggagttcctgaagaccagcgaggtgccctacgccggcatcaacatcggccccgtgcacaagaaggacgtgatgaaggccagcgtgatgctggagcacgacccccagtacgccgtgatcctggccttcgacgtgagaatcgagagagacgcccaggagatggccgacagcctgggcgtgagaatcttcagcgccgagatcatctaccacctgttcgacgccttcaccaagtacagacaggactacaagaagcagaagcaggaggagttcaagcacatcgccgtgttcccctgcaagatcaagatcctgccccagtacatcttcaacagcagagaccccatcgtgatgggcgtgaccgtggaggccggccaggtgaagcagggcacccccatgtgcgtgcccagcaagaacttcgtggacatcggcatcgtgaccagcatcgagatcaaccacaagcaggtggacgtggccaagaagggccaggaggtgtgcgtgaagatcgagcccatccccggcgagagccccaagatgttcggcagacacttcgaggccaccgacatcctggtgagcaagatcagcagacagagcatcgacgccctgaaggactggttcagagacgagatgcagaagagcgactggcagctgatcgtggagctgaagaaggtgttcgagatcatctag

SEQ ID NO: 9633 - DNA, 138 bp, synthetic construct
  source 1..138: mol_type = other DNA; note = Synthetic coding sequence
atgagcgacaagcccgacctgagcgaggtggagaagttcgacagaagcaagctgaagaagaccaacaccgaggagaagaacaccctgcccagcaaggagaccatccagcaggagaaggagtgcgtgcagaccagctag

SEQ ID NO: 9634 - DNA, 1533 bp, synthetic construct
  source 1..1533: mol_type = other DNA; note = Synthetic coding sequence
atgcccggcggcggcgccagcgccgccagcggcagactgctgaccgccgccgagcagagaggcagcagagaggccgccggcagcgccagcagaagcggcttcggcggcagcggcggcggcagaggcggcgccagcggccccggcagcggcagcggcggccccggcggccccgccggcagaatgagcctgacccccaaggagctgagcagcctgctgagcatcatcagcgaggaggccggcggcggcagcaccttcgagggcctgagcaccgccttccaccactacttcagcaaggccgaccacttcagactgggcagcgtgctggtgatgctgctgcagcagcccgacctgctgcccagcgccgcccagagactgaccgccctgtacctgctgtgggagatgtacagaaccgagcccctggccgccaaccccttcgccgccagcttcgcccacctgctgaaccccgccccccccgccagaggcggccaggagcccgacagaccccccctgagcggcttcctgccccccatcaccccccccgagaagttcttcctgagccagctgatgctggccccccccagagagctgttcaagaagacccccagacagatcgccctgatggacgtgggcaacatgggccagagcgtggacatcagcggcctgcagctggccctggccgagagacagagcgagctgcccacccagagcaaggccagcttccccagcatcctgagcgaccccgaccccgacagcagcaacagcggcttcgacagcagcgtggccagccagatcaccgaggccctggtgagcggccccaagccccccatcgagagccacttcagacccgagttcatcagaccccccccccccctgcacatctgcgaggacgagctggcctggctgaaccccaccgagcccgaccacgccatccagtgggacaagagcatgtgcgtgaagaacagcaccggcgtggagatcaagagaatcatggccaaggccttcaagagccccctgagcagcccccagcagacccagctgctgggcgagctggagaaggaccccaagctggtgtaccacatcggcctgacccccgccaagctgcccgacctggtggagaacaaccccctggtggccatcgagatgctgctgaagctgatgcagagcagccagatcaccgagtacttcagcgtgctggtgaacatggacatgagcctgcacagcatggaggtggtgaacagactgaccaccgccgtggacctgccccccgagttcatccacctgtacatcagcaactgcatcagcacctgcgagcagatcaaggacaagtacatgcagaacagactggtgagactggtgtgcgtgttcctgcagagcctgatcagaaacaagatcatcaacgtgcaggacctgttcatcgaggtgcaggccttctgcatcgagttcagcagaatcagagaggccgccggcctgttcagactgctgaagaccctggacaccggcgagacccccagcgagaccaagatgagcaagtag

SEQ ID NO: 9635 - DNA, 2184 bp, synthetic construct
  source 1..2184: mol_type = other DNA; note = Synthetic coding sequence
atgagcggcagaaagagaagcttcaccttcggcgcctacggcggcgtggacaagagcttcaccagcagaagaagcgtgtggagaagcgacggccagaaccagcacttcccccaggccctggacctgagcagagtgaacctggtgcccagctacacccccagcctgtaccccaagaacaccgacctgttcgagatgatcgagaagatgcagggcagcagaatggacgagcagagatgcagcttccccccccccctgaagaccgaggaggactacatcccctaccccagcgtgcacgaggtgctgggcagagagggccccttccccctgatcctgctgccccagttcggcggctactggatcgagggcaccaaccacgagatcaccagcatccccgagaccgagcccctgcagagccccaccaccaaggtgaagctggagtgcaaccccaccgccagaatctacagaaagcacttcctgggcaaggagcacttcaactactacagcctggacgccgccctgggccacctggtgttcagcctgaagtacgacgtgatcggcgaccaggagcacctgagactgctgctgagaaccaagtgcagaacctaccacgacgtgatccccatcagctgcctgaccgagttccccaacgtggtgcagatggccaagctggtgtgcgaggacgtgaacgtggacagattctaccccgtgctgtaccccaaggccagcagactgatcgtgaccttcgacgagcacgtgatcagcaacaacttcaagttcggcgtgatctaccagaagctgggccagaccagcgaggaggagctgttcagcaccaacgaggagagccccgccttcgtggagttcctggagttcctgggccagaaggtgaagctgcaggacttcaagggcttcagaggcggcctggacgtgacccacggccagaccggcaccgagagcgtgtactgcaacttcagaaacaaggagatcatgttccacgtgagcaccaagctgccctacaccgagggcgacgcccagcagctgcagagaaagagacacatcggcaacgacatcgtggccgtggtgttccaggacgagaacacccccttcgtgcccgacatgatcgccagcaacttcctgcacgcctacgtggtggtgcaggccgagggcggcggccccgacggccccctgtacaaggtgagcgtgaccgccagagacgacgtgcccttcttcggcccccccctgcccgaccccgccgtgttcagaaagggccccgagttccaggagttcctgctgaccaagctgatcaacgccgagtacgcctgctacaaggccgagaagttcgccaagctggaggagagaaccagagccgccctgctggagaccctgtacgaggagctgcacatccacagccagagcatgatgggcctgggcggcgacgaggacaagatggagaacggcagcggcggcggcggcttcttcgagagcttcaagagagtgatcagaagcagaagccagagcatggacgccatgggcctgagcaacaagaagcccaacaccgtgagcaccagccacagcggcagcttcgcccccaacaaccccgacctggccaaggccgccggcatcagcctgatcgtgcccggcaagagccccaccagaaagaagagcggccccttcggcagcagaagaagcagcgccatcggcatcgagaacatccaggaggtgcaggagaagagagagagcccccccgccggccagaagacccccgacagcggccacgtgagccaggagcccaagagcgagaacagcagcacccagagcagccccgagatgcccaccaccaagaacagagccgagaccgccgcccagagagccgaggccctgaaggacttcagcagaagcagcagcagcgccagcagcttcgccagcgtggtggaggagaccgagggcgtggacggcgaggacaccggcctggagagcgtgagcagcagcggcaccccccacaagagagacagcttcatctacagcacctggctggaggacagcgtgagcaccaccagcggcggcagcagccccggccccagcagaagcccccaccccgacgccggcaagctgggcgaccccgcctgccccgagatcaagatccagctggaggccagcgagcagcacatgccccagctgggctgctag

SEQ ID NO: 9636 - DNA, 873 bp, synthetic construct
  source 1..873: mol_type = other DNA; note = Synthetic coding sequence
atggtgctgctgcacgtgaagagaggcgacgagagccagttcctgctgcaggcccccggcagcaccgagctggaggagctgaccgtgcaggtggccagagtgtacaacggcagactgaaggtgcagagactgtgcagcgagatggaggagctggccgagcacggcatcttcctgccccccaacatgcagggcctgaccgacgaccagatcgaggagctgaagctgaaggacgagtggggcgagaagtgcgtgcccagcggcggcgccgtgttcaagaaggacgacatcggcagaagaaacggccaggcccccaacgagaagatgaagcaggtgctgaagaagaccatcgaggaggccaaggccatcatcagcaagaagcaggtggaggccggcgtgtgcgtgaccatggagatggtgaaggacgccctggaccagctgagaggcgccgtgatgatcgtgtaccccatgggcctgcccccctacgaccccatcagaatggagttcgagaacaaggaggacctgagcggcacccaggccggcctgaacgtgatcaaggaggccgaggcccagctgtggtgggccgccaaggagctgagaagaaccaagaagctgagcgactacgtgggcaagaacgagaagaccaagatcatcgccaagatccagcagagaggccagggcgcccccgccagagagcccatcatcagcagcgaggagcagaagcagctgatgctgtactaccacagaagacaggaggagctgaagagactggaggagaacgacgacgacgcctacctgaacagcccctgggccgacaacaccgccctgaagagacacttccacggcgtgaaggacatcaagtggagacccagatag

SEQ ID NO: 9637 - DNA, 567 bp, synthetic construct
  source 1..567: mol_type = other DNA; note = Synthetic coding sequence
atggagccccccagaggcccccccgccaacggcgccgagcccagcagagccgtgggcaccgtgaaggtgtacctgcccaacaagcagagaaccgtggtgaccgtgagagacggcatgagcgtgtacgacagcctggacaaggccctgaaggtgagaggcctgaaccaggactgctgcgtggtgtacagactgatcaagggcagaaagaccgtgaccgcctgggacaccgccatcgcccccctggacggcgaggagctgatcgtggaggtgctggaggacgtgcccctgaccatgcacaacttcgtgagaaagaccttcttcagcctggccttctgcgacttctgcctgaagttcctgttccacggcttcagatgccagacctgcggctacaagttccaccagcactgcagcagcaaggtgcccaccgtgtgcgtggacatgagcaccaacagacagcagttctaccacagcgtgcaggacctgagcggcggcagcagacagcacgaggcccccagcaacagacccctgaacgagctgctgaccccccagggccccagctgcagatag

SEQ ID NO: 9638 - DNA, 2034 bp, synthetic construct
  source 1..2034: mol_type = other DNA; note = Synthetic coding sequence
atggacgaccccgactgcgacagcacctgggaggaggacgaggaggacgccgaggacgccgaggacgaggactgcgaggacggcgaggccgccggcgccagagacgccgacgccggcgacgaggacgaggagagcgaggagcccagagccgccagacccagcagcttccagagcagaatgaccggcagcagaaactggagagccaccagagacatgtgcagatacagacacaactaccccgacctggtggagagagactgcaacggcgacacccccaacctgagcttctacagaaacgagatcagattcctgcccaacggctgcttcatcgaggacatcctgcagaactggaccgacaactacgacctgctggaggacaaccacagctacatccagtggctgttccccctgagagagcccggcgtgaactggcacgccaagcccctgaccctgagagaggtggaggtgttcaagagcagccaggagatccaggagagactggtgagagcctacgagctgatgctgggcttctacggcatcagactggaggacagaggcaccggcaccgtgggcagagcccagaactaccagaagagattccagaacctgaactggagaagccacaacaacctgagaatcaccagaatcctgaagagcctgggcgagctgggcctggagcacttccaggcccccctggtgagattcttcctggaggagaccctggtgagaagagagctgcccggcgtgagacagagcgccctggactacttcatgttcgccgtgagatgcagacaccagagaagacagctggtgcacttcgcctgggagcacttcagacccagatgcaagttcgtgtggggcccccaggacaagctgagaagattcaagcccagcagcctgccccaccccctggagggcagcagaaaggtggaggaggagggcagccccggcgaccccgaccacgaggccagcacccagggcagaacctgcggccccgagcacagcaagggcggcggcagagtggacgagggcccccagcccagaagcgtggagccccaggacgccggccccctggagagaagccagggcgacgaggccggcggccacggcgaggacagacccgagcccctgagccccaaggagagcaagaagagaaagctggagctgagcagaagagagcagccccccaccgagcccggcccccagagcgccagcgaggtggagaagatcgccctgaacctggagggctgcgccctgagccagggcagcctgagaaccggcacccaggaggtgggcggccaggaccccggcgaggccgtgcagccctgcagacagcccctgggcgccagagtggccgacaaggtgagaaagagaagaaaggtggacgagggcgccggcgacagcgccgccgtggccagcggcggcgcccagaccctggccctggccggcagccccgcccccagcggccaccccaaggccggccacagcgagaacggcgtggaggaggacaccgagggcagaaccggccccaaggagggcacccccggcagccccagcgagacccccggccccagccccgccggccccgccggcgacgagcccgccgagagccccagcgagacccccggccccagacccgccggccccgccggcgacgagcccgccgagagccccagcgagacccccggccccagacccgccggccccgccggcgacgagcccgccgagagccccagcgagacccccggccccagccccgccggccccaccagagacgagcccgccgagagccccagcgagacccccggccccagacccgccggccccgccggcgacgagcccgccgagagccccagcgagacccccggccccagacccgccggccccgccggcgacgagcccgccgagagccccagcgagacccccggccccagccccgccggccccaccagagacgagcccgccaaggccggcgaggccgccgagctgcaggacgccgaggtggagagcagcgccaagagcggcaagccctag

SEQ ID NO: 9639 - DNA, 735 bp, synthetic construct
  source 1..735: mol_type = other DNA; note = Synthetic coding sequence
atgggcctggagctgttcctggacctggtgagccagcccagcagagccgtgtacatcttcgccaagaagaacggcatccccctggagctgagaaccgtggacctggtgaagggccagcacaagagcaaggagttcctgcagatcaacagcctgggcaagctgcccaccctgaaggacggcgacttcatcctgaccgagagcagcgccatcctgatctacctgagctgcaagtaccagacccccgaccactggtaccccagcgacctgcaggccagagccagagtgcacgagtacctgggctggcacgccgactgcatcagaggcaccttcggcatccccctgtgggtgcaggtgctgggccccctgatcggcgtgcaggtgcccgaggagaaggtggagagaaacagaaccgccatggaccaggccctgcagtggctggaggacaagttcctgggcgacagacccttcctggccggccagcaggtgaccctggccgacctgatggccctggaggagctgatgcagcccgtggccctgggctacgagctgttcgagggcagacccagactggccgcctggagaggcagagtggaggccttcctgggcgccgagctgtgccaggaggcccacagcatcatcctgagcatcctggagcaggccgccaagaagaccctgcccacccccagccccgaggcctaccaggccatgctgctgagaatcgccagaatcccctag

SEQ ID NO: 9640 - DNA, 531 bp, synthetic construct
  source 1..531: mol_type = other DNA; note = Synthetic coding sequence
atggccgccagcaccgacatggccggcctggaggagagcttcagaaagttcgccatccacggcgaccccaaggccagcggccaggagatgaacggcaagaactgggccaagctgtgcaaggactgcaaggtggccgacggcaagagcgtgaccggcaccgacgtggacatcgtgttcagcaaggtgaagggcaagagcgccagagtgatcaactacgaggagttcaagaaggccctggaggagctggccaccaagagattcaagggcaagagcaaggaggaggccttcgacgccatctgccagctggtggccggcaaggagcccgccaacgtgggcgtgaccaaggccaagaccggcggcgccgtggacagactgaccgacaccagcagatacaccggcagccacaaggagagattcgacgagagcggcaagggcaagggcatcgccggcagacaggacatcctggacgacagcggctacgtgagcgcctacaagaacgccggcacctacgacgccaaggtgaagaagtag

SEQ ID NO: 9641 - DNA, 930 bp, synthetic construct
  source 1..930: mol_type = other DNA; note = Synthetic coding sequence
atgagcgacctgggcagcgaggagctggaggaggagggcgagaacgacatcggcgagtacgagggcggcagaaacgaggccggcgagagacacggcagaggcagagccagactgcccaacggcgacacctacgagggcagctacgagttcggcaagagacacggccagggcatctacaagttcaagaacggcgccagatacatcggcgagtacgtgagaaacaagaagcacggccagggcaccttcatctaccccgacggcagcagatacgagggcgagtgggccaacgacctgagacacggccacggcgtgtactactacatcaacaacgacacctacaccggcgagtggttcgcccaccagagacacggccagggcacctacctgtacgccgagaccggcagcaagtacgtgggcacctgggtgaacggccagcaggagggcaccgccgagctgatccacctgaaccacagataccagggcaagttcctgaacaagaaccccgtgggccccggcaagtacgtgttcgacgtgggctgcgagcagcacggcgagtacagactgaccgacatggagagaggcgaggaggaggaggaggaggagctggtgaccgtggtgcccaagtggaaggccacccagatcaccgagctggccctgtggacccccaccctgcccaagaagcccaccagcaccgacggccccggccaggacgcccccggcgccgagagcgccggcgagcccggcgaggaggcccaggccctgctggagggcttcgagggcgagatggacatgagacccggcgacgaggacgccgacgtgctgagagaggagagcagagagtacgaccaggaggagttcagatacgacatggacgagggcaacatcaacagcgaggaggaggagaccagacagagcgacctgcaggactag

SEQ ID NO: 9642 - DNA, 5943 bp, synthetic construct
  source 1..5943: mol_type = other DNA; note = Synthetic coding sequence
atgaaccccaccaaccccttcagcggccagcagcccagcgccttcagcgccagcagcagcaacgtgggcaccctgcccagcaagccccccttcagattcggccagcccagcctgttcggccagaacagcaccctgagcggcaagagcagcggcttcagccaggtgagcagcttccccgccagcagcggcgtgagccacagcagcagcgtgcagaccctgggcttcacccagaccagcagcgtgggccccttcagcggcctggagcacaccagcaccttcgtggccaccagcggccccagcagcagcagcgtgctgggcaacaccggcttcagcttcaagagccccaccagcgtgggcgccttccccagcaccagcgccttcggccaggaggccggcgagatcgtgaacagcggcttcggcaagaccgagttcagcttcaagcccctggagaacgccgtgttcaagcccatcctgggcgccgagagcgagcccgagaagacccagagccagatcgccagcggcttcttcaccttcagccaccccatcagcagcgcccccggcggcctggcccccttcagcttcccccaggtgaccagcagcagcgccaccaccagcaacttcaccttcagcaagcccgtgagcagcaacaacagcctgagcgccttcacccccgccctgagcaaccagaacgtggaggaggagaagagaggccccaagagcatcttcggcagcagcaacaacagcttcagcagcttccccgtgagcagcgccgtgctgggcgagcccttccaggccagcaaggccggcgtgagacagggctgcgaggaggccgtgagccaggtggagcccctgcccagcctgatgaagggcctgaagagaaaggaggaccaggacagaagccccagaagacacggccacgagcccgccgaggacagcgaccccctgagcagaggcgaccacccccccgacaagagacccgtgagactgaacagacccagaggcggcaccctgttcggcagaaccatccaggacgtgttcaagagcaacaaggaggtgggcagactgggcaacaaggaggccaagaaggagaccggcttcgtggagagcgccgagagcgaccacatggccatccccggcggcaaccagagcgtgctggcccccagcagaatccccggcgtgaacaaggaggaggagaccgagagcagagagaagaaggaggacagcctgagaggcacccccgccagacagagcaacagaagcgagagcaccgacagcctgggcggcctgagccccagcgaggtgaccgccatccagtgcaagaacatccccgactacctgaacgacagaaccatcctggagaaccacttcggcaagatcgccaaggtgcagagaatcttcaccagaagaagcaagaagctggccgtggtgcacttcttcgaccacgccagcgccgccctggccagaaagaagggcaagagcctgcacaaggacatggccatcttctggcacagaaagaagatcagccccaacaagaagcccttcagcctgaaggagaagaagcccggcgacggcgaggtgagccccagcaccgaggacgcccccttccagcacagccccctgggcaaggccgccggcagaaccggcgccagcagcctgctgaacaagagcagccccgtgaagaagcccagcctgctgaaggcccaccagttcgagggcgacagcttcgacagcgccagcgagggcagcgagggcctgggcccctgcgtgctgagcctgagcaccctgatcggcaccgtggccgagaccagcaaggagaagtacagactgctggaccagagagacagaatcatgagacaggccagagtgaagagaaccgacctggacaaggccagaaccttcgtgggcacctgcctggacatgtgccccgagaaggagagatacatgagagagaccagaagccagctgagcgtgttcgaggtggtgcccggcaccgaccaggtggaccacgccgccgccgtgaaggagtacagcagaagcagcgccgaccaggaggagcccctgccccacgagctgagacccctgcccgtgctgagcagaaccatggactacctggtgacccagatcatggaccagaaggagggcagcctgagagactggtacgacttcgtgtggaacagaaccagaggcatcagaaaggacatcacccagcagcacctgtgcgaccccctgaccgtgagcctgatcgagaagtgcaccagattccacatccactgcgcccacttcatgtgcgaggagcccatgagcagcttcgacgccaagatcaacaacgagaacatgaccaagtgcctgcagagcctgaaggagatgtaccaggacctgagaaacaagggcgtgttctgcgccagcgaggccgagttccagggctacaacgtgctgctgagcctgaacaagggcgacatcctgagagaggtgcagcagttccaccccgccgtgagaaacagcagcgaggtgaagttcgccgtgcaggccttcgccgccctgaacagcaacaacttcgtgagattcttcaagctggtgcagagcgccagctacctgaacgcctgcctgctgcactgctacttcagccagatcagaaaggacgccctgagagccctgaacttcgcctacaccgtgagcacccagagaagcaccatcttccccctggacggcgtggtgagaatgctgctgttcagagactgcgaggaggccaccgacttcctgacctgccacggcctgaccgtgagcgacggctgcgtggagctgaacagaagcgccttcctggagcccgagggcctgagcaagaccagaaagagcgtgttcatcaccagaaagctgaccgtgagcgtgggcgagatcgtgaacggcggccccctgccccccgtgcccagacacacccccgtgtgcagcttcaacagccagaacaagtacatcggcgagagcctggccgccgagctgcccgtgagcacccagagacccggcagcgacaccgtgggcggcggcagaggcgaggagtgcggcgtggagcccgacgcccccctgagcagcctgccccagagcctgcccgcccccgcccccagccccgtgcccctgccccccgtgctggccctgacccccagcgtggcccccagcctgttccagctgagcgtgcagcccgagccccccccccccgagcccgtgcccatgtacagcgacgaggacctggcccaggtggtggacgagctgatccaggaggccctgcagagagactgcgaggaggtgggcagcgccggcgccgcctacgccgccgccgccctgggcgtgagcaacgccgccatggaggacctgctgaccgccgccaccaccggcatcctgagacacatcgccgccgaggaggtgagcaaggagagagagagaagagagcaggagagacagagagccgaggaggagagactgaagcaggagagagagctggtgctgagcgagctgagccagggcctggccgtggagctgatggagagagtgatgatggagttcgtgagagagacctgcagccaggagctgaagaacgccgtggagaccgaccagagagtgagagtggccagatgctgcgaggacgtgtgcgcccacctggtggacctgttcctggtggaggagatcttccagaccgccaaggagaccctgcaggagctgcagtgcttctgcaagtacctgcagagatggagagaggccgtgaccgccagaaagaagctgagaagacagatgagagccttccccgccgccccctgctgcgtggacgtgagcgacagactgagagccctggcccccagcgccgagtgccccatcgccgaggagaacctggccagaggcctgctggacctgggccacgccggcagactgggcatcagctgcaccagactgagaagactgagaaacaagaccgcccaccagatgaaggtgcagcacttctaccagcagctgctgagcgacgtggcctgggccagcctggacctgcccagcctggtggccgagcacctgcccggcagacaggagcacgtgttctggaagctggtgctggtgctgcccgacgtggaggagcagagccccgagagctgcggcagaatcctggccaactggctgaaggtgaagttcatgggcgacgagggcagcgtggacgacaccagcagcgacgccggcggcatccagaccctgagcctgttcaacagcctgagcagcaagggcgaccagatgatcagcgtgaacgtgtgcatcaaggtggcccacggcgccctgagcgacggcgccatcgacgccgtggagacccagaaggacctgctgggcgccagcggcctgatgctgctgctgccccccaagatgaagagcgaggacatggccgaggaggacgtgtactggctgagcgccctgctgcagctgaagcagctgctgcaggccaagcccttccagcccgccctgcccctggtggtgctggtgcccagccccggcggcgacgccgtggagaaggaggtggaggacggcctgatgctgcaggacctggtgagcgccaagctgatcagcgactacaccgtgaccgagatccccgacaccatcaacgacctgcagggcagcaccaaggtgctgcaggccgtgcagtggctggtgagccactgcccccacagcctggacctgtgctgccagaccctgatccagtacgtggaggacggcatcggccacgagttcagcggcagattcttccacgacagaagagagagaagactgggcggcctggccagccaggagcccggcgccatcatcgagctgttcaacagcgtgctgcagttcctggccagcgtggtgagcagcgagcagctgtgcgacctgagctggcccgtgaccgagttcgccgaggccggcggcagcagactgctgccccacctgcactggaacgcccccgagcacctggcctggctgaagcaggccgtgctgggcttccagctgccccagatggacctgccccccctgggcgccccctggctgcccgtgtgcagcatggtggtgcagtacgccagccagatccccagcagcagacagacccagcccgtgctgcagagccaggtggagaacctgctgcacagaacctactgcagatggaagagcaagagccccagccccgtgcacggcgccggccccagcgtgatggagatcccctgggacgacctgatcgccctgtgcatcaaccacaagctgagagactggaccccccccagactgcccgtgaccagcgaggccctgagcgaggacggccagatctgcgtgtacttcttcaagaacgacctgaagaagtacgacgtgcccctgagctgggagcaggccagactgcagacccagaaggagctgcagctgagagagggcagactggccatcaagcccttccaccccagcgccaacaacttccccatccccctgctgcacatgcacagaaactggaagagaagcaccgagtgcgcccaggagggcagaatccccagcaccgaggacctgatgagaggcgccagcgccgaggagctgctggcccagtgcctgagcagcagcctgctgctggagaaggaggagaacaagagattcgaggaccagctgcagcagtggctgagcgaggacagcggcgccttcaccgacctgaccagcctgcccctgtacctgccccagaccctggtgagcctgagccacaccatcgagcccgtgatgaagaccagcgtgaccaccagcccccagagcgacatgatgagagagcagctgcagctgagcgaggccaccggcacctgcctgggcgagagactgaagcacctggagagactgatcagaagcagcagagaggaggaggtggccagcgagctgcacctgagcgccctgctggacatggtggacatctag

SEQ ID NO: 9643 - DNA, 3147 bp, synthetic construct
  source 1..3147: mol_type = other DNA; note = Synthetic coding sequence
atgagcgacgtgaacccccccagcgacacccccatccccttcagcagcagcagcacccacagcagccacatccccccctggaccttcagctgctaccccggcagcccctgcgagaacggcgtgatgctgtacatgagaaacgtgagccacgaggagctgcagagattcaagcagctgctgctgaccgagctgagcaccggcaccatgcccatcacctgggaccaggtggagaccgccagctgggccgaggtggtgcacctgctgatcgagagattccccggcagaagagcctgggacgtgaccagcaacatcttcgccatcatgaactgcgacaagatgtgcgtggtggtgagaagagagatcaacgccatcctgcccaccctggagcccgaggacctgaacgtgggcgagacccaggtgaacctggaggagggcgagagcggcaagatcagaagatacaagagcaacgtgatggagaagttcttccccatctgggacatcaccacctggcccggcaaccagagagacttcttctaccagggcgtgcacagacacgaggagtacctgccctgcctgctgctgcccaagagaccccagggcagacagcccaagaccgtggccatccagggcgcccccggcatcggcaagaccatcctggccaagaaggtgatgttcgagtgggccagaaacaagttctacgcccacaagagatggtgcgccttctacttccactgccaggaggtgaaccagaccaccgaccagagcttcagcgagctgatcgagcagaagtggcccggcagccaggacctggtgagcaagatcatgagcaagcccgaccagctgctgctgctgctggacggcttcgaggagctgaccagcaccctgatcgacagactggaggacctgagcgaggactggagacagaagctgcccggcagcgtgctgctgagcagcctgctgagcaagaccatgctgcccgaggccaccctgctgatcatgatcagattcaccagctggcagacctgcaagcccctgctgaagtgccccagcctggtgaccctgcccggcttcaacaccatggagaagatcaagtacttccagatgtacttcggccacaccgaggagggcgaccaggtgctgagcttcgccatggagaacaccatcctgttcagcatgtgcagagtgcccgtggtgtgctggatggtgtgcagcggcctgaagcagcagatggagagaggcaacaacctgacccagagctgccccaacgccaccagcgtgttcgtgagatacatcagcagcctgttccccaccagagccgagaacttcagcagaaagatccaccaggcccagctggagggcctgtgccacctggccgccgacagcatgtggcacagaaagtgggtgctgggcaaggaggacctggaggaggccaagctggaccagaccggcgtgaccgccttcctgggcatgagcatcctgagaagaatcgccggcgaggaggaccactacgtgttcaccctggtgaccttccaggagttcttcgccgccctgttctacgtgctgtgcttcccccagagactgaagaacttccacgtgctgagccacgtgaacatccagagactgatcgccagccccagaggcagcaagagctacctgagccacatgggcctgttcctgttcggcttcctgaacgaggcctgcgccagcgccgtggagcagagcttccagtgcaaggtgagcttcggcaacaagagaaagctgctgaaggtgatccccctgctgcacaagtgcgacccccccagccccggcagcggcgtgccccagctgttctactgcctgcacgagatcagagaggaggccttcgtgagccaggccctgaacgactaccacaaggtggtgctgagaatcggcaacaacaaggaggtgcaggtgagcgccttctgcctgaagagatgccagtacctgcacgaggtggagctgaccgtgaccctgaacttcatgaacgtgtggaagctgagcagcagcagccaccccggcagcgaggcccccgagagcaacggcctgcacagatggtggcaggacctgtgcagcgtgttcgccaccaacgacaagctggaggtgctgaccatgaccaacagcgtgctgggcccccccttcctgaaggccctggccgccgccctgagacacccccagtgcaagctgcagaagctgctgctgagaagagtgaacagcaccatgctgaaccaggacctgatcggcgtgctgaccggcaaccagcacctgagatacctggagatccagcacgtggaggtggagagcaaggccgtgaagctgctgtgcagagtgctgagaagccccagatgcagactgcagtgcctgagactggaggactgcctggccacccccagaatctggaccgacctgggcaacaacctgcagggcaacggccacctgaagaccctgatcctgagaaagaacagcctggagaactgcggcgcctactacctgagcgtggcccagctggagagactgagcatcgagaactgcaacctgacccagctgacctgcgagagcctggccagctgcctgagacagagcaagatgctgacccacctgagcctggccgagaacgccctgaaggacgagggcgccaagcacatctggaacgccctgccccacctgagatgccccctgcagagactggtgctgagaaagtgcgacctgaccttcaactgctgccaggacatgatcagcgccctgtgcaagaacaagaccctgaagagcctggacctgagcttcaacagcctgaaggacgacggcgtgatcctgctgtgcgaggccctgaagaaccccgactgcaccctgcagatcctggagctggagaactgcctgttcaccagcatctgctgccaggccatggccagcatgctgagaaagaaccagcacctgagacacctggacctgagcaagaacgccatcggcgtgtacggcatcctgaccctgtgcgaggccttcagcagccagaagaagagagaggaggtgatcttctgcatccccgcctggaccagaatcaccagcttcagccccaccccccacccccccgacttcaccggcaagagcgactgcctgagccagatcaacccctag

SEQ ID NO: 9644 - DNA, 3792 bp, synthetic construct
  source 1..3792: mol_type = other DNA; note = Synthetic coding sequence
atgcccgccagaatcggctactacgagatcgacagaaccatcggcaagggcaacttcgccgtggtgaagagagccacccacctggtgaccaaggccaaggtggccatcaagatcatcgacaagacccagctggacgaggagaacctgaagaagatcttcagagaggtgcagatcatgaagatgctgtgccacccccacatcatcagactgtaccaggtgatggagaccgagagaatgatctacctggtgaccgagtacgccagcggcggcgagatcttcgaccacctggtggcccacggcagaatggccgagaaggaggccagaagaaagttcaagcagatcgtgaccgccgtgtacttctgccactgcagaaacatcgtgcacagagacctgaaggccgagaacctgctgctggacgccaacctgaacatcaagatcgccgacttcggcttcagcaacctgttcacccccggccagctgctgaagacctggtgcggcagccccccctacgccgcccccgagctgttcgagggcaaggagtacgacggccccaaggtggacatctggagcctgggcgtggtgctgtacgtgctggtgtgcggcgccctgcccttcgacggcagcaccctgcagaacctgagagccagagtgctgagcggcaagttcagaatccccttcttcatgagcaccgagtgcgagcacctgatcagacacatgctggtgctggaccccaacaagagactgagcatggagcagatctgcaagcacaagtggatgaagctgggcgacgccgaccccaacttcgacagactgatcgccgagtgccagcagctgaaggaggagagacaggtggaccccctgaacgaggacgtgctgctggccatggaggacatgggcctggacaaggagcagaccctgcagagcctgagaagcgacgcctacgaccactacagcgccatctacagcctgctgtgcgacagacacaagagacacaagaccctgagactgggcgccctgcccagcatgcccagagccctggccttccaggcccccgtgaacatccaggccgagcaggccggcaccgccatgaacatcagcgtgccccaggtgcagctgatcaaccccgagaaccagatcgtggagcccgacggcaccctgaacctggacagcgacgagggcgaggagcccagccccgaggccctggtgagatacctgagcatgagaagacacaccgtgggcgtggccgaccccagaaccgaggtgatggaggacctgcagaagctgctgcccggcttccccggcgtgaacccccaggcccccttcctgcaggtggcccccaacgtgaacttcatgcacaacctgctgcccatgcagaacctgcagcccaccggccagctggagtacaaggagcagagcctgctgcagccccccaccctgcagctgctgaacggcatgggccccctgggcagaagagccagcgacggcggcgccaacatccagctgcacgcccagcagctgctgaagagacccagaggccccagccccctggtgaccatgacccccgccgtgcccgccgtgacccccgtggacgaggagagcagcgacggcgagcccgaccaggaggccgtgcagagcagcacctacaaggacagcaacaccctgcacctgcccaccgagagattcagccccgtgagaagattcagcgacggcgccgccagcatccaggccttcaaggcccacctggagaagatgggcaacaacagcagcatcaagcagctgcagcaggagtgcgagcagctgcagaagatgtacggcggccagatcgacgagagaaccctggagaagacccagcagcagcacatgctgtaccagcaggagcagcaccaccagatcctgcagcagcagatccaggacagcatctgccccccccagcccagcccccccctgcaggccgcctgcgagaaccagcccgccctgctgacccaccagctgcagagactgagaatccagcccagcagccccccccccaaccaccccaacaaccacctgttcagacagcccagcaacagccccccccccatgagcagcgccatgatccagccccacggcgccgccagcagcagccagttccagggcctgcccagcagaagcgccatcttccagcagcagcccgagaactgcagcagcccccccaacgtggccctgacctgcctgggcatgcagcagcccgcccagagccagcaggtgaccatccaggtgcaggagcccgtggacatgctgagcaacatgcccggcaccgccgccggcagcagcggcagaggcatcagcatcagccccagcgccggccagatgcagatgcagcacagaaccaacctgatggccaccctgagctacggccacagacccctgagcaagcagctgagcgccgacagcgccgaggcccacagcctgaacgtgaacagattcagccccgccaactacgaccaggcccacctgcacccccacctgttcagcgaccagagcagaggcagccccagcagctacagccccagcaccggcgtgggcttcagccccacccaggccctgaaggtgccccccctggaccagttccccaccttcccccccagcgcccaccagcagcccccccactacaccaccagcgccctgcagcaggccctgctgagccccaccccccccgactacaccagacaccagcaggtgccccacatcctgcagggcctgctgagccccagacacagcctgaccggccacagcgacatcagactgccccccaccgagttcgcccagctgatcaagagacagcagcagcagagacagcagcagcagcagcagcagcagcagcaggagtaccaggagctgttcagacacatgaaccagggcgacgccggcagcctggcccccagcctgggcggccagagcatgaccgagagacaggccctgagctaccagaacgccgacagctaccaccaccacaccagcccccagcacctgctgcagatcagagcccaggagtgcgtgagccaggccagcagccccacccccccccacggctacgcccaccagcccgccctgatgcacagcgagagcatggaggaggactgcagctgcgagggcgccaaggacggcttccaggacagcaagagcagcagcaccctgaccaagggctgccacgacagccccctgctgctgagcaccggcggccccggcgaccccgagagcctgctgggcaccgtgagccacgcccaggagctgggcatccacccctacggccaccagcccaccgccgccttcagcaagaacaaggtgcccagcagagagcccgtgatcggcaactgcatggacagaagcagccccggccaggccgtggagctgcccgaccacaacggcctgggctaccccgccagacccagcgtgcacgagcaccacagacccagagccctgcagagacaccacaccatccagaacagcgacgacgcctacgtgcagctggacaacctgcccggcatgagcctggtggccggcaaggccctgagcagcgccagaatgagcgacgccgtgctgagccagagcagcctgatgggcagccagcagttccaggacggcgagaacgaggagtgcggcgccagcctgggcggccacgagcaccccgacctgagcgacggcagccagcacctgaacagcagctgctaccccagcacctgcatcaccgacatcctgctgagctacaagcaccccgaggtgagcttcagcatggagcaggccggcgtgtag

SEQ ID NO: 9645 - DNA, 4395 bp, synthetic construct
  source 1..4395: mol_type = other DNA; note = Synthetic coding sequence
atgtaccagcccgaggacgacaacaacagcgacgtgaccagcgacgacgacatgaccagaaacagaagagagagcagccccccccacagcgtgcacagcttcagcggcgacagagactgggacagaagaggcagaagcagagacatggagcccagagacagatggagccacaccagaaaccccagaagcagaatgccccccagagacctgagcctgcccgtggtggccaagaccagcttcgagatggacagagaggacgacagagacagcagagcctacgagagcagaagccaggacgccgagagctaccagaacgtggtggacctggccgaggacagaaagccccacaacaccatccaggacaacatggagaactacagaaagctgctgagcctgggcgtgcagctggccgaggacgacggccacagccacatgacccagggccacagcagcagaagcaagagaagcgcctaccccagcaccagcagaggcctgaagaccatgcccgaggccaagaagagcacccacagaagaggcatctgcgaggacgagagcagccacggcgtgatcatggagaagttcatcaaggacgtgagcagaagcagcaagagcggcagagccagagagagcagcgacagaagccagagattccccagaatgagcgacgacaactggaaggacatcagcctgaacaagagagagagcgtgatccagcagagagtgtacgagggcaacgccttcagaggcggcttcagattcaacagcaccctggtgagcagaaagagagtgctggagagaaagagaagataccacttcgacaccgacggcaagggcagcatccacgaccagaagggctgccccagaaagaagcccttcgagtgcggcagcgagatgagaaaggccatgagcgtgagcagcctgagcagcctgagcagccccagcttcaccgagagccagcccatcgacttcggcgccatgccctacgtgtgcgacgagtgcggcagaagcttcagcgtgatcagcgagttcgtggagcaccagatcatgcacaccagagagaacctgtacgagtacggcgagagcttcatccacagcgtggccgtgagcgaggtgcagaagagccaggtgggcggcaagagattcgagtgcaaggactgcggcgagaccttcaacaagagcgccgccctggccgagcacagaaagatccacgccagaggctacctggtggagtgcaagaaccaggagtgcgaggaggccttcatgcccagccccaccttcagcgagctgcagaagatctacggcaaggacaagttctacgagtgcagagtgtgcaaggagaccttcctgcacagcagcgccctgatcgagcaccagaagatccacttcggcgacgacaaggacaacgagagagagcacgagagagagagagagagagagagaggcgagaccttcagacccagccccgccctgaacgagttccagaagatgtacggcaaggagaagatgtacgagtgcaaggtgtgcggcgagaccttcctgcacagcagcagcctgaaggagcaccagaagatccacaccagaggcaaccccttcgagaacaagggcaaggtgtgcgaggagaccttcatccccggccagagcctgaagagaagacagaagacctacaacaaggagaagctgtgcgacttcaccgacggcagagacgccttcatgcagagcagcgagctgagcgagcaccagaagatccacagcagaaagaacctgttcgagggcagaggctacgagaagagcgtgatccacagcggccccttcaccgagagccagaagagccacaccatcaccagacccctggagagcgacgaggacgagaaggccttcaccatcagcagcaacccctacgagaaccagaagatccccaccaaggagaacgtgtacgaggccaagagctacgagagaagcgtgatccacagcctggccagcgtggaggcccagaagagccacagcgtggccggccccagcaagcccaaggtgatggccgagagcaccatccagagcttcgacgccatcaaccaccagagagtgagagccggcggcaacaccagcgagggcagagagtacagcagaagcgtgatccacagcctggtggccagcaagccccccagaagccacaacggcaacgagctggtggagagcaacgagaagggcgagagcagcatctacatcagcgacctgaacgacaagagacagaagatccccgccagagagaacccctgcgagggcggcagcaagaacagaaactacgaggacagcgtgatccagagcgtgttcagagccaagccccagaagagcgtgcccggcgagggcagcggcgagttcaagaaggacggcgagttcagcgtgcccagcagcaacgtgagagagtaccagaaggccagagccaagaagaagtacatcgagcacagaagcaacgagaccagcgtgatccacagcctgcccttcggcgagcagaccttcagacccagaggcatgctgtacgagtgccaggagtgcggcgagtgcttcgcccacagcagcgacctgaccgagcaccagaagatccacgacagagagaagcccagcggcagcagaaactacgagtggagcgtgatcagaagcctggcccccaccgacccccagaccagctacgcccaggagcagtacgccaaggagcaggccagaaacaagtgcaaggacttcagacagttcttcgccaccagcgaggacctgaacaccaaccagaagatctacgaccaggagaagagccacggcgaggagagccagggcgagaacaccgacggcgaggagacccacagcgaggagacccacggccaggagaccatcgaggaccccgtgatccagggcagcgacatggaggacccccagaaggacgaccccgacgacaagatctacgagtgcgaggactgcggcctgggcttcgtggacctgaccgacctgaccgaccaccagaaggtgcacagcagaaagtgcctggtggacagcagagagtacacccacagcgtgatccacacccacagcatcagcgagtaccagagagactacaccggcgagcagctgtacgagtgccccaagtgcggcgagagcttcatccacagcagcttcctgttcgagcaccagagaatccacgagcaggaccagctgtacagcatgaagggctgcgacgacggcttcatcgccctgctgcccatgaagcccagaagaaacagagccgccgagagaaaccccgccctggccggcagcgccatcagatgcctgctgtgcggccagggcttcatccacagcagcgccctgaacgagcacatgagactgcacagagaggacgacctgctggagcagagccagatggccgaggaggccatcatccccggcctggccctgaccgagttccagagaagccagaccgaggagagactgttcgagtgcgccgtgtgcggcgagagcttcgtgaaccccgccgagctggccgaccacgtgaccgtgcacaagaacgagccctacgagtacggcagcagctacacccacaccagcttcctgaccgagcccctgaagggcgccatccccttctacgagtgcaaggactgcggcaagagcttcatccacagcaccgtgctgaccaagcacaaggagctgcacctggaggaggaggaggaggacgaggccgccgccgccgccgccgccgccgcccaggaggtggaggccaacgtgcacgtgccccaggtggtgctgagaatccagggcctgaacgtggaggccgccgagcccgaggtggaggccgccgagcccgaggtggaggccgccgagcccgaggtggaggccgccgagcccaacggcgaggccgagggccccgacggcgaggccgccgagcccatcggcgaggccggccagcccaacggcgaggccgagcagcccaacggcgacgccgacgagcccgacggcgccggcatcgaggaccccgaggagagagccgaggagcccgagggcaaggccgaggagcccgagggcgacgccgacgagcccgacggcgtgggcatcgaggaccccgaggagggcgaggaccaggagatccaggtggaggagccctactacgactgccacgagtgcaccgagaccttcaccagcagcaccgccttcagcgagcacctgaagacccacgccagcatgatcatcttcgagcccgccaacgccttcggcgagtgcagcggctacatcgagagagccagcaccagcaccggcggcgccaaccaggccgacgagaagtacttcaagtgcgacgtgtgcggccagctgttcaacgacagactgagcctggccagacaccagaacacccacaccggctag

SEQ ID NO: 9646 - DNA, 1302 bp, synthetic construct
  source 1..1302: mol_type = other DNA; note = Synthetic coding sequence
atggccgaggcccagagcggcaccggccagctgcaggagcagaagaagggcctgctgatcgccgtgagcgtgagcgtggacaagatcatcagccacttcggcgccgccagaaacctggtgcagaaggcccagctgggcgacagcagactgagccccgacgtgggccacctggtgctgaccaccctgtgccccgccctgcacgccctggtggccgacggcctgaagcccttcagaaaggacctgatcaccggccagagaagaagcagcccctggagcgtggtggaggccagcgtgaagcccggcagcagcaccagaagcctgggcaccctgtacagccaggtgagcagactggcccccctgagcagcagcagaagcagattccacgccttcatcctgggcctgctgaacaccaagcagctggagctgtggttcagcagcctgcaggaggacgccggcctgctgagcctgctgtacctgcccaccggcttcttcagcctggccagaggcggctgccccagcctgagcaccgagctgctgctgctgctgcagcccctgagcgtgctgaccttccacctggacctgctgttcgagcaccaccaccacctgcccctgggccccccccaggcccccgccccccccggccccccccccgccctgcagcagaccatgcaggccatgctgcacttcggcggcagactggcccagagcctgagaggcaccagcaaggaggccgccagcgaccccagcgacagccccaacctgcccacccccggcagctggtgggagcagctgacccaggccagcagagtgtacgccagcggcggcaccgagggcttccccctgagcagatgggcccccggcagacacggcaccgccgccgaggagggcgcccaggagagacccctgcccaccgacgagatggcccccggcagaggcctgtggctgggcagactgttcggcgtgcccggcggccccgccgagaacgagaacggcgccctgaagagcagaagacccagcagctggctgccccccaccgtgagcgtgctggccctggtgaagagaggcgccccccccgagatgcccagcccccaggagctggaggccagcgcccccagaatggtgcagacccacagagccgtgagagccctgtgcgaccacaccgccgccagacccgaccagctgagcttcagaagaggcgaggtgctgagagtgatcaccaccgtggacgaggactggctgagatgcggcagagacggcatggagggcctggtgcccgtgggctacaccagcctggtgctgtag

SEQ ID NO: 9647 - DNA, 1584 bp, synthetic construct
  source 1..1584: mol_type = other DNA; note = Synthetic coding sequence
atggcccagaccctgcagatggagatccccaacttcggcaacagcatcctggagtgcctgaacgagcagagactgcagggcctgtactgcgacgtgagcgtggtggtgaagggccacgccttcaaggcccacagagccgtgctggccgccagcagcagctacttcagagacctgttcaacaacagcagaagcgccgtggtggagctgcccgccgccgtgcagccccagagcttccagcagatcctgagcttctgctacaccggcagactgagcatgaacgtgggcgaccagttcctgctgatgtacaccgccggcttcctgcagatccaggagatcatggagaagggcaccgagttcttcctgaaggtgagcagccccagctgcgacagccagggcctgcacgccgaggaggcccccagcagcgagccccagagccccgtggcccagaccagcggctggcccgcctgcagcacccccctgcccctggtgagcagagtgaagaccgagcagcaggagagcgacagcgtgcagtgcatgcccgtggccaagagactgtgggacagcggccagaaggaggccggcggcggcggcaacggcagcagaaagatggccaagttcagcacccccgacctggccgccaacagaccccaccagcccccccccccccagcaggcccccgtggtggccgccgcccagcccgccgtggccgccggcgccggccagcccgccggcggcgtggccgccgccggcggcgtggtgagcggccccagcaccagcgagagaaccagccccggcaccagcagcgcctacaccagcgacagccccggcagctaccacaacgaggaggacgaggaggaggacggcggcgaggagggcatggacgagcagtacagacagatctgcaacatgtacaccatgtacagcatgatgaacgtgggccagaccgccgagaaggtggaggccctgcccgagcaggtggcccccgagagcagaaacagaatcagagtgagacaggacctggccagcctgcccgccgagctgatcaaccagatcggcaacagatgccaccccaagctgtacgacgagggcgaccccagcgagaagctggagctggtgaccggcaccaacgtgtacatcaccagagcccagctgatgaactgccacgtgagcgccggcaccagacacaaggtgctgctgagaagactgctggccagcttcttcgacagaaacaccctggccaacagctgcggcaccggcatcagaagcagcaccaacgaccccagaagaaagcccctggacagcagagtgctgcacgccgtgaagtactactgccagaacttcgcccccaacttcaaggagagcgagatgaacgccatcgccgccgacatgtgcaccaacgccagaagagtggtgagaaagagctggatgcccaaggtgaaggtgctgaaggccgaggacgacgcctacaccaccttcatcagcgagaccggcaagatcgagcccgacatgatgggcgtggagcacggcttcgagaccgccagccacgagggcgaggccggccccagcgccgaggccctgcagtag

SEQ ID NO: 9648 - DNA, 672 bp, synthetic construct
  source 1..672: mol_type = other DNA; note = Synthetic coding sequence
atggaggtgcagaaggaggcccagagaatcatgaccctgagcgtgtggaagatgtaccacagcagaatgcagagaggcggcctgagactgcacagaagcctgcagctgagcctggtgatgagaagcgccagagagctgtacctgagcgccaaggtggaggccctggagcccgaggtgagcctgcccgccgccctgcccagcgaccccagactgcacccccccagagaggccgagagcaccgccgagaccgccacccccgacggcgagcaccccttccccgagcccatggacacccaggaggcccccaccgccgaggagaccagcgcctgctgcgcccccagacccgccaaggtgagcagaaagagaagaagcagcagcctgagcgacggcggcgacgccggcctggtgcccagcaagaaggccagactggaggagaaggaggaggaggagggcgccagcagcgaggtggccgacagactgcagcccccccccgcccaggccgagggcgccttccccaacctggccagagtgctgcagagaagattcagcggcctgctgaactgcagccccgccgccccccccaccgccccccccgcctgcgaggccaagcccgcctgcagacccgccgacagcatgctgaacgtgctggtgagagccgtggtggccttctag

SEQ ID NO: 9649 - DNA, 1500 bp, synthetic construct
  source 1..1500: mol_type = other DNA; note = Synthetic coding sequence
atgagagtgctggtgccccccgccgagagaagccaggacaccagagtgggcgcccccgcctggagagaggccgcccaggccatggccagaaccgcccacatcctgaccgacagatgcggccaggaggccgtgaccatgtggcagcccaaggacagcgtgctggaccccaacgtggcccaccacctgggcagagccgcctacatccagccctggagattcagagtggagatgatcaagggcggcggcaccctggagaagcccccccccggcgagggcgtgaccctgtggaagggcaagatgaagccccccgcctggtacgccagactgcccctgcccctgcacagaaaggccagagccctgcagaccaccgaggtggtgcacgcccacgccagaggcgccagactgaccgccgccagactgggcagagcccagcaccagatcaacggcagagtgagacagctgctgagacagagagaggtgaccgaccacagactgagcgaggtgagaaagggcctgctgatcaaccagcagagcgtgaagctgagaggctacagacccaagagcgagaaggtgcccgacaaggccgacagcatgctgacctgggagaaggaggagctgaagagcatgaagagaaagatggagagagacatggagaagagcgaggtgctgctgaagaccctggccagctgcagagacaccctgaacttctgcttcaaggagagactgcaggccgtggacctgatgaaccagcccctggacaaggtgctggagcaggccagaagacacagctgggtgaacctgagcagagcccccacccccagaacccagggccagaagacccccccccccgaccccgtgggcacctacaaccccgcctgcgccctggccctgaacgaggccaagagactgctggtggagagcaaggacaccctggtggagatggccaagaacgaggtggacgtgagagagcagcagctgcagatcagcgacagagtgtgcgccagcctggcccagaaggccagcgagaccctggagctgaaggagagactgaacatgaccctgggcctgatgagaggcaccatcctgagatgcaccaagtacaaccaggagctgtacaccacccacggcctgatcaagggccccctgagcaaggtgcacctggagaccgccgagaagctggacagacccctggtgagaatgtaccagagacacgtgggcacccagctgcccgaggccgccagactggcccagggcaccgacaagctgcagtgccacatcacctacctggagaagaacctggacgagctgctggccacccacaagaacctgagctggggcctgaactgcaagaacatcggccacgaggtggacggcaacgtggtgagactgagactgagacagagacagccccacgtgtgctacgagcaggcccagagactggtgaaggactgggaccccagaacccccccccccagaagcaagagcagcgccgacccctag

SEQ ID NO: 9650 - DNA, 1827 bp, synthetic construct
  source 1..1827: mol_type = other DNA; note = Synthetic coding sequence
atggagatggagagcgccgccgccagcaccagattccaccagccccacatggagagaaagatgagcgccatggcctgcgagatcttcaacgagctgagactggagggcaagctgtgcgacgtggtgatcaaggtgaacggcttcgagttcagcgcccacaagaacatcctgtgcagctgcagcagctacttcagagccctgttcaccagcggctggaacaacaccgagaagaaggtgtacaacatccccggcatcagccccgacatgatgaagctgatcatcgagtacgcctacaccagaaccgtgcccatcacccccgacaacgtggagaagctgctggccgccgccgaccagttcaacatcatgggcatcgtgagaggctgctgcgagttcctgaagagcgagctgtgcctggacaactgcatcggcatctgcaagttcaccgactactactactgccccgagctgagacagaaggcctacatgttcatcctgcacaacttcgaggagatggtgaaggtgagcgccgagttcctggagctgagcgtgaccgagctgaaggacatcatcgagaaggacgagctgaacgtgaagcaggaggacgccgtgttcgaggccatcctgaagtggatcagccacgacccccagaacagaaagcagcacatcagcatcctgctgcccaaggtgagactggccctgatgcacgccgagtacttcatgaacaacgtgaagatgaacgactacgtgaaggacagcgaggagtgcaagcccgtgatcatcaacgccctgaaggccatgtacgacctgaacatgaacggccccagcaacagcgacttcaccaaccccctgaccagacccagactgccctacgccatcctgttcgccatcggcggctggagcggcggcagccccaccaacgccatcgaggcctacgacgccagagccgacagatgggtgaacgtgacctgcgaggaggagagccccagagcctaccacggcgccgcctacctgaagggctacgtgtacatcatcggcggcttcgacagcgtggactacttcaacagcgtgaagagattcgaccccgtgaagaagacctggcaccaggtggcccccatgcacagcagaagatgctacgtgagcgtgaccgtgctgggcaacttcatctacgccatgggcggcttcgacggctacgtgagactgaacaccgccgagagatacgagcccgagaccaaccagtggaccctgatcgcccccatgcacgagcagagaagcgacgccagcgccaccaccctgtacggcaaggtgtacatctgcggcggcttcaacggcaacgagtgcctgttcaccgccgaggtgtacaacaccgagagcaaccagtggaccgtgatcgcccccatgagaagcagaagaagcggcatcggcgtgatcgcctacggcgagcacgtgtacgccgtgggcggcttcgacggcgccaacagactgagaagcgccgaggcctacagccccgtggccaacacctggagaaccatccccaccatgttcaaccccagaagcaacttcggcatcgaggtggtggacgacctgctgttcgtggtgggcggcttcaacggcttcaccaccaccttcaacgtggagtgctacgacgagaagaccgacgagtggtacgacgcccacgacatgagcatctacagaagcgccctgagctgctgcgtggtgcccggcctggccaacgtggaggagtacgccgccagaagagacaacttccccggcctggccctgagagacgaggtgaagtacagcgccagcaccagcaccctgcccgtgtag

SEQ ID NO: 9651 - DNA, 942 bp, synthetic construct
  source 1..942: mol_type = other DNA; note = Synthetic coding sequence
atggccgccctgaccgacctgagcttcatgtacagatggttcaagaactgcaacctggtgggcaacctgagcgagaagtacgtgttcatcaccggctgcgacagcggcttcggcaacctgctggccaagcagctggtggacagaggcatgcaggtgctggccgcctgcttcaccgaggagggcagccagaagctgcagagagacaccagctacagactgcagaccaccctgctggacgtgaccaagagcgagagcatcaaggccgccgcccagtgggtgagagacaaggtgggcgagcagggcctgtgggccctggtgaacaacgccggcgtgggcctgcccagcggccccaacgagtggctgaccaaggacgacttcgtgaaggtgatcaacgtgaacctggtgggcctgatcgaggtgaccctgcacatgctgcccatggtgaagagagccagaggcagagtggtgaacatgagcagcagcggcggcagagtggccgtgatcggcggcggctactgcgtgagcaagttcggcgtggaggccttcagcgacagcatcagaagagagctgtactacttcggcgtgaaggtgtgcatcatcgagcccggcaactacagaaccgccatcctgggcaaggagaacctggagagcagaatgagaaagctgtgggagagactgccccaggagaccagagacagctacggcgaggactacttcagaatctacaccgacaagctgaagaacatcatgcaggtggccgagcccagagtgagagacgtgatcaacagcatggagcacgccatcgtgagcagaagccccagaatcagatacaaccccggcctggacgccaagctgctgtacatccccctggccaagctgcccacccccgtgaccgacttcatcctgagcagatacctgcccagacccgccgacagcgtgtag

SEQ ID NO: 9652 - DNA, 1461 bp, synthetic construct
  source 1..1461: mol_type = other DNA; note = Synthetic coding sequence
atgacctgcggcagctactgcggcggcagagccttcagctgcatcagcgcctgcggccccagacccggcagatgctgcatcaccgccgccccctacagaggcatcagctgctacagaggcctgaccggcggcttcggcagccacagcgtgtgcggcggcttcagagccggcagctgcggcagaagcttcggctacagaagcggcggcgtgtgcggccccagccccccctgcatcaccaccgtgagcgtgaacgagagcctgctgacccccctgaacctggagatcgaccccaacgcccagtgcgtgaagcaggaggagaaggagcagatcaagagcctgaacagcagattcgccgccttcatcgacaaggtgagattcctggagcagcagaacaagctgctggagaccaagctgcagttctaccagaacagagagtgctgccagagcaacctggagcccctgttcgagggctacatcgagaccctgagaagagaggccgagtgcgtggaggccgacagcggcagactggccagcgagctgaaccacgtgcaggaggtgctggagggctacaagaagaagtacgaggaggaggtgagcctgagagccaccgccgagaacgagttcgtggccctgaagaaggacgtggactgcgcctacctgagaaagagcgacctggaggccaacgtggaggccctgatccaggagatcgacttcctgagaagactgtacgaggaggagatcagagtgctgcagagccacatcagcgacaccagcgtggtggtgaagctggacaacagcagagacctgaacatggactgcatcatcgccgagatcaaggcccagtacgacgacatcgtgaccagaagcagagccgaggccgagagctggtacagaagcaagtgcgaggagatgaaggccaccgtgatcagacacggcgagaccctgagaagaaccaaggaggagatcaacgagctgaacagaatgatccagagactgaccgccgaggtggagaacgccaagtgccagaacagcaagctggaggccgccgtggcccagagcgagcagcagggcgaggccgccctgagcgacgccagatgcaagctggccgagctggagggcgccctgcagaaggccaagcaggacatggcctgcctgatcagagagtaccaggaggtgatgaacagcaagctgggcctggacatcgagatcgccacctacagaagactgctggagggcgaggagcagagactgtgcgagggcgtgggcagcgtgaacgtgtgcgtgagcagcagcagaggcggcgtggtgtgcggcgacctgtgcgccagcaccaccgcccccgtggtgagcaccagagtgagcagcgtgcccagcaacagcaacgtggtggtgggcaccaccaacgcctgcgcccccagcgccagagtgggcgtgtgcggcggcagctgcaagagatgctag

SEQ ID NO: 9653 - DNA, 939 bp, synthetic construct
  source 1..939: mol_type = other DNA; note = Synthetic coding sequence
atggccgagctgaccgccctggagagcctgatcgagatgggcttccccagaggcagagccgagaaggccctggccctgaccggcaaccagggcatcgaggccgccatggactggctgatggagcacgaggacgaccccgacgtggacgagcccctggagacccccctgggccacatcctgggcagagagcccaccagcagcgagcagggcggcctggagggcagcggcagcgccgccggcgagggcaagcccgccctgagcgaggaggagagacaggagcagaccaagagaatgctggagctggtggcccagaagcagagagagagagaggagagagaggagagagaggccctggagagagagagacagagaagaagacagggccaggagctgagcgccgccagacagagactgcaggaggacgagatgagaagagccgccgaggagagaagaagagagaaggccgaggagctggccgccagacagagagtgagagagaagatcgagagagacaaggccgagagagccaagaagtacggcggcagcgtgggcagccagcccccccccgtggcccccgagcccggccccgtgcccagcagccccagccaggagccccccaccaagagagagtacgaccagtgcagaatccaggtgagactgcccgacggcaccagcctgacccagaccttcagagccagagagcagctggccgccgtgagactgtacgtggagctgcacagaggcgaggagctgggcggcggccaggaccccgtgcagctgctgagcggcttccccagaagagccttcagcgaggccgacatggagagacccctgcaggagctgggcatggccgccagactggagaccagaaccagaaactggggcagcagagaggcctgcctgggcaagggcggcatgcagagagagggcgccctgtag

SEQ ID NO: 9654 - DNA, 405 bp, synthetic construct
  source 1..405: mol_type = other DNA; note = Synthetic coding sequence
atgcccgccgacctgagcggcacctggaccctgctgagcagcgacaacttcgagggctacatgctggccctgggcatcgacttcgccaccagaaagatcgccaagctgctgaagccccagaaggtgatcgagcagaacggcgacagcttcaccatccacaccaacagcagcctgagaaactacttcgtgaagttcaaggtgggcgaggagttcgacgaggacaacagaggcctggacaacagaaagtgcaagagcctggtgatctgggacaacgacagactgacctgcatccagaagggcgagaagaagaacagaggctggacccactggatcgagggcgacaagctgcacctggagatgttctgcgagggccaggtgtgcaagcagaccttccagagagcctag

SEQ ID NO: 9655 - DNA, 1383 bp, synthetic construct
  source 1..1383: mol_type = other DNA; note = Synthetic coding sequence
atggccggctacctgagcgagagcgacttcgtgatggtggaggagggcttcagcaccagagacctgctgaaggagctgaccctgggcgccagccaggccaccaccgacgaggtggccgccttcttcgtggccgacctgggcgccatcgtgagaaagcacttctgcttcctgaagtgcctgcccagagtgagacccttctacgccgtgaagtgcaacagcagccccggcgtgctgaaggtgctggcccagctgggcctgggcttcagctgcgccaacaaggccgagatggagctggtgcagcacatcggcatccccgccagcaagatcatctgcgccaacccctgcaagcagatcgcccagatcaagtacgccgccaagcacggcatccagctgctgagcttcgacaacgagatggagctggccaaggtggtgaagagccaccccagcgccaagatggtgctgtgcatcgccaccgacgacagccacagcctgagctgcctgagcctgaagttcggcgtgagcctgaagagctgcagacacctgctggagaacgccaagaagcaccacgtggaggtggtgggcgtgagcttccacatcggcagcggctgccccgacccccaggcctacgcccagagcatcgccgacgccagactggtgttcgagatgggcaccgagctgggccacaagatgcacgtgctggacctgggcggcggcttccccggcaccgagggcgccaaggtgagattcgaggagatcgccagcgtgatcaacagcgccctggacctgtacttccccgagggctgcggcgtggacatcttcgccgagctgggcagatactacgtgaccagcgccttcaccgtggccgtgagcatcatcgccaagaaggaggtgctgctggaccagcccggcagagaggaggagaacggcagcaccagcaagaccatcgtgtaccacctggacgagggcgtgtacggcatcttcaacagcgtgctgttcgacaacatctgccccacccccatcctgcagaagaagcccagcaccgagcagcccctgtacagcagcagcctgtggggccccgccgtggacggctgcgactgcgtggccgagggcctgtggctgccccagctgcacgtgggcgactggctggtgttcgacaacatgggcgcctacaccgtgggcatgggcagccccttctggggcacccaggcctgccacatcacctacgccatgagcagagtggcctgggaggccctgagaagacagctgatggccgccgagcaggaggacgacgtggagggcgtgtgcaagcccctgagctgcggctgggagatcaccgacaccctgtgcgtgggccccgtgttcacccccgccagcatcatgtag

SEQ ID NO: 9656 - DNA, 1209 bp, synthetic construct
  source 1..1209: mol_type = other DNA; note = Synthetic coding sequence
ggcggccccagaggcagcggcagcgccgccgagaccatgcccgagatcagagtgacccccctgggcgccggccaggacgtgggcagaagctgcatcctggtgagcatcgccggcaagaacgtgatgctggactgcggcatgcacatgggcttcaacgacgacagaagattccccgacttcagctacatcacccagaacggcagactgaccgacttcctggactgcgtgatcatcagccacttccacctggaccactgcggcgccctgccctacttcagcgagatggtgggctacgacggccccatctacatgacccaccccacccaggccatctgccccatcctgctggaggactacagaaagatcgccgtggacaagaagggcgaggccaacttcttcaccagccagatgatcaaggactgcatgaacctgctggagaccttctgggagagaatgaacctgaaggtgcccatctacttcagcaccggcctgaccgagaaggccaaccactactacaagctgttcatcccctggaccaaccagaagatcagaaagaccttcgtgcagagaaacatgttcgagttcaagcacatcaaggccttcgacagagccttcgccgacaaccccggccccatggtggtgttcgccacccccggcatgctgcacgccggccagagcctgcagatcttcagaaagtgggccggcaacgagaagaacatggtgatcatgcccggctactgcgtgcagggcaccgtgggccacaagatcctgagcggccagagaaagctggagatggagggcagacaggtgctggaggtgaagatgcaggtggagtacatgagcttcagcgcccacgccgacgccaagggcatcatgcagctggtgagcagcgagcaggccctgaaggagctgggcctggccgagcaccagctgagattcacctgcagagtgcacctgcacgacaccagaaaggagcaggagaccgccctgagagtgtacagccacctgaagagcgtgctgaaggaccactgcgtgcagcacctgcccgacggcagcgtgaccgtggagagcgtgctgctgcaggccgccgcccccagcgaggaccccggcaccaaggtgctgctggtgagctggacctaccaggacgaggagctgggcagcttcctgaccagcctgctgaagaagggcctgccccaggcccccagctag

SEQ ID NO: 9657 - DNA, 1863 bp, synthetic construct
  source 1..1863: mol_type = other DNA; note = Synthetic coding sequence
atggagaaggccgtgaacgacggcagccacagcgaggagctgttctgccacctgaagaccatcagcgagaaggaggacctgcccagatgcaccagcgagagccacctgagctgcctgaagcaggacatcctgaacgagaagaccgagctggaggccaccctgaaggaggccgagctggtgacccacagcgtggagctgctgctgcccctgttcaaggacaccatcgagaagatcaacttcgagaacgccaacctgagcgccctgaacctgaagatcagcgagcagaaggagatcctgatcaaggagctggacaccttcaagagcgtgaagctggccctggagcacctgctgagaaagagagactacaagcagaccggcgacaacctgagcagcatgctgctggagaacctgaccgacaacgagagcgagaacaccaacctgaagaagaaggtgttcgagaaggaggcccacatccaggagctgagctgcctgttccagagcgagaaggccaacaccctgaaggccaacagattcagccagagcgtgaaggtggtgcacgagagactgcagatccagatccacaagagagaggccgagaacgacaagctgaaggagtacgtgaagagcctggagaccaagatcgccaagtggaacctgcagagcagaatgaacaagaacgaggccatcgtgatgaaggaggccagcagacagaagaccgtggccctgaagaaggccagcaaggtgtacaagcagagactggaccacttcaccggcgccatcgagaagctgaccagccagatcagagaccaggaggccaagctgagcgagaccatcagcgccagcaacgcctggaagagccactacgagaagatcgtgatcgagaagaccgagctggaggtgcagatcgagaccatgaagaagcagatcatcaacctgctggaggacctgaagaagatggaggaccacggcaagaacagctgcgaggagatcctgagaaaggtgcacagcatcgagtacgagaacgagaccctgaacctggagaacaccaagctgaagaccaccctggccgccctgaaggacgaggtggtgagcgtggagaacgagctgagcgagctgcaggaggtggagaagaagcagaagaccctgatcgagatgtacaagacccaggtgcagaagctgcaggaggccgccgagatcgtgaagagcagatgcgagaacctgctgcacaagaacaaccagatcaccaagaccaagaacaagaacgtggagaagatgagaggccagatggagagccacctgaaggagctggagagagtgtgcgacagcctgaccgccgccgagagaagactgcacgagtgccaggagagcctgcagtgctgcaagggcaagtgcgccgaccaggagcacaccatcagagagctgcagggccagatcctgaagcagtgggaggagtacagcgtgctggcctgggtggacggcaaccacaacctgctgaccaagctgagcctggaggaggagaactgcctgatccagctgaagtgcgagaacctgcagcagaagctggagcagatggacgccgagaacaaggagctggagaagaagctggccaaccaggaggagtgcctgaagcacagcaacctgaagttcaaggagaagagcgccgagtacaccgccctggccagacagctggaggccgccctggaggagggcagacagaaggtggccgaggagatcgagaagatgagcagcagagagagcgccctgcagatcaagatcctggacctggagaccgagctgagaaagaagaacgaggagcagaaccagctggtgtgcaagatgaacagcgaccccgagaccccctag

SEQ ID NO: 9658 - DNA, 465 bp, synthetic construct
  source 1..465: mol_type = other DNA; note = Synthetic coding sequence
atgagcaagaacaccgtgagcagcgccagattcagaaaggtggacgtggacgagtacgacgagaacaagttcgtggacgaggaggacggcggcgacggccaggccggccccgacgagggcgaggtggacagctgcctgagacacagcatcaccggcaacatgaccgccgccctgcaggccgccctgaagaacccccccatcaacaccaagagccaggccgtgaaggacagagccggcagcatcgtgctgaaggtgctgatcagcttcaaggccaacgacatcgagaaggccgtgcagagcctggacaagaacggcgtggacctgctgatgaagtacatctacaagggcttcgagagccccagcgacaacagcagcgccatgctgctgcagtggcacgagaaggccctggccgccggcggcgtgggcagcatcgtgagagtgctgaccgccagaaagaccgtgtag

SEQ ID NO: 9659 - DNA, 2946 bp, synthetic construct
  source 1..2946: mol_type = other DNA; note = Synthetic coding sequence
atgagcgagcaggagagaatccaggagtgcctgagaaaggagatcagaagcctgctgatcagcaccaaggacggcctgagcccccaggagctggagaaggagtacctgctgatggtgggcaaccacctgcccctgagaatcctgggctacagaagcaccatggagctggtgctggacatgcccgacgtggtgagagtgtgccccggcgccggcggcaccgtgatcctgaaggccatccccgacgagagcaccaagggcatcgccagcctggtggccaagcagagaagcagccacaagctgagaaacagcatgcacaagggcagacccagcatctacagcggccccagaagccacagaagagtgccctacagaggcagagtggcccccatcctgcccgccgtggtgaagagcgagctgaaggacctgctggccctgagccccgtgctgctgagcgacttcgagaaggccttcgccaagagattcggcagaagcttccagtacatgcagtacggcttcctgagcatgttcgaggtgctgaacgccgccagcgacgtgatcagcgtggagcagaccagagccggcagcctgctgatgctgaagaagagcgtgaccgaggagaagcccagaggctgccccgccggcaagatcttcacccagcccttcagaatgaagcagggcagctacagcaccggcttccccgtggccaagccctgcttcagccagcccaccagcaacatggagccccccaagcagatcatgagcatggagaagaccagcaagctgaacgtggtggagaccagcagactgaaccacaccgagaagctgaaccagctggagaacaccttcaagagcgtgatcgcccagatcggccccggcggcaccatcagcagcgagctgaagcacaagatcaagttcgtggtgagcaagttccccgagggcctgttcatcagcaagctgctgggcgagtacgaggtgatcttcaaggagcagctgagccccaagaagctgggcttcctgaacgtgaccgagctggtgggcgccctgagcgacatcctgcacgtggagttcagaaagggccaccaggacctgctggtgttcgacgccgacaagaagcccctgccccccgtgcagagcgacaagaagatcgaggccaaggcctgcgtgagcagcccccccagaaacagcctgagcaccgccgccgtgaaggagaccgtgtggaactgccccagcaagaagcagaaggagccccagcagaagatctgcaagaagcccaacctggtggtgaagcccctgcagctgcaggtggagaccaacaagagcgagctgaacctggccatggccaaccacgacatcccccccgacgccgtgcccaacaagaagctgtgcagactgccccccctggacaccagcagcctgatcggcgtgttcgtggagtacatcatcagccccagccagttctacatcagaatctacagcagagacagcagcgagctgctggaggacatgatgatcgagatgagaagatgctacagcaaccagctggtgagcgacagatacgtgatgcccgagtgcttcatccagcccggccacctgtgctgcgtgagaatcagcgaggacaagtggtggtacagagtgatcatccacagagtgctggagaagcaggaggtggaggtgttctaccccgacttcggcaacatcggcatcgtgcagaagagcagcctgagattcctgaagtgctgctacaccaagctgcccgcccaggccatcccctgcagcctggcctgggtgagacccgtggaggagcactggaccagcaaggccatcctgcagttccagaagctgtgcggcctgaagcccctggtgggcgtggtggacgagtacgtggacggcatcctgaacatcttcctgtgcgacaccagcagcaacgaggacgtgtacttccaccacgtgctgagaaccgagggccacgccatcgtgtgcagagagaacatcagcagcaagggcttcagcgagctgaaccccctggccctgtacaccaccagcagcggcggccccgaggacatcgtgctgaccgagctgggctaccccagccagcagcactacttcaacgaggacagaaagatcagcccccagagcaaggagagcgagctgagaatcctggacgagatccccaccggcatgccctgcctggagagcgtgaccatcggcgacgacatctgggacgagaactggctgcccctgcaggccaagatgggcaagggcggcgacgccgccagccacctgttcaccgccagcctgggcggcaagaaccagtacagcagctgcaaggagatgccccagaaggactggtgcttcagcacccccaaggacacctgggacgacagctggcagcccagcggcctggtgaacggcaccaaggtggaggtgcacaagcccgaggtgctgggcgcccaggagaagaacaccggcaccaacagaacccagaagcagctggacatcaacggcagcagcgacagcagcaccctgcccaagctggaggagttctgcaccagcctgacccagagcgagcagagcgccgacggcagccagagcgagcccaacaacagccagacccagcccaagcagatccagctgagcaccgccgccccctgcagcaccaccgccgtggacgacagcgccgagaagcccagcggcagcgtggagagcagccccgagatcctgaagaacgaggacttcagcagcagcagagccatcaccctgtacaaggacaagagacaggagagcgtggaccagctgagcctgatcctgagctacgagtgccagatcagccagaagctgtacatccccagaagcaccgccaccgccgccctgggcgccgccgccagactggccaccagcagaagcctgctgcactggtaccccagcgtgaagagaatggaggcctag

SEQ ID NO: 9660 - DNA, 909 bp, synthetic construct
  source 1..909: mol_type = other DNA; note = Synthetic coding sequence
atggagatccaggagctggaggagatccaggcctgccagggcctgtgggaggtgttcgtgaccctgagcgagagagccagagactacctgcacaagaccggcagattcatcgtgatcggcggcatcgtgagccccgtgcacgacagctacggcaagcagggcctggtgagcagcagacacagactgatcatgtgccagctggccgtgcagaacagcgactggatcagagtggacccctgggagtgctaccaggacacctggcagaccacctgcagcgtgctggagcaccacagagacctgatgaagagagtgaccggctgcatcctgagcaacgtgaacacccccagcatgacccccgtgatcggccagccccagaacgagaccccccagcccatctaccagaacagcaacgtggccaccaagcccaccgccgccaagatcctgggcaaggtgggcgagagcctgagcagaatctgctgcgtgagaccccccgtggagagattcaccttcgtggacgagaacgccaacctgggcaccgtgatgagatacgaggagatcgagctgagaatcctgctgctgtgcggcagcgacctgctggagagcttctgcatccccggcctgtggaacgaggccgacatggaggtgatcgtgggcgacttcggcatcgtggtggtgcccagagacgccgccgacaccgacagaatcatgaaccacagcagcatcctgagaaagtacaagaacaacatcatggtggtgaaggacgacatcaaccaccccatgagcgtggtgagcagcaccaagagcagactggccctgcagcacggcgacggccacgtggtggactacctgagccagcccgtgatcgactacatcctgaagagccagctgtacatcaacgccagcggctag

SEQ ID NO: 9661 - DNA, 861 bp, synthetic construct
  source 1..861: mol_type = other DNA; note = Synthetic coding sequence
atggagagaagactgggcgtgagagcctgggtgaaggagaacagaggcagcttccagccccccgtgtgcaacaagctgatgcaccaggagcagctgaaggtgatgttcatcggcggccccaacaccagaaaggactaccacatcgaggagggcgaggaggtgttctaccagctggagggcgacatggtgctgagagtgctggagcagggcaagcacagagacgtggtgatcagacagggcgagatcttcctgctgcccgccagagtgccccacagcccccagagattcgccaacaccgtgggcctggtggtggagagaagaagactggagaccgagctggacggcctgagatactacgtgggcgacaccatggacgtgctgttcgagaagtggttctactgcaaggacctgggcacccagctggcccccatcatccaggagttcttcagcagcgagcagtacagaaccggcaagcccatccccgaccagctgctgaaggagccccccttccccctgagcaccagaagcatcatggagcccatgagcctggacgcctggctggacagccaccacagagagctgcaggccggcacccccctgagcctgttcggcgacacctacgagacccaggtgatcgcctacggccagggcagcagcgagggcctgagacagaacgtggacgtgtggctgtggcagctggagggcagcagcgtggtgaccatgggcggcagaagactgagcctggcccccgacgacagcctgctggtgctggccggcaccagctacgcctgggagagaacccagggcagcgtggccctgagcgtgacccaggaccccgcctgcaagaagcccctgggctag

SEQ ID NO: 9662 - DNA, 1545 bp, synthetic construct
  source 1..1545: mol_type = other DNA; note = Synthetic coding sequence
atgcaggagagcggctgcagactggagcaccccagcgccaccaagttcagaaaccacgtgatggagggcgactgggacaaggccgagaacgacctgaacgagctgaagcccctggtgcacagcccccacgccatcgtggtgagaggcgccctggagatcagccagaccctgctgggcatcatcgtgagaatgaagttcctgctgctgcagcagaagtacctggagtacctggaggacggcaaggtgctggaggccctgcaggtgctgagatgcgagctgacccccctgaagtacaacaccgagagaatccacgtgctgagcggctacctgatgtgcagccacgccgaggacctgagagccaaggccgagtgggagggcaagggcaccgccagcagaagcaagctgctggacaagctgcagacctacctgccccccagcgtgatgctgccccccagaagactgcagaccctgctgagacaggccgtggagctgcagagagacagatgcctgtaccacaacaccaagctggacaacaacctggacagcgtgagcctgctgatcgaccacgtgtgcagcagaagacagttcccctgctacacccagcagatcctgaccgagcactgcaacgaggtgtggttctgcaagttcagcaacgacggcaccaagctggccaccggcagcaaggacaccaccgtgatcatctggcaggtggaccccgacacccacctgctgaagctgctgaagaccctggagggccacgcctacggcgtgagctacatcgcctggagccccgacgacaactacctggtggcctgcggccccgacgactgcagcgagctgtggctgtggaacgtgcagaccggcgagctgagaaccaagatgagccagagccacgaggacagcctgaccagcgtggcctggaaccccgacggcaagagattcgtgaccggcggccagagaggccagttctaccagtgcgacctggacggcaacctgctggacagctgggagggcgtgagagtgcagtgcctgtggtgcctgagcgacggcaagaccgtgctggccagcgacacccaccagagaatcagaggctacaacttcgaggacctgaccgacagaaacatcgtgcaggaggaccaccccatcatgagcttcaccatcagcaagaacggcagactggccctgctgaacgtggccacccagggcgtgcacctgtgggacctgcaggacagagtgctggtgagaaagtaccagggcgtgacccagggcttctacaccatccacagctgcttcggcggccacaacgaggacttcatcgccagcggcagcgaggaccacaaggtgtacatctggcacaagagaagcgagctgcccatcgccgagctgaccggccacaccagaaccgtgaactgcgtgagctggaacccccagatccccagcatgatggccagcgccagcgacgacggcaccgtgagaatctggggccccgcccccttcatcgaccaccagaacatcgaggaggagtgcagcagcatggacagctag

SEQ ID NO: 9663 - DNA, 540 bp, synthetic construct
  source 1..540: mol_type = other DNA; note = Synthetic coding sequence
atgggcatcctgttcaccagaatctggagactgttcaaccaccaggagcacaaggtgatcatcgtgggcctggacaacgccggcaagaccaccatcctgtaccagttcagcatgaacgaggtggtgcacaccagccccaccatcggcagcaacgtggaggagatcgtgatcaacaacaccagattcctgatgtgggacatcggcggccaggagagcctgagaagcagctggaacacctactacaccaacaccgagttcgtgatcgtggtggtggacagcaccgacagagagagaatcagcgtgaccagagaggagctgtacaagatgctggcccacgaggacctgagaaaggccggcctgctgatcttcgccaacaagcaggacgtgaaggagtgcatgaccgtggccgagatcagccagttcctgaagctgaccagcatcaaggaccaccagtggcacatccaggcctgctgcgccctgaccggcgagggcctgtgccagggcctggagtggatgatgagcagactgaagatcagatag

SEQ ID NO: 9664 - DNA, 1428 bp, synthetic construct
  source 1..1428: mol_type = other DNA; note = Synthetic coding sequence
atgcagaagagcaccaacagcgacaccagcgtggagaccctgaacagcaccagacagggcaccggcgccgtgcagatgagaatcaagaacgccaacagccaccacgacagactgagccagagcaagagcatgatcctgaccgacgtgggcaaggtgaccgagcccatcagcagacacagaagaaaccacagccagcacatcctgaaggacgtgatcccccccctggagcagctgatggtggagaaggagggctacctgcagaaggccaagatcgccgacggcggcaagaagctgagaaagaactggagcaccagctggatcgtgctgagcagcagaagaatcgagttctacaaggagagcaagcagcaggccctgagcaacatgaagaccggccacaagcccgagagcgtggacctgtgcggcgcccacatcgagtgggccaaggagaagagcagcagaaagaacgtgttccagatcaccaccgtgagcggcaacgagttcctgctgcagagcgacatcgacttcatcatcctggactggttccacgccatcaagaacgccatcgacagactgcccaaggacagcagctgccccagcagaaacctggagctgttcaagatccagagaagcagcagcaccgagctgctgagccactacgacagcgacatcaaggagcagaagcccgagcacagaaagagcctgatgttcagactgcaccacagcgccagcgacaccagcgacaagaacagagtgaagagcagactgaagaagttcatcaccagaagacccagcctgaagaccctgcaggagaagggcctgatcaaggaccagatcttcggcagccacctgcacaaggtgtgcgagagagagaacagcaccgtgccctggttcgtgaagcagtgcatcgaggccgtggagaagagaggcctggacgtggacggcatctacagagtgagcggcaacctggccaccatccagaagctgagattcatcgtgaaccaggaggagaagctgaacctggacgacagccagtgggaggacatccacgtggtgaccggcgccctgaagatgttcttcagagagctgcccgagcccctgttcccctacagcttcttcgagcagttcgtggaggccatcaagaagcaggacaacaacaccagaatcgaggccgtgaagagcctggtgcagaagctgcccccccccaacagagacaccatgaaggtgctgttcggccacctgaccaagatcgtggccaaggccagcaagaacctgatgagcacccagagcctgggcatcgtgttcggccccaccctgctgagagccgagaacgagaccggcaacatggccatccacatggtgtaccagaaccagatcgccgagctgatgctgagcgagtacagcaagatcttcggcagcgaggaggactag

SEQ ID NO: 9665 - DNA, 1308 bp, synthetic construct
  source 1..1308: mol_type = other DNA; note = Synthetic coding sequence
atggcccagaccgtgcccccctgcgagctgccctgcaaggagtacgacgtggccagaaacaccggcgcctacaccagcagcggcctggccaccgccagcttcagaaccagcaagtacctgctggaggagtggttccagaactgctacgccagataccaccaggccttcgccgacagagaccagagcgagagacagagacacgagagccagcagctggccaccgagacccaggccctggcccagagaacccagcaggacagcaccagaaccgtgggcgagagactgcaggacacccacagctggaagagcgagctgcagagagagatggaggccctggccgccgagaccaacctgctgctggcccagaagcagagactggagagagccctggacgccaccgaggtgcccttcagcatcaccaccgacaacctgcagtgcagagagagaagagagcaccccaacctggtgagagaccacgtggagaccgagctgctgaaggaggccgagctgatcagaaacatccaggagctgctgaagagaaccatcatgcaggccgtgagccagatcagactgaacagagagcacaaggagacctgcgagatggactggagcgacaagatggaggcctacaacatcgacgagacctgcggcagacaccacagccagagcaccgaggtgcaggcccacccctacagcaccaccttccaggagagcgccagcacccccgagaccagagccaagttcacccaggacaacctgtgcagagcccagagagagagactggccagcgccaacctgagagtgctggtggactgcatcctgagagacaccagcgaggacctgagactgcagtgcgacgccgtgaacctggccttcggcagaagatgcgaggagctggaggacgccagatacaagctgcaccaccacctgcacaagaccctgagagagatcaccgaccaggagcacaacgtggccgccctgaagcaggccatcaaggacaaggaggcccccctgcacgtggcccagaccagactgtacctgagaagccacagacccaacatggagctgtgcagagacgccgcccagttcagactgctgagcgaggtggaggagctgaacatgagcctgaccgccctgagagagaagctgctggaggccgagcagagcctgagaaacctggaggacatccacatgagcctggagaaggacatcgccgccatgaccaacagcctgttcatcgacagacagaagtgcatggcccacagaaccagataccccaccatcctgcagctggccggctaccagtag

SEQ ID NO: 9666 - DNA, 828 bp, synthetic construct
  source 1..828: mol_type = other DNA; note = Synthetic coding sequence
atgagaaagagactgagcgcccccgagctgagactgagcctgaccaagggccccggcaacgacggcgccagccccacccagagcgcccccagcagccccgacggcagcagcgacctggagatcgacgagctggagacccccagcgacagcgagcagctggacagcggccacgagttcgagtgggaggacgagctgcccagagccgagggcctgggcaccagcgagaccgccgagagactgggcagaggctgcatgtgggacgtgaccggcgaggacggccaccactggagagtgttcagaatgggccccagagagcagagagtggacatgaccgtgatcgagccctacaagaaggtgctgagccacggcggctaccacggcgacggcctgaacgccgtgatcctgttcgccagctgctacctgcccagaagcagcatccccaactacacctacgtgatggagcacctgttcagatacatggtgggcaccctggagctgctggtggccgagaactacctgctggtgcacctgagcggcggcaccagcagagcccaggtgccccccctgagctggatcagacagtgctacagaaccctggacagaagactgagaaagaacctgagagccctggtggtggtgcacgccacctggtacgtgaaggccttcctggccctgctgagacccttcatcagcagcaagttcaccagaaagatcagattcctggacagcctgggcgagctggcccagctgatcagcctggaccaggtgcacatccccgaggccgtgagacagctggacagagacctgcacggcagcggcggcacctag

SEQ ID NO: 9667 - DNA, 2391 bp, synthetic construct
  source 1..2391: mol_type = other DNA; note = Synthetic coding sequence
atggaggaggaggccagcagaagcgccgccgccaccaaccccggcagcagactgaccagatggcccccccccgacaagagagagggcagcgccgtggaccccggcaagagaagaagcctggccgccacccccagcagcagcctgccctgcaccctgatcgccctgggcctgagacacgagaaggaggccaacgagctgatggaggacctgttcgagaccttccaggacgagatgggcttcagcaacatggaggacgacggccccgaggaggaggagagagtggccgagccccaggccaacttcaacaccccccaggccctgagattcgaggagctgctggccaacctgctgaacgagcagcaccagatcgccaaggagctgttcgagcagctgaagatgaagaagcccagcgccaagcagcagaaggaggtggagaaggtgaagccccagtgcaaggaggtgcaccagaccctgatcctggaccccgcccagagaaagagactgcagcagcagatgcagcagcacgtgcagctgctgacccagatccacctgctggccacctgcaaccccaacctgaaccccgaggccagcagcaccagaatctgcctgaaggagctgggcaccttcgcccagagcagcatcgccctgcaccaccagtacaaccccaagttccagaccctgttccagccctgcaacctgatgggcgccatgcagctgatcgaggacttcagcacccacgtgagcatcgactgcagcccccacaagaccgtgaagaagaccgccaacgagttcccctgcctgcccaagcaggtggcctggatcctggccaccagcaaggtgttcatgtaccccgagctgctgcccgtgtgcagcctgaaggccaagaacccccaggacaagatcctgttcaccaaggccgaggacaacaagtacctgctgacctgcaagaccgccagacagctgaccgtgagaatcaagaacctgaacatgaacagagcccccgacaacatcatcaagttctacaagaagaccaagcagctgcccgtgctgggcaagtgctgcgaggagatccagccccaccagtggaagccccccatcgagagagaggagcacagactgcccttctggctgaaggccagcctgcccagcatccaggaggagctgagacacatggccgacggcgccagagaggtgggcaacatgaccggcaccaccgagatcaacagcgaccagggcctggagaaggacaacagcgagctgggcagcgagaccagataccccctgctgctgcccaagggcgtggtgctgaagctgaagcccgtggccgacagattccccaagaaggcctggagacagaagagaagcagcgtgctgaagcccctgctgatccagcccagccccagcctgcagcccagcttcaaccccggcaagacccccgcccagagcacccacagcgaggccccccccagcaagatggtgctgagaatcccccaccccatccagcccgccaccgtgctgcagaccgtgcccggcgtgccccccctgggcgtgagcggcggcgagagcttcgagagccccgccgccctgcccgccatgccccccgaggccagaaccagcttccccctgagcgagagccagaccctgctgagcagcgcccccgtgcccaaggtgatgatgcccagccccgccagcagcatgttcagaaagccctacgtgagaagaagacccagcaagagaagaggcgccagagccttcagatgcatcaagcccgcccccgtgatccaccccgccagcgtgatcttcaccgtgcccgccaccaccgtgaagatcgtgagcctgggcggcggctgcaacatgatccagcccgtgaacgccgccgtggcccagagcccccagaccatccccatcgccaccctgctggtgaaccccaccagcttcccctgccccctgaaccagcccctggtggccagcagcgtgagccccctgatcgtgagcggcaacagcgtgaacctgcccatccccagcacccccgaggacaaggcccacatgaacgtggacatcgcctgcgccgtggccgacggcgagaacgccttccagggcctggagcccaagctggagccccaggagctgagccccctgagcgccaccgtgttccccaaggtggagcacagccccggccccccccccgtggacaagcagtgccaggagggcctgagcgagaacagcgcctacagatggaccgtggtgaagaccgaggagggcagacaggccctggagcccctgccccagggcatccaggagagcctgaacaacagcagccccggcgacctggaggaggtggtgaagatggagcccgaggacgccaccgaggagatcagcggcttcctgtag

SEQ ID NO: 9668 - DNA, 1380 bp, synthetic construct
  source 1..1380: mol_type = other DNA; note = Synthetic coding sequence
atggccgccagcgccagcgccgccgccggcgaggaggactgggtgctgcccagcgaggtggaggtgctggagagcatctacctggacgagctgcaggtgatcaagggcaacggcagaaccagcccctgggagatctacatcaccctgcaccccgccaccgccgaggaccaggacagccagtacgtgtgcttcaccctggtgctgcaggtgcccgccgagtacccccacgaggtgccccagatcagcatcagaaaccccagaggcctgagcgacgagcagatccacaccatcctgcaggtgctgggccacgtggccaaggccggcctgggcaccgccatgctgtacgagctgatcgagaagggcaaggagatcctgaccgacaacaacatcccccacggccagtgcgtgatctgcctgtacggcttccaggagaaggaggccttcaccaagaccccctgctaccactacttccactgccactgcctggccagatacatccagcacatggagcaggagctgaaggcccagggccaggagcaggagcaggagagacagcacgccaccaccaagcagaaggccgtgggcgtgcagtgccccgtgtgcagagagcccctggtgtacgacctggccagcctgaaggccgcccccgagccccagcagcccatggagctgtaccagcccagcgccgagagcctgagacagcaggaggagagaaagagactgtaccagagacagcaggagagaggcggcatcatcgacctggaggccgagagaaacagatacttcatcagcctgcagcagccccccgcccccgccgagcccgagagcgccgtggacgtgagcaagggcagccagccccccagcaccctggccgccgagctgagcaccagccccgccgtgcagagcaccctgcccccccccctgcccgtggccacccagcacatctgcgagaagatccccggcaccagaagcaaccagcagagactgggcgagacccagaaggccatgctggacccccccaagcccagcagaggcccctggagacagcccgagagaagacaccccaagggcggcgagtgccacgcccccaagggcaccagagacacccaggagctgcccccccccgagggccccctgaaggagcccatggacctgaagcccgagccccacagccagggcgtggagggccccccccaggagaagggccccggcagctggcagggccccccccccagaagaaccagagactgcgtgagatgggagagaagcaagggcagaacccccggcagcagctaccccagactgcccagaggccagggcgcctacagacccggcaccagaagagagagcctgggcctggagagcaaggacggcagctag

SEQ ID NO: 9669 - DNA, 2079 bp, synthetic construct
  source 1..2079: mol_type = other DNA; note = Synthetic coding sequence
atgggcagcgccgccgacgtgagattcagcctgggcaccaccacccacgccccccccggcgtgcacagaagatacagcgccctgagagaggagagcgccaaggactgggagaccagccccctgcccggcatgctggcccccgccgccggccccgccttcgacagcgaccccgagatcagcgacgtggacgaggacgagcccggcggcctggtgggcagcgccgacgtggtgagccccagcggccacagcgacgcccagaccctggccatgatgctgcaggagcagctggacgccatcaacgaggagatcagaatgatccaggaggagaaggagagcaccgagctgagagccgaggagatcgagaccagagtgaccagcggcagcatggaggccctgaacctgaagcagctgagaaagagaggcagcatccccaccagcctgaccgccctgagcctggccagcgccagcccccccctgagcggcagaagcacccccaagctgaccagcagaagcgccgcccaggacctggacagaatgggcgtgatgaccctgcccagcgacctgagaaagcacagaagaaagctgctgagccccgtgagcagagaggagaacagagaggacaaggccaccatcaagtgcgagaccagcccccccagcagccccagaaccctgagactggagaagctgggccaccccgccctgagccaggaggagggcaagagcgccctggaggaccagggcagcaaccccagcagcagcaacagcagccaggacagcctgcacaagggcgccaagagaaagggcatcaagagcagcatcggcagactgttcggcaagaaggagaagggcagactgatccagctgagcagagacggcgccaccggccacgtgctgctgaccgacagcgagttcagcatgcaggagcccatggtgcccgccaagctgggcacccaggccgagaaggacagaagactgaagaagaagcaccagctgctggaggacgccagaagaaagggcatgcccttcgcccagtgggacggccccaccgtggtgagctggctggagctgtgggtgggcatgcccgcctggtacgtggccgcctgcagagccaacgtgaagagcggcgccatcatgagcgccctgagcgacaccgagatccagagagagatcggcatcagcaacgccctgcacagactgaagctgagactggccatccaggagatggtgagcctgaccagccccagcgccccccccaccagcagaaccagcagcggcaacgtgtgggtgacccacgaggagatggagaccctggagaccagcaccaagaccaccctggcctacggcgacatgaaccacgagtggatcggcaacgagtggctgcccagcctgggcctgccccagtacagaagctacttcatggagtgcctggtggacgccagaatgctggaccacctgaccaagaaggacctgagagtgcacctgaagatggtggacagcttccacagaaccagcctgcagtacggcatcatgtgcctgaagagactgaactacgacagaaaggagctggagaagagaagagaggagagccagcacgagatcaaggacgtgctggtgtggaccaacgaccaggtggtgcactgggtgcagagcatcggcctgagagactacgccggcaacctgcacgagagcggcgtgcacggcgccctgctggccctggacgagaacttcgaccacaacaccctggccctgatcctgcagatccccacccagaacacccaggccagacaggtgatggagagagagttcaacaacctgctggccctgggcaccgacagaaagctggacgacggcgacgacaaggtgttcagaagagcccccagctggagaaagagattcagacccagagagcaccacggcagaggcggcatgctgagcgccagcgccgagaccctgcccgccggcttcagagtgagcaccctgggcaccctgcagcccccccccgccccccccaagaagatcatgcccgaggcccacagccactacctgtacggccacatgctgagcgccttcagagactag

SEQ ID NO: 9670 - DNA, 369 bp, synthetic construct
  source 1..369: mol_type = other DNA; note = Synthetic coding sequence
atggccccccagaaggacagaaagcccaagagaagcacctggagattcaacctggacctgacccaccccgtggaggacggcatcttcgacagcggcaacttcgagcagttcctgagagagaaggtgaaggtgaacggcaagaccggcaacctgggcaacgtggtgcacatcgagagattcaagaacaagatcaccgtggtgagcgagaagcagttcagcaagagatacctgaagtacctgaccaagaagtacctgaagaagaacaacctgagagactggctgagagtggtggccagcgacaaggagacctacgagctgagatacttccagatcagccaggacgaggacgagagcgagagcgaggactag

SEQ ID NO: 9671 - DNA, 936 bp, synthetic construct
  source 1..936: mol_type = other DNA; note = Synthetic coding sequence
atgcagtacatcagccacatcttcggcgtgatcaactgcaacggcttcaccctgagcgaccagagaggcctgcaggccgtgggcgtgggcatcttccccaacctgggcctggtgaaccacgactgctggcccaactgcaccgtgatcttcaacaacggcaagatcgagctgagagccctgggcaagatcagcgagggcgaggagctgaccgtgagctacatcgacttcctgaacgtgagcgaggagagaaagagacagctgaagaagcagtactacttcgactgcacctgcgagcactgccagaagaagctgaaggacgacctgttcctgggcgtgaaggacaaccccaagcccagccaggaggtggtgaaggagatgatccagttcagcaaggacaccctggagaagatcgacaaggccagaagcgagggcctgtaccacgaggtggtgaagctgtgcagagagtgcctggagaagcaggagcccgtgttcgccgacaccaacatctacatgctgagaatgctgagcatcgtgagcgaggtgctgagctacctgcaggccttcgaggaggccagcttctacgccagaagaatggtggacggctacatgaagctgtaccaccccaacaacgcccagctgggcatggccgtgatgagagccggcctgaccaactggcacgccggcaacatcgaggtgggccacggcatgatctgcaaggcctacgccatcctgctggtgacccacggccccagccaccccatcaccaaggacctggaggccatgagagtgcagaccgagatggagctgagaatgttcagacagaacgagttcatgtactacaagatgagagaggccgccctgaacaaccagcccatgcaggtgatggccgagcccagcaacgagcccagccccgccctgttccacaagaagcagtag

SEQ ID NO: 9672 - DNA, 1542 bp, synthetic construct
  source 1..1542: mol_type = other DNA; note = Synthetic coding sequence
atggccgagctgcagatgctgctggaggaggagatccccggcggcagaagagccctgttcgacagctacaccaacctggagagagtggccgactactgcgagaacaactacatccagagcgccgacaagcagagagccctggaggagaccaaggcctacaccacccagagcctggccagcgtggcctacctgatcaacaccctggccaacaacgtgctgcagatgctggacatccaggccagccagctgagaagaatggagagcagcatcaaccacatcagccagaccgtggacatccacaaggagaaggtggccagaagagagatcggcatcctgaccaccaacaagaacaccagcagaacccacaagatcatcgcccccgccaacctggagagacccgtgagatacatcagaaagcccatcgactacaccatcctggacgacatcggccacggcgtgaagtggctgctgagattcaaggtgagcacccagaacatgaagatgggcggcctgcccagaaccaccccccccacccagaagccccccagcccccccatgagcggcaagggcaccctgggcagacacagcccctacagaaccctggagcccgtgagaccccccgtggtgcccaacgactacgtgcccagccccaccagaaacatggcccccagccagcagagccccgtgagaaccgccagcgtgaaccagagaaacagaacctacagcagcagcggcagcagcggcggcagccaccccagcagcagaagcagcagcagagagaacagcggcagcggcagcgtgggcgtgcccatcgccgtgcccacccccagcccccccagcgtgttccccgcccccgccggcagcgccggcaccccccccctgcccgccaccagcgccagcgcccccgcccccctggtgcccgccaccgtgcccagcagcaccgcccccgacgccgccgccggcggcgcccagaccctggccgacggcttcaccagccccaccccccccgtggtgagcagcaccccccccaccggccaccccgtgcagttctacagcatgaacagacccgccagcagacacaccccccccaccatcggcggcagcctgccctacagaagaccccccagcatcaccagccagaccagcctgcagaaccagatgaacggcggccccttctacagccagaaccccgtgagcgacaccccccccccccccccccccgtggaggagcccgtgttcgacgagagccccccccccccccccccccccgaggactacgaggaggaggaggccgccgtggtggagtacagcgacccctacgccgaggaggaccccccctgggcccccagaagctacctggagaaggtggtggccatctacgactacaccaaggacaaggaggacgagctgagcttccaggagggcgccatcatctacgtgatcaagaagaacgacgacggctggtacgagggcgtgatgaacggcgtgaccggcctgttccccggcaactacgtggagagcatcatgcactacagcgagtag

SEQ ID NO: 9673 - DNA, 1170 bp, synthetic construct
  source 1..1170: mol_type = other DNA; note = Synthetic coding sequence
atgcccctggagaacctggaggaggagggcctgcccaagaaccccgacctgagaatcgcccagctgagattcctgctgagcctgcccgagcacagaggcgacgccgccgtgagagacgagctgatggccgccgtgagagacaacaacatggccccctactacgaggccctgtgcaagagcctggactggcagatcgacgtggacctgctgaacaagatgaagaaggccaacgaggacgagctgaagagactggacgaggagctggaggacgccgagaagaacctgggcgagagcgagatcagagacgccatgatggccaaggccgagtacctgtgcagaatcggcgacaaggagggcgccctgaccgccttcagaaagacctacgacaagaccgtggccctgggccacagactggacatcgtgttctacctgctgagaatcggcctgttctacatggacaacgacctgatcaccagaaacaccgagaaggccaagagcctgatcgaggagggcggcgactgggacagaagaaacagactgaaggtgtaccagggcctgtactgcgtggccatcagagacttcaagcaggccgccgagctgttcctggacaccgtgagcaccttcaccagctacgagctgatggactacaagaccttcgtgacctacaccgtgtacgtgagcatgatcgccctggagagacccgacctgagagagaaggtgatcaagggcgccgagatcctggaggtgctgcacagcctgcccgccgtgagacagtacctgttcagcctgtacgagtgcagatacagcgtgttcttccagagcctggccgtggtggagcaggagatgaagaaggactggctgttcgccccccactacagatactacgtgagagagatgagaatccacgcctacagccagctgctggagagctacagaagcctgaccctgggctacatggccgaggccttcggcgtgggcgtggagttcatcgaccaggagctgagcagattcatcgccgccggcagactgcactgcaagatcgacaaggtgaacgagatcgtggagaccaacagacccgacagcaagaactggcagtaccaggagaccatcaagaagggcgacctgctgctgaacagagtgcagaagctgagcagagtgatcaacatgtag

SEQ ID NO: 9674 - DNA, 420 bp, synthetic construct
  source 1..420: mol_type = other DNA; note = Synthetic coding sequence
atggccaacatcgccgtgcagagaatcaagagagagttcaaggaggtgctgaagagcgaggagaccagcaagaaccagatcaaggtggacctggtggacgagaacttcaccgagctgagaggcgagatcgccggcccccccgacaccccctacgagggcggcagataccagctggagatcaagatccccgagacctaccccttcaacccccccaagtacaagcagaaccccgagatgttcaagcagaccgccagactgtgggcccacgtgtacgccggcgcccccgtgagcagccccgagtacaccaagaagatcgagaacctgtgcgccatgggcttcgacagaaacgccgtgatcgtggccctgagcagcaagagctgggacgtggagaccgccaccgagctgctgctgagcaactag

SEQ ID NO: 9675 - DNA, 1203 bp, synthetic construct
  source 1..1203: mol_type = other DNA; note = Synthetic coding sequence
atgaacttcaccgtgggcttcaagcccctgctgggcgacgcccacagcatggacaacctggagaagcagctgatctgccccatctgcctggagatgttcagcaagcccgtggtgatcctgccctgccagcacaacctgtgcagaaagtgcgccaacgacgtgttccaggccagcaaccccctgtggcagagcagaggcagcaccaccgtgagcagcggcggcagattcagatgccccagctgcagacacgaggtggtgctggacagacacggcgtgtacggcctgcagagaaacctgctggtggagaacatcatcgacatctacaagcaggagagcagcagacccctgcacagcaaggccgagcagcacctgatgtgcgaggagcacgaggaggagaagatcaacatctactgcctgagctgcgaggtgcccacctgcagcctgtgcaaggtgttcggcgcccacaaggactgcgaggtggcccccctgcccaccatctacaagagacagaagaagcaggacctgaccctgctgcccagactggagtgcagcggcaccaacaccacctactgcagcctggacctgcccagcagcagcgacccccccatcctggccagccagaacaccaagatcatcgacagcgagctgagcgacggcatcgccatgctggtggccggcaacgacagagtgcaggccgtgatcacccagatggaggaggtgtgccagaccatcgaggacaacagcagaagacagaagcagctgctgaaccagagattcgagagcctgtgcgccgtgctggaggagagaaagggcgagctgctgcaggccctggccagagagcaggaggagaagctgcagagagtgagaggcctgatcagacagtacggcgaccacctggaggccagcagcaagctggtggagagcgccatccagagcatggaggagccccagatggccctgtacctgcagcaggccaaggagctgatcaacaaggtgggcgccatgagcaaggtggagctggccggcagacccgagcccggctacgagagcatggagcagttcaccgtgagagtggagcacgtggccgagatgctgagaaccatcgacttccagcccggcgccagcggcgaggaggaggaggtggcccccgacggcgaggagggcagcgccggccccgaggaggagagacccgacggcccctag

SEQ ID NO: 9676 - DNA, 198 bp, synthetic construct
  source 1..198: mol_type = other DNA; note = Synthetic coding sequence
atgttcctgagcgccgtgttcttcgccaagagcaagagcaagaacatcctggtgagaatggtgagcgaggccggcaccggcttctgcttcaacaccaagagaaacagactgagagagaagctgaccctgctgcactacgaccccgtggtgaagcagagagtgctgttcgtggagaagaagaagatcagaagcctgtag

SEQ ID NO: 9677 - DNA, 2919 bp, synthetic construct
  source 1..2919: mol_type = other DNA; note = Synthetic coding sequence
atgagacccgagggcgccggcatggagctgggcggcggcgaggagagactgcccgaggagagcagaagagagcactggcagctgctgggcaacctgaagaccaccgtggagggcctggtgagcaccaacagccccaacgtgtggagcaagtacggcggcctggagagactgtgcagagacatgcagagcatcctgtaccacggcctgatcagagaccaggcctgcagaagacagaccgactactggcagttcgtgaaggacatcagatggctgagcccccacagcgccctgcacgtggagaagttcatcagcgtgcacgagaacgaccagagcagcgccgacggcgccagcgagagagccgtggccgagctgtggctgcagcacagcctgcagtaccactgcctgagcgcccagctgagacccctgctgggcgacagacagtacatcagaaagttctacaccgacgccgccttcctgctgagcgacgcccacgtgaccgccatgctgcagtgcctggaggccgtggagcagaacaaccccagactgctggcccagatcgacgccagcatgttcgccagaaagcacgagagccccctgctggtgaccaagagccagagcctgaccgccctgcccagcagcacctacaccccccccaacagctacgcccagcacagctacttcggcagcttcagcagcctgcaccagagcgtgcccaacaacggcagcgagagaagaagcaccagcttccccctgagcggcccccccagaaagccccaggagagcagaggccacgtgagccccgccgaggaccagaccatccaggccccccccgtgagcgtgagcgccctggccagagacagccccctgacccccaacgagatgagcagcagcaccctgaccagccccatcgaggccagctgggtgagcagccagaacgacagccccggcgacgccagcgagggccccgagtacctggccatcggcaacctggaccccagaggcagaaccgccagctgccagagccacagcagcaacgccgagagcagcagcagcaacctgttcagcagcagcagcagccagaagcccgacagcgccgccagcagcctgggcgaccaggagggcggcggcgagagccagctgagcagcgtgctgagaagaagcagcttcagcgagggccagaccctgaccgtgaccagcggcgccaagaagagccacatcagaagccacagcgacaccagcatcgccagcagaggcgcccccgagagctgcaacgacaaggccaagctgagaggccccctgccctacagcggccagagcagcgaggtgagcacccccagcagcctgtacatggagtacgagggcggcagatacctgtgcagcggcgagggcatgttcagaagacccagcgagggccagagcctgatcagctacctgagcgagcaggacttcggcagctgcgccgacctggagaaggagaacgcccacttcagcatcagcgagagcctgatcgccgccatcgagctgatgaagtgcaacatgatgagccagtgcctggaggaggaggaggtggaggaggaggacagcgacagagagatccaggagctgaagcagaagatcagactgagaagacagcagatcagaaccaagaacctgctgcccatgtaccaggaggccgagcacggcagcttcagagtgaccagcagcagcagccagttcagcagcagagacagcgcccagctgagcgacagcggcagcgccgacgaggtggacgagttcgagatccaggacgccgacatcagaagaaacaccgccagcagcagcaagagcttcgtgagcagccagagcttcagccactgcttcctgcacagcaccagcgccgaggccgtggccatgggcctgctgaagcagttcgagggcatgcagctgcccgccgccagcgagctggagtggctggtgcccgagcacgacgccccccagaagctgctgcccatccccgacagcctgcccatcagccccgacgacggccagcacgccgacatctacaagctgagaatcagagtgagaggcaacctggagtgggccccccccagaccccagatcatcttcaacgtgcaccccgcccccaccagaaagatcgccgtggccaagcagaactacagatgcgccggctgcggcatcagaaccgaccccgactacatcaagagactgagatactgcgagtacctgggcaagtacttctgccagtgctgccacgagaacgcccagatggccatccccagcagagtgctgagaaagtgggacttcagcaagtactacgtgagcaacttcagcaaggacctgctgatcaagatctggaacgaccccctgttcaacgtgcaggacatcaacagcgccctgtacagaaaggtgaagctgctgaaccaggtgagactgctgagagtgcagctgtgccacatgaagaacatgttcaagacctgcagactggccaaggagctgctggacagcttcgacaccgtgcccggccacctgaccgaggacctgcacctgtacagcctgaacgacctgaccgccaccagaaagggcgagctgggccccagactggccgagctgaccagagccggcgccacccacgtggagagatgcatgctgtgccaggccaagggcttcatctgcgagttctgccagaacgaggacgacatcatcttccccttcgagctgcacaagtgcagaacctgcgaggagtgcaaggcctgctaccacaaggcctgcttcaagagcggcagctgccccagatgcgagagactgcaggccagaagagaggccctggccagacagagcctggagagctacctgagcgactacgaggaggagcccgccgaggccctggccctggaggccgccgtgctggaggccacctag

SEQ ID NO: 9678 - DNA, 1161 bp, synthetic construct
  source 1..1161: mol_type = other DNA; note = Synthetic coding sequence
atggccgccgtggagaccagagtgtgcgagaccgacggctgcagcagcgaggccaagctgcagtgccccacctgcatcaagctgggcatccagggcagctacttctgcagccaggagtgcttcaagggcagctgggccacccacaagctgctgcacaagaaggccaaggacgagaaggccaagagagaggtgagcagctggaccgtggagggcgacatcaacaccgacccctgggccggctacagatacaccggcaagctgagaccccactaccccctgatgcccaccagacccgtgcccagctacatccagagacccgactacgccgaccaccccctgggcatgagcgagagcgagcaggccctgaagggcaccagccagatcaagctgctgagcagcgaggacatcgagggcatgagactggtgtgcagactggccagagaggtgctggacgtggccgccggcatgatcaagcccggcgtgaccaccgaggagatcgaccacgccgtgcacctggcctgcatcgccagaaactgctaccccagccccctgaactactacaacttccccaagagctgctgcaccagcgtgaacgaggtgatctgccacggcatccccgacagaagacccctgcaggagggcgacatcgtgaacgtggacatcaccctgtacagaaacggctaccacggcgacctgaacgagaccttcttcgtgggcgaggtggacgacggcgccagaaagctggtgcagaccacctacgagtgcctgatgcaggccatcgacgccgtgaagcccggcgtgagatacagagagctgggcaacatcatccagaagcacgcccaggccaacggcttcagcgtggtgagaagctactgcggccacggcatccacaagctgttccacaccgcccccaacgtgccccactacgccaagaacaaggccgtgggcgtgatgaagagcggccacgtgttcaccatcgagcccatgatctgcgagggcggctggcaggacgagacctggcccgacggctggaccgccgtgaccagagacggcaagagaagcgcccagttcgagcacaccctgctggtgaccgacaccggctgcgagatcctgaccagaagactggacagcgccagaccccacttcatgagccagttctag

SEQ ID NO: 9679 - DNA, 738 bp, synthetic construct
  source 1..738: mol_type = other DNA; note = Synthetic coding sequence
atgggcagactggacggcaaggtgatcatcctgaccgccgccgcccagggcatcggccaggccgccgccctggccttcgccagagagggcgccaaggtgatcgccaccgacatcaacgagagcaagctgcaggagctggagaagtaccccggcatccagaccagagtgctggacgtgaccaagaagaagcagatcgaccagttcgccaacgaggtggagagactggacgtgctgttcaacgtggccggcttcgtgcaccacggcaccgtgctggactgcgaggagaaggactgggacttcagcatgaacctgaacgtgagaagcatgtacctgatgatcaaggccttcctgcccaagatgctggcccagaagagcggcaacatcatcaacatgagcagcgtggccagcagcgtgaagggcgtggtgaacagatgcgtgtacagcaccaccaaggccgccgtgatcggcctgaccaagagcgtggccgccgacttcatccagcagggcatcagatgcaactgcgtgtgccccggcaccgtggacacccccagcctgcaggagagaatccaggccagaggcaaccccgaggaggccagaaacgacttcctgaagagacagaagaccggcagattcgccaccgccgaggagatcgccatgctgtgcgtgtacctggccagcgacgagagcgcctacgtgaccggcaaccccgtgatcatcgacggcggctggagcctgtag

SEQ ID NO: 9680 - DNA, 2520 bp, synthetic construct
  source 1..2520: mol_type = other DNA; note = Synthetic coding sequence
atgagcgtggtgggcatcgacctgggcttcctgaactgctacatcgccgtggccagaagcggcggcatcgagaccatcgccaacgagtacagcgacagatgcacccccgcctgcatcagcctgggcagcagaaccagagccatcggcaacgccgccaagagccagatcgtgaccaacgtgagaaacaccatccacggcttcaagaagctgcacggcagaagcttcgacgaccccatcgtgcagaccgagagaatcagactgccctacgagctgcagaagatgcccaacggcagcgccggcgtgaaggtgagatacctggaggaggagagacccttcgccatcgagcaggtgaccggcatgctgctggccaagctgaaggagaccagcgagaacgccctgaagaagcccgtggccgactgcgtgatcagcatccccagcttcttcaccgacgccgagagaagaagcgtgatggccgccgcccaggtggccggcctgaactgcctgagactgatgaacgagaccaccgccgtggccctggcctacggcatctacaagcaggacctgccccccctggacgagaagcccagaaacgtggtgttcatcgacatgggccacagcgcctaccaggtgctggtgtgcgccttcaacaagggcaagctgaaggtgctggccaccaccttcgacccctacctgggcggcagaaacttcgacgaggccctggtggactacttctgcgacgagttcaagaccaagtacaagatcaacgtgaaggagaacagcagagccctgctgagactgtaccaggagtgcgagaagctgaagaagctgatgagcgccaacgccagcgacctgcccctgaacatcgagtgcttcatgaacgacctggacgtgagcagcaagatgaacagagcccagttcgagcagctgtgcgccagcctgctggccagagtggagccccccctgaaggccgtgatggagcaggccaacctgcagagagaggacatcagcagcatcgagatcgtgggcggcgccaccagaatccccgccgtgaaggagcagatcaccaagttcttcctgaaggacatcagcaccaccctgaacgccgacgaggccgtggccagaggctgcgccctgcagtgcgccatcctgagccccgccttcaaggtgagagagttcagcatcaccgacctggtgccctacagcatcaccctgagatggaagaccagcttcgaggacggcagcggcgagtgcgaggtgttctgcaagaaccaccccgcccccttcagcaaggtgatcaccttccacaagaaggagcccttcgagctggaggccttctacaccaacctgcacgaggtgccctaccccgacgccagaatcggcagcttcaccatccagaacgtgttcccccagagcgacggcgacagcagcaaggtgaaggtgaaggtgagagtgaacatccacggcatcttcagcgtggccagcgccagcgtgatcgagaagcagaacctggagggcgaccacagcgacgcccccatggagaccgagaccagcttcaagaacgagaacaaggacaacatggacaagatgcaggtggaccaggaggagggccaccagaagtgccacgccgagcacacccccgaggaggagatcgaccacaccggcgccaagaccaagagcgccgtgagcgacaagcaggacagactgaaccagaccctgaagaagggcaaggtgaagagcatcgacctgcccatccagagcagcctgtgcagacagctgggccaggacctgctgaacagctacatcgagaacgagggcaagatgatcatgcaggacaagctggagaaggagagaaacgacgccaagaacgccgtggaggagtacgtgtacgacttcagagacagactgggcaccgtgtacgagaagttcatcacccccgaggacctgagcaagctgagcgccgtgctggaggacaccgagaactggctgtacgaggacggcgaggaccagcccaagcaggtgtacgtggacaagctgcaggagctgaagaagtacggccagcccatccagatgaagtacatggagcacgaggagagacccaaggccctgaacgacctgggcaagaagatccagctggtgatgaaggtgatcgaggcctacagaaacaaggacgagagatacgaccacctggaccccaccgagatggagaaggtggagaagtgcatcagcgacgccatgagctggctgaacagcaagatgaacgcccagaacaagctgagcctgacccaggaccccgtggtgaaggtgagcgagatcgtggccaagagcaaggagctggacaacttctgcaaccccatcatctacaagcccaagcccaaggccgaggtgcccgaggacaagcccaaggccaacagcgagcacaacggccccatggacggccagagcggcaccgagaccaagagcgacagcaccaaggacagcagccagcacaccaagagcagcggcgagatggaggtggactag

SEQ ID NO: 9681 - DNA, 1224 bp, synthetic construct
  source 1..1224: mol_type = other DNA; note = Synthetic coding sequence
atggccgccccctgcgccgaggaccccagcctggagagacacttcaagggccacagagacgccgtgacctgcgtggacttcagcatcaacaccaagcagctggccagcggcagcatggacagctgcctgatggtgtggcacatgaagccccagagcagagcctacagattcaccggccacaaggacgccgtgacctgcgtgaacttcagccccagcggccacctgctggccagcggcagcagagacaagaccgtgagaatctgggtgcccaacgtgaagggcgagagcaccgtgttcagagcccacaccgccaccgtgagaagcgtgcacttctgcagcgacggccagagcttcgtgaccgccagcgacgacaagaccgtgaaggtgtgggccacccacagacagaagttcctgttcagcctgagccagcacatcaactgggtgagatgcgccaagttcagccccgacggcagactgatcgtgagcgccagcgacgacaagaccgtgaagctgtgggacaagagcagcagagagtgcgtgcacagctactgcgagcacggcggcttcgtgacctacgtggacttccaccccagcggcacctgcatcgccgccgccggcatggacaacaccgtgaaggtgtgggacgtgagaacccacagactgctgcagcactaccagctgcacagcgccgccgtgaacggcctgagcttccaccccagcggcaactacctgatcaccgccagcagcgacagcaccctgaagatcctggacctgatggagggcagactgctgtacaccctgcacggccaccagggccccgccaccaccgtggccttcagcagaaccggcgagtacttcgccagcggcggcagcgacgagcaggtgatggtgtggaagagcaacttcgacatcgtggaccacggcgaggtgaccaaggtgcccagaccccccgccaccctggccagcagcatgggcaacctgcccgaggtggacttccccgtgccccccggcagaggcagaagcgtggagagcgtgcagagccagccccaggagcccgtgagcgtgccccagaccctgaccagcaccctggagcacatcgtgggccagctggacgtgctgacccagaccgtgagcatcctggagcagagactgaccctgaccgaggacaagctgaagcagtgcctggagaaccagcagctgatcatgcagagagccaccccctag

SEQ ID NO: 9682 - DNA, 1173 bp, synthetic construct
  source 1..1173: mol_type = other DNA; note = Synthetic coding sequence
atggccaccggcgacctgaagagaagcctgagaaacctggagcaggtgctgagactgctgaactaccccgaggaggtggactgcgtgggcctgatcaagggcgaccccgccgccagcctgcccatcatcagctacagcttcaccagctacagcccctacgtgaccgagctgatcatggagagcaacgtggagctgatcgccaagaacgacctgagattcatcgacgccgtgtacaagctgctgagagaccagttcaactacaagcccatcctgaccaagaagcagttcatccagtgcggcttcgccgagtggaagatccagatcgtgtgcgacatcctgaactgcgtgatgaagaagcacaaggagctgagcagcctgcagaagatccccagccagcagagaaagaagatcagcagcggcaagagcgagccccccctgggcaacgagaagatcagcgccgaggccgtgggcgtggacatcagcggcagattcatgaccagcggcaagaagaaggccgtggtgatcagacacctgtacaacgaggacaacgtggacatcagcgaggacaccctgagccccatcaccgacgtgaacgaggccgtggacgtgagcgacctgaacgccaccgagatcaagatgcccgaggtgaaggtgcccgagatcaaggccgagcagcaggacgtgaacgtgaaccccgagatcaccgccctgcagaccatgctggccgagtgccaggagaacctgaagaagctgaccagcatcgagaagagactggactgcctggagcagaagatgaagggcaaggtgatggtggacgagaacacctggaccaacctgctgagcagagtgaccctgctggagaccgagatgctgctgagcaagaagaacgacgagttcatcgagttcaacgaggtgagcgaggactacgccagctgcagcgacatggacctgctgaacccccacagaaagagcgaggtggagagacccgccagcatccccctgagcagcggctacagcaccgccagcagcgacagcacccccagagccagcaccgtgaactactgcggcctgaacgagatcagcgaggagaccaccatccagaagatggagagaatgaagaagatgttcgaggagaccgccgagctgctgaagtgccccaaccactacctgtag

SEQ ID NO: 9683 - DNA, 2601 bp, synthetic construct
  source 1..2601: mol_type = other DNA; note = Synthetic coding sequence
atgcccgccgtgagcctgccccccaaggagaacgccctgttcaagagaatcctgagatgctacgagcacaagcagtacagaaacggcctgaagttctgcaagcagatcctgagcaaccccaagttcgccgagcacggcgagaccctggccatgaagggcctgaccctgaactgcctgggcaagaaggaggaggcctacgagctggtgagaagaggcctgagaaacgacctgaagagccacgtgtgctggcacgtgtacggcctgctgcagagaagcgacaagaagtacgacgaggccatcaagtgctacagaaacgccctgaagtgggacaaggacaacctgcagatcctgagagacctgagcctgctgcagatccagatgagagacctggagggctacagagagaccagataccagctgctgcagctgagacccgcccagagagccagctggatcggctacgccatcgcctaccacctgctggaggactacgagatggccgccaagatcctggaggagttcagaaagacccagcagaccagccccgacaaggtggactacgagtacagcgagctgctgctgtaccagaaccaggtgctgagagaggccggcctgtacagagaggccctggagcacctgtgcacctacgagaagcagatctgcgacaagctggccgtggaggagaccaagggcgagctgctgctgcagctgtgcagactggaggacgccgccgacgtgtacagaggcctgcaggagagaaaccccgagaactgggcctactacaagggcctggagaaggccctgaagcccgccaacatgctggagagactgaagatctacgaggaggcctggaccaagtaccccagaggcctggtgcccagaagactgcccctgaacttcctgagcggcgagaagttcaaggagtgcctggacaagttcctgagaatgaacttcagcaagggctgcccccccgtgttcaacaccctgagaagcctgtacaaggacaaggagaaggtggccatcatcgaggagctggtggtgggctacgagaccagcctgaagagctgcagactgttcaaccccaacgacgacggcaaggaggagccccccaccaccctgctgtgggtgcagtactacctggcccagcactacgacaagatcggccagcccagcatcgccctggagtacatcaacaccgccatcgagagcacccccaccctgatcgagctgttcctggtgaaggccaagatctacaagcacgccggcaacatcaaggaggccgccagatggatggacgaggcccaggccctggacaccgccgacagattcatcaacagcaagtgcgccaagtacatgctgaaggccaacctgatcaaggaggccgaggagatgtgcagcaagttcaccagagagggcaccagcgccgtggagaacctgaacgagatgcagtgcatgtggttccagaccgagtgcgcccaggcctacaaggccatgaacaagttcggcgaggccctgaagaagtgccacgagatcgagagacacttcatcgagatcaccgacgaccagttcgacttccacacctactgcatgagaaagatcaccctgagaagctacgtggacctgctgaagctggaggacgtgctgagacagcaccccttctacttcaaggccgccagaatcgccatcgagatctacctgaagctgcacgacaaccccctgaccgacgagaacaaggagcacgaggccgacaccgccaacatgagcgacaaggagctgaagaagctgagaaacaagcagagaagagcccagaagaaggcccagatcgaggaggagaagaagaacgccgagaaggagaagcagcagagaaaccagaagaagaagaaggacgacgacgacgaggagatcggcggccccaaggaggagctgatccccgagaagctggccaaggtggagacccccctggaggaggccatcaagttcctgacccccctgaagaacctggtgaagaacaagatcgagacccacctgttcgccttcgagatctacttcagaaaggagaagttcctgctgatgctgcagagcgtgaagagagccttcgccatcgacagcagccacccctggctgcacgagtgcatgatcagactgttcaacaccgccgtgtgcgagagcaaggacctgagcgacaccgtgagaaccgtgctgaagcaggagatgaacagactgttcggcgccaccaaccccaagaacttcaacgagaccttcctgaagagaaacagcgacagcctgccccacagactgagcgccgccaagatggtgtactacctggaccccagcagccagaagagagccatcgagctggccaccaccctggacgagagcctgaccaacagaaacctgcagacctgcatggaggtgctggaggccctgtacgacggcagcctgggcgactgcaaggaggccgccgagatctacagagccaactgccacaagctgttcccctacgccctggccttcatgccccccggctacgaggaggacatgaagatcaccgtgaacggcgacagcagcgccgaggccgaggagctggccaacgagatctag

SEQ ID NO: 9684 - DNA, 1293 bp, synthetic construct
  source 1..1293: mol_type = other DNA; note = Synthetic coding sequence
atggccagcagcgccaagagcgccgagatgcccaccatcagcaagaccgtgaaccccacccccgacccccaccaggagtacctggaccccagaatcaccatcgccctgttcgagatcggcagccacagccccagcagctggggcagcctgcccttcctgaagaacagcagccaccaggtgaccgagcagcagaccgcccagaagttcaacaacctgctgaaggagatcaaggacatcctgaagaacatggccggcttcgaggagaagatcaccgaggccaaggagctgttcgaggagaccaacatcaccgaggacgtgagcgcccacaaggagaacatcagaggcctggacaagatcaacgagatgctgagcaccaacctgcccgtgagcctggcccccgagaaggaggacaacgagaagaagcaggagatgatcctggagaccaacatcaccgaggacgtgagcgcccacaaggagaacatcagaggcctggacaagatcaacgagatgctgagcaccaacctgcccgtgagcctggcccccgagaaggaggacaacgagaagaagcagcagatgatcatggagaaccagaacagcgagaacaccgcccaggtgttcgccagagacctggtgaacagactggaggagaagaaggtgctgaacgagacccagcagagccaggagaaggccaagaacagactgaacgtgcaggaggagaccatgaagatcagaaacaacatggagcagctgctgcaggaggccgagcactggagcaagcagcacaccgagctgagcaagctgatcaagagctaccagaagagccagaaggacatcagcgagaccctgggcaacaacggcgtgggcttccagacccagcccaacaacgaggtgagcgccaagcacgagctggaggagcaggtgaagaagctgagccacgacacctacagcctgcagctgatggccgccctgctggagaacgagtgccagatcctgcagcagagagtggagatcctgaaggagctgcaccaccagaagcagggcaccctgcaggagaagcccatccagatcaactacaagcaggacaagaagaaccagaagcccagcgaggccaagaaggtggagatgtacaagcagaacaagcaggccatgaagggcaccttctggaagaaggacagaagctgcagaagcctggacgtgtgcctgaacaagaaggcctgcaacacccagttcaacatccacgtggccagaaaggccctgagaggcaagatgagaagcgccagcagcctgagatag

SEQ ID NO: 9685 - DNA, 5199 bp, synthetic construct
  source 1..5199: mol_type = other DNA; note = Synthetic coding sequence
atggccgccatcggcagaggcagaagcctgaagaacctgagagtgagaggcagaaacgacagcggcgaggagaacgtgcccctggacctgaccagagagcccagcgacaacctgagagagatcctgcagaacgtggccagactgcagggcgtgagcaacatgagaaagctgggccacctgaacaacttcaccaagctgctgtgcgacatcggccacagcgaggagaagctgggcttccactacgaggacatcatcatctgcctgagactggccctgctgaacgaggccaaggaggtgagagccgccggcctgagagccctgagatacctgatccaggacagcagcatcctgcagaaggtgctgaagctgaaggtggactacctgatcgccagatgcatcgacatccagcagagcaacgaggtggagagaacccaggccctgagactggtgagaaagatgatcaccgtgaacgccagcctgttccccagcagcgtgaccaacagcctgatcgccgtgggcaacgacggcctgcaggagagagacagaatggtgagagcctgcatcgccatcatctgcgagctggccctgcagaaccccgaggtggtggccctgagaggcggcctgaacaccatcctgaagaacgtgatcgactgccagctgagcagaatcaacgaggccctgatcaccaccatcctgcacctgctgaaccaccccaagaccagacagtacgtgagagccgacgtggagctggagagaatcctggccccctacaccgacttccactacagacacagccccgacaccgccgagggccagctgaaggaggacagagaggccagattcctggccagcaagatgggcatcatcgccaccttcagaagctgggccggcatcatcaacctgtgcaagcccggcaacagcggcatccagagcctgatcggcgtgctgtgcatccccaacatggagatcagaagaggcctgctggaggtgctgtacgacatcttcagactgcccctgcccgtggtgaccgaggagttcatcgaggccctgctgagcgtggaccccggcagattccaggacagctggagactgagcgacggcttcgtggccgccgaggccaagaccatcctgccccacagagccagaagcagacccgacctgatggacaactacctggccctgatcctgagcgccttcatcagaaacggcctgctggagggcctggtggaggtgatcaccaacagcgacgaccacatcagcgtgagagccaccatcctgctgggcgagctgctgcacatggccaacaccatcctgccccacagccacagccaccacctgcactgcctgcccaccctgatgaacatggccgccagcttcgacatccccaaggagaagagactgagagccagcgccgccctgaactgcctgaagagattccacgagatgaagaagagaggccccaagccctacagcctgcacctggaccacatcatccagaaggccatcgccacccaccagaagagagaccagtacctgagagtgcagaaggacatcttcatcctgaaggacaccgaggaggccctgctgatcaacctgagagacagccaggtgctgcagcacaaggagaacctggagtggaactggaacctgatcggcaccatcctgaagtggcccaacgtgaacctgagaaactacaaggacgagcagctgcacagattcgtgagaagactgctgtacttctacaagcccagcagcaagctgtacgccaacctggacctggacttcgccaaggccaagcagctgaccgtggtgggctgccagttcaccgagttcctgctggagagcgaggaggacggccagggctacctggaggacctggtgaaggacatcgtgcagtggctgaacgccagcagcggcatgaagcccgagagaagcctgcagaacaacggcctgctgaccaccctgagccagcactacttcctgttcatcggcaccctgagctgccacccccacggcgtgaagatgctggagaagtgcagcgtgttccagtgcctgctgaacctgtgcagcctgaagaaccaggaccacctgctgaagctgaccgtgagcagcctggactacagcagagacggcctggccagagtgatcctgagcaagatcctgaccgccgccaccgacgcctgcagactgtacgccaccaagcacctgagagtgctgctgagagccaacgtggagttcttcaacaactggggcatcgagctgctggtgacccagctgcacgacaagaacaagaccatcagcagcgaggccctggacatcctggacgaggcctgcgaggacaaggccaacctgcacgccctgatccagatgaagcccgccctgagccacctgggcgacaagggcctgctgctgctgctgagattcctgagcatccccaagggcttcagctacctgaacgagagaggctacgtggccaagcagctggagaagtggcacagagagtacaacagcaagtacgtggacctgatcgaggagcagctgaacgaggccctgaccacctacagaaagcccgtggacggcgacaactacgtgagaagaagcaaccagagactgcagagaccccacgtgtacctgcccatccacctgtacggccagctggtgcaccacaagaccggctgccacctgctggaggtgcagaacatcatcaccgagctgtgcagaaacgtgagaacccccgacctggacaagtgggaggagatcaagaagctgaaggccagcctgtgggccctgggcaacatcggcagcagcaactggggcctgaacctgctgcaggaggagaacgtgatccccgacatcctgaagctggccaagcagtgcgaggtgctgagcatcagaggcacctgcgtgtacgtgctgggcctgatcgccaagaccaagcagggctgcgacatcctgaagtgccacaactgggacgccgtgagacacagcagaaagcacctgtggcccgtggtgcccgacgacgtggagcagctgtgcaacgagctgagcagcatccccagcaccctgagcctgaacagcgagagcaccagcagcagacacaacagcgagagcgagagcgtgcccagcagcatgttcatcctggaggacgacagattcggcagcagcagcaccagcaccttcttcctggacatcaacgaggacaccgagcccaccttctacgacagaagcggccccatcaaggacaagaacagcttccccttcttcgccagcagcaagctggtgaagaacagaatcctgaacagcctgaccctgcccaacaagaagcacagaagcagcagcgaccccaagggcggcaagctgagcagcgagagcaagaccagcaacagaagaatcagaaccctgaccgagcccagcgtggacttcaaccacagcgacgacttcacccccatcagcaccgtgcagaagaccctgcagctggagaccagcttcatgggcaacaagcacatcgaggacaccggcagcacccccagcatcggcgagaacgacctgaagttcaccaagaacttcggcaccgagaaccacagagagaacaccagcagagagagactggtggtggagagcagcaccagcagccacatgaagatcagaagccagagcttcaacaccgacaccaccaccagcggcatcagcagcatgagcagcagccccagcagagagaccgtgggcgtggacgccaccaccatggacaccgactgcggcagcatgagcaccgtggtgagcaccaagaccatcaagaccagccactacctgaccccccagagcaaccacctgagcctgagcaagagcaacagcgtgagcctggtgccccccggcagcagccacaccctgcccagaagagcccagagcctgaaggcccccagcatcgccaccatcaagagcctggccgactgcaacttcagctacaccagcagcagagacgccttcggctacgccaccctgaagagactgcagcagcagagaatgcaccccagcctgagccacagcgaggccctggccagccccgccaaggacgtgctgttcaccgacaccatcaccatgaaggccaacagcttcgagagcagactgacccccagcagaatcgacttcaagaagaagcacgtgggcggcatcagaagcctgagacccaccatcaccaacaacctgttcagattcatgaaggccctgagctacgccagcctggacaaggaggacctgctgagccccatcaaccagaacaccctgcagagaagcagcagcgtgagaagcatggtgagcagcgccacctacggcggcagcgacgactacatcggcctggccctgcccgtggacatcaacgacatcttccaggtgaaggacatcccctacttccagaccaagaacatccccccccacgacgacagaggcgccagagccttcgcccacgacgccggcggcctgcccagcggcaccggcggcctggtgaagaacagcttccacctgctgagacagcagatgagcctgaccgagatcatgaacagcatccacagcgacgccagcctgttcctggagagcaccgaggacaccggcctgcaggagcacaccgacgacaactgcctgtactgcgtgtgcatcgagatcctgggcttccagcccagcaaccagctgagcgccatctgcagccacagcgacttccaggacatcccctacagcgactggtgcgagcagaccatccacaaccccctggaggtggtgcccagcaagttcagcggcatcagcggctgcagcgacggcgtgagccaggagggcagcgccagcagcaccaagagcaccgagctgctgctgggcgtgaagaccatccccgacgacacccccatgtgcagaatcctgctgagaaaggaggtgctgagactggtgatcaacctgagcagcagcgtgagcaccaagtgccacgagaccggcctgctgaccatcaaggagaagtacccccagaccttcgacgacatctgcctgtacagcgaggtgagccacctgctgagccactgcaccttcagactgccctgcagaagattcatccaggagctgttccaggacgtgcagttcctgcagatgcacgaggaggccgaggccgtgctggccaccccccccaagcagcccatcgtggacaccagcgccgagagctag

SEQ ID NO: 9686 - DNA, 1761 bp, synthetic construct
  source 1..1761: mol_type = other DNA; note = Synthetic coding sequence
atgagcgccaccgtggtggacgccgtgaacgccgcccccctgagcggcagcaaggagatgagcctggaggagcccaagaagatgaccagagaggactggagaaagaagaaggagctggaggagcagagaaagctgggcaacgcccccgccgaggtggacgaggagggcaaggacatcaacccccacatcccccagtacatcagcagcgtgccctggtacatcgaccccagcaagagacccaccctgaagcaccagagaccccagcccgagaagcagaagcagttcagcagcagcggcgagtggtacaagagaggcgtgaaggagaacagcatcatcaccaagtacagaaagggcgcctgcgagaactgcggcgccatgacccacaagaagaaggactgcttcgagagacccagaagagtgggcgccaagttcaccggcaccaacatcgcccccgacgagcacgtgcagccccagctgatgttcgactacgacggcaagagagacagatggaacggctacaaccccgaggagcacatgaagatcgtggaggagtacgccaaggtggacctggccaagagaaccctgaaggcccagaagctgcaggaggagctggccagcggcaagctggtggagcaggccaacagccccaagcaccagtggggcgaggaggagcccaacagccagatggagaaggaccacaacagcgaggacgaggacgaggacaagtacgccgacgacatcgacatgcccggccagaacttcgacagcaagagaagaatcaccgtgagaaacctgagaatcagagaggacatcgccaagtacctgagaaacctggaccccaacagcgcctactacgaccccaagaccagagccatgagagagaacccctacgccaacgccggcaagaaccccgacgaggtgagctacgccggcgacaacttcgtgagatacaccggcgacaccatcagcatggcccagacccagctgttcgcctgggaggcctacgacaagggcagcgaggtgcacctgcaggccgaccccaccaagctggagctgctgtacaagagcttcaaggtgaagaaggaggacttcaaggagcagcagaaggagagcatcctggagaagtacggcggccaggagcacctggacgccccccccgccgagctgctgctggcccagaccgaggactacgtggagtacagcagacacggcaccgtgatcaagggccaggagagagccgtggcctgcagcaagtacgaggaggacgtgaagatccacaaccacacccacatctggggcagctactggaaggagggcagatggggctacaagtgctgccacagcttcttcaagtacagctactgcaccggcgaggccggcaaggagatcgtgaacagcgaggagtgcatcatcaacgagatcaccggcgaggagagcgtgaagaagccccagaccctgatggagctgcaccaggagaagctgaaggaggagaagaagaagaagaagaagaagaagaagaagcacagaaagagcagcagcgacagcgacgacgaggagaagaagcacgagaagctgaagaaggccctgaacgccgaggaggccagactgctgcacgtgaaggagaccatgcagatcgacgagagaaagagaccctacaacagcatgtacgagaccagagagcccaccgaggaggagatggaggcctacagaatgaagagacagagacccgacgaccccatggccagcttcctgggccagtag

SEQ ID NO: 9687 - DNA, 1185 bp, synthetic construct
  source 1..1185: mol_type = other DNA; note = Synthetic coding sequence
atggccctggaggtgggcgacatggaggacggccagctgagcgacagcgacagcgacatgaccgtggcccccagcgacagacccctgcagctgcccaaggtgctgggcggcgacagcgccatgagagccttccagaacaccgccaccgcctgcgcccccgtgagccactacagagccgtggagagcgtggacagcagcgaggagagcttcagcgacagcgacgacgacagctgcctgtggaagagaaagagacagaagtgcttcaaccccccccccaagcccgagcccttccagttcggccagagcagccagaagccccccgtggccggcggcaagaagatcaacaacatctggggcgccgtgctgcaggagcagaaccaggacgccgtggccaccgagctgggcatcctgggcatggagggcaccatcgacagaagcagacagagcgagacctacaactacctgctggccaagaagctgagaaaggagagccaggagcacaccaaggacctggacaaggagctggacgagtacatgcacggcggcaagaagatgggcagcaaggaggaggagaacggccagggccacctgaagagaaagagacccgtgaaggacagactgggcaacagacccgagatgaactacaagggcagatacgagatcaccgccgaggacagccaggagaaggtggccgacgagatcagcttcagactgcaggagcccaagaaggacctgatcgccagagtggtgagaatcatcggcaacaagaaggccatcgagctgctgatggagaccgccgaggtggagcagaacggcggcctgttcatcatgaacggcagcagaagaagaacccccggcggcgtgttcctgaacctgctgaagaacacccccagcatcagcgaggagcagatcaaggacatcttctacatcgagaaccagaaggagtacgagaacaagaaggccgccagaaagagaagaacccaggtgctgggcaagaagatgaagcaggccatcaagagcctgaacttccaggaggacgacgacaccagcagagagaccttcgccagcgacaccaacgaggccctggccagcctggacgagagccaggagggccacgccgaggccaagctggaggccgaggaggccatcgaggtggaccacagccacgacctggacatcttctag

SEQ ID NO: 9688 - DNA, 789 bp, synthetic construct
  source 1..789: mol_type = other DNA; note = Synthetic coding sequence
atgttcctgttcagcagaaagaccagaacccccatcagcacctacagcgacagctacagagcccccaccagcatcaaggaggtgtacaaggacccccccctgtgcgcctgggaggccaacaagttcctgacccccggcctgacccacaccatggagagacacgtggaccccgaggccctgcagaagatggccaagtgcgccgtgcaggactacacctacagaggcagcatcagcggccacccctacctgcccgagaagtactggctgagccaggaggaggccgacaagtgcagccccaactacctgggcagcgactggtacaacacctggagaatggagccctacaacagcagctgctgcaacaagtacaccacctacctgcccagactgcccaaggaggccagaatggagaccgccgtgagaggcatgcccctggagtgcccccccagacccgagagactgaacgcctacgagagagaggtgatggtgaacatgctgaacagcctgagcagaaaccagcagctgcccagaatcacccccagatgcggctgcgtggaccccctgcccggcagactgcccttccacggctacgagagcgcctgcagcggcagacactactgcctgagaggcatggactactacgccagcggcgccccctgcaccgacagaagactgagaccctggtgcagagagcagcccaccatgtgcaccagcctgagagcccccgccagaaacgccgtgtgctgctacaacagccccgccgtgatcctgcccatcagcgagccctag

SEQ ID NO: 9689 - DNA, 4206 bp, synthetic construct
  source 1..4206: mol_type = other DNA; note = Synthetic coding sequence
atggaggagatccccgtgaaggtggccgtgagaatcagacccctgctgtgcaaggaggccctgcacaaccaccaggtgtgcgtgagagtgatccccaacagccagcaggtgatcatcggcagagacagagtgttcaccttcgacttcgtgttcggcaagaacagcacccaggacgaggtgtacaacacctgcatcaagcccctggtgctgagcctgatcgagggctacaacgccaccgtgttcgcctacggccagaccggcagcggcaagacctacaccatcggcggcggccacatcgccagcgtggtggagggccagaagggcatcatccccagagccatccaggagatcttccagagcatcagcgagcaccccagcatcgacttcaacgtgaaggtgagctacatcgaggtgtacaaggaggacctgagagacctgctggagctggagaccagcatgaaggacctgcacatcagagaggacgagaagggcaacaccgtgatcgtgggcgccaaggagtgccacgtggagagcgccggcgaggtgatgagcctgctggagatgggcaacgccgccagacacaccggcaccacccagatgaacgagcacagcagcagaagccacgccatcttcaccatcagcatctgccaggtgcacaagaacatggaggccgccgaggacggcagctggtacagccccagacacatcgtgagcaagttccacttcgtggacctggccggcagcgagagagtgaccaagaccggcaacaccggcgagagattcaaggagagcatccagatcaacagcggcctgctggccctgggcaacgtgatcagcgccctgggcgaccccagaagaaagagcagccacatcccctacagagacgccaagatcaccagactgctgaaggacagcctgggcggcagcgccaagaccgtgatgatcacctgcgtgagccccagcagcagcaacttcgacgagagcctgaacagcctgaagtacgccaacagagccagaaacatcagaaacaagcccaccgtgaacttcagccccgagagcgacagaatcgacgagatggagttcgagatcaagctgctgagagaggccctgcagagccagcaggccggcgtgagccagaccacccagatcaacagagagggcagccccgacaccaacagaatccacagcctggaggagcaggtggcccagctgcagggcgagtgcctgggctaccagtgctgcgtggaggaggccttcaccttcctggtggacctgaaggacaccgtgagactgaacgagaagcagcagcacaagctgcaggagtggttcaacatgatccaggaggtgagaaaggccgtgctgaccagcttcagaggcatcggcggcaccgccagcctggaggagggcccccagcacgtgaccgtgctgcagctgaagagagagctgaagaagtgccagtgcgtgctggccgccgacgaggtggtgttcaaccagaaggagctggaggtgaaggagctgaagaaccaggtgcagatgatggtgcaggagaacaagggccacgccgtgagcctgaaggaggcccagaaggtgaacagactgcagaacgagaagatcatcgagcagcagctgctggtggaccagctgagcgaggagctgaccaagctgaacctgagcgtgaccagcagcgccaaggagaactgcggcgacggccccgacgccagaatccccgagagaagaccctacaccgtgcccttcgacacccacctgggccactacatctacatccccagcagacaggacagcagaaaggtgcacaccagcccccccatgtacagcctggacagaatcttcgccggcttcagaaccagaagccagatgctgctgggccacatcgaggagcaggacaaggtgctgcactgccagttcagcgacaacagcgacgacgaggagagcgagggccaggagaagagcggcaccagatgcagaagcagaagctggatccagaagcccgacagcgtgtgcagcctggtggagctgagcgacacccaggacgagacccagaagagcgacctggagaacgaggacctgaagatcgactgcctgcaggagagccaggagctgaacctgcagaagctgaagaacagcgagagaatcctgaccgaggccaagcagaagatgagagagctgaccatcaacatcaagatgaaggaggacctgatcaaggagctgatcaagaccggcaacgacgccaagagcgtgagcaagcagtacagcctgaaggtgaccaagctggagcacgacgccgagcaggccaaggtggagctgatcgagacccagaagcagctgcaggagctggagaacaaggacctgagcgacgtggccatgaaggtgaagctgcagaaggagttcagaaagaagatggacgccgccaagctgagagtgcaggtgctgcagaagaagcagcaggacagcaagaagctggccagcctgagcatccagaacgagaagagagccaacgagctggagcagagcgtggaccacatgaagtaccagaagatccagctgcagagaaagctgagagaggagaacgagaagagaaagcagctggacgccgtgatcaagagagaccagcagaagatcaaggagatccagctgaagaccggccaggaggagggcctgaagcccaaggccgaggacctggacgcctgcaacctgaagagaagaaagggcagcttcggcagcatcgaccacctgcagaagctggacgagcagaagaagtggctggacgaggaggtggagaaggtgctgaaccagagacaggagctggaggagctggaggccgacctgaagaagagagaggccatcgtgagcaagaaggaggccctgctgcaggagaagagccacctggagaacaagaagctgagaagcagccaggccctgaacaccgacagcctgaagatcagcaccagactgaacctgctggagcaggagctgagcgagaagaacgtgcagctgcagaccagcaccgccgaggagaagaccaagatcagcgagcaggtggaggtgctgcagaaggagaaggaccagctgcagaagagaagacacaacgtggacgagaagctgaagaacggcagagtgctgagccccgaggaggagcacgtgctgttccagctggaggagggcatcgaggccctggaggccgccatcgagtacagaaacgagagcatccagaacagacagaagagcctgagagccagcttccacaacctgagcagaggcgaggccaacgtgctggagaagctggcctgcctgagccccgtggagatcagaaccatcctgttcagatacttcaacaaggtggtgaacctgagagaggccgagagaaagcagcagctgtacaacgaggagatgaagatgaaggtgctggagagagacaacatggtgagagagctggagagcgccctggaccacctgaagctgcagtgcgacagaagactgaccctgcagcagaaggagcacgagcagaagatgcagctgctgctgcaccacttcaaggagcaggacggcgagggcatcatggagaccttcaagacctacgaggacaagatccagcagctggagaaggacctgtacttctacaagaagaccagcagagaccacaagaagaagctgaaggagctggtgggcgaggccatcagaagacagctggcccccagcgagtaccaggaggccggcgacggcgtgctgaagcccgagggcggcggcatgctgagcgaggagctgaagtgggccagcagacccgagagcatgaagctgagcggcagagagagagagatggacagcagcgccagcagcctgagaacccagcccaacccccagaagctgtgggaggacatccccgagctgccccccatccacagcagcctggccccccccagcggccacatgctgggcaacgagaacaagaccgagaccgacgacaaccagttcaccaagagccacagcagactgagcagccagatccaggtggtgggcaacgtgggcagactgcacggcgtgacccccgtgaagctgtgcagaaaggagctgagacagatcagcgccctggagctgagcctgagaagaagcagcctgggcgtgggcatcggcagcatggccgccgacagcatcgaggtgagcagaaagcccagagacctgaagacctag

SEQ ID NO: 9690 - DNA, 768 bp, synthetic construct
  source 1..768: mol_type = other DNA; note = Synthetic coding sequence
atggtgaagggcgagaagggccccaagggcaagaagatcaccctgaaggtggccagaaactgcatcaagatcaccttcgacggcaagaagagactggacctgagcaagatgggcatcaccaccttccccaagtgcatcctgagactgagcgacatggacgagctggacctgagcagaaacctgatcagaaagatccccgacagcatcagcaagttccagaacctgagatggctggacctgcacagcaactacatcgacaagctgcccgagagcatcggccagatgaccagcctgctgtacctgaacgtgagcaacaacagactgaccagcaacggcctgcccgtggagctgaagcagctgaagaacatcagagccgtgaacctgggcctgaaccacctggacagcgtgcccaccaccctgggcgccctgaaggagctgcacgaggtgggcctgcacgacaacctgctgaacaacatccccgtgagcatcagcaagctgcccaagctgaagaagctgaacatcaagagaaaccccttccccaagcccggcgagagcgagatcttcatcgacagcatcagaagactggagaacctgtacgtggtggaggagaaggacctgtgcgccgcctgcctgagaaagtgccagaacgccagagacaacctgaacagaatcaagaacatggccaccaccacccccagaaagaccatcttccccaacctgatcagccccaacagcatggccaaggacagctgggaggactggagatag

SEQ ID NO: 9691 - DNA, 645 bp, synthetic construct
  source 1..645: mol_type = other DNA; note = Synthetic coding sequence
atgggcagaagacccgccagatgctacagatactgcaagaacaagccctaccccaagagcagattctgcagaggcgtgcccgacgccaagatcagaatcttcgacctgggcagaaagaaggccaaggtggacgagttccccctgggcggccacatggtgagcgacgagtacgagcagctgagcagcgaggccctggaggccgccagaatctgcgccaacaagtacatggtgaagagctgcggcagagacggcttccacatgagagtgagactgcaccccttccacgtgatcagaatcaacaagatgctgagctgcgccggcgccgacagactgcagaccggcatgagaggcgccttcggcaagccccagggcaccgtggccagagtgcacatcggccaggtgatcatgagcatcagaaccaagctgcagaacgaggagcacgtgatcgaggccctgagaagagccaagttcaagttccccggcagacagaagatccacatcagcaagaagtggggcttcaccaagttcaacgccgacgagttcgaggacatggtggccaagaagtgcctgatccccgacggctgcggcgtgaagtacgtgcccagccacggccccctggacaagtggagagtgctgcacagctag

SEQ ID NO: 9692 - DNA, 3231 bp, synthetic construct
  source 1..3231: mol_type = other DNA; note = Synthetic coding sequence
atgaagagcagattcagcaccatcgacctgagagccgtgctggccgagctgaacgccagcctgctgggcatgagagtgaacaacgtgtacgacgtggacaacaagacctacctgatcagactgcagaagcccgacttcaaggccaccctgctgctggagagcggcatcagaatccacaccaccgagttcgagtggcccaagaacatgatgcccagcagcttcgccatgaagtgcagaaagcacctgaagagcagaagactggtgagcgccaagcagctgggcgtggacagaatcgtggacttccagttcggcagcgacgaggccgcctaccacctgatcatcgagctgtacgacagaggcaacatcgtgctgaccgactacgagtacgtgatcctgaacatcctgagattcagaaccgacgaggccgacgacgtgaagttcgccgtgagagagagataccccctggaccacgccagagccgccgagcccctgctgaccctggagagactgaccgagatcgtggccagcgcccccaagggcgagctgctgaagagagtgctgaaccccctgctgccctacggccccgccctgatcgagcactgcctgctggagaacggcttcagcggcaacgtgaaggtggacgagaagctggagaccaaggacatcgagaaggtgctggtgagcctgcagaaggccgaggactacatgaagaccaccagcaacttcagcggcaagggctacatcatccagaagagagagatcaagcccagcctggaggccgacaagcccgtggaggacatcctgacctacgaggagttccaccccttcctgttcagccagcacagccagtgcccctacatcgagttcgagagcttcgacaaggccgtggacgagttctacagcaagatcgagggccagaagatcgacctgaaggccctgcagcaggagaagcaggccctgaagaagctggacaacgtgagaaaggaccacgagaacagactggaggccctgcagcaggcccaggagatcgacaagctgaagggcgagctgatcgagatgaacctgcagatcgtggacagagccatccaggtggtgagaagcgccctggccaaccagatcgactggaccgagatcggcctgatcgtgaaggaggcccaggcccagggcgaccccgtggccagcgccatcaaggagctgaagctgcagaccaaccacgtgaccatgctgctgagaaacccctacctgctgagcgaggaggaggacgacgacgtggacggcgacgtgaacgtggagaagaacgagaccgagccccccaagggcaagaagaagaagcagaagaacaagcagctgcagaagccccagaagaacaagcccctgctggtggacgtggacctgagcctgagcgcctacgccaacgccaagaagtactacgaccacaagagatacgccgccaagaagacccagaagaccgtggaggccgccgagaaggccttcaagagcgccgagaagaagaccaagcagaccctgaaggaggtgcagaccgtgaccagcatccagaaggccagaaaggtgtactggttcgagaagttcctgtggttcatcagcagcgagaactacctgatcatcggcggcagagaccagcagcagaacgagatcatcgtgaagagatacctgacccccggcgacatctacgtgcacgccgacctgcacggcgccaccagctgcgtgatcaagaaccccaccggcgagcccatcccccccagaaccctgaccgaggccggcaccatggccctgtgctacagcgccgcctgggacgccagagtgatcaccagcgcctggtgggtgtaccaccaccaggtgagcaagaccgcccccaccggcgagtacctgaccaccggcagcttcatgatcagaggcaagaagaacttcctgccccccagctacctgatgatgggcttcagcttcctgttcaaggtggacgagagctgcgtgtggagacaccagggcgagagaaaggtgagagtgcaggacgaggacatggagaccctggccagctgcaccagcgagctgatcagcgaggagatggagcagctggacggcggcgacaccagcagcgacgaggacaaggaggagcacgagacccccgtggaggtggagctgatgacccaggtggaccaggaggacatcaccctgcagagcggcagagacgagctgaacgaggagctgatccaggaggagagcagcgaggacgagggcgagtacgaggaggtgagaaaggaccaggacagcgtgggcgagatgaaggacgagggcgaggagaccctgaactaccccgacaccaccatcgacctgagccacctgcagccccagagaagcatccagaagctggccagcaaggaggagagcagcaacagcagcgacagcaagagccagagcagaagacacctgagcgccaaggagagaagagagatgaagaagaagaagctgcccagcgacagcggcgacctggaggccctggagggcaaggacaaggagaaggagagcaccgtgcacatcgagacccaccagaacaccagcaagaacgtggccgccgtgcagcccatgaagagaggccagaagagcaagatgaagaagatgaaggagaagtacaaggaccaggacgaggaggacagagagctgatcatgaagctgctgggcagcgccggcagcaacaaggaggagaagggcaagaagggcaagaagggcaagaccaaggacgagcccgtgaagaagcagccccagaagcccagaggcggccagagagtgagcgacaacatcaagaaggagacccccttcctggaggtgatcacccacgagctgcaggacttcgccgtggacgacccccacgacgacaaggaggagcaggacctggaccagcagggcaacgaggagaacctgttcgacagcctgaccggccagccccaccccgaggacgtgctgctgttcgccatccccatctgcgccccctacaccaccatgaccaactacaagtacaaggtgaagctgacccccggcgtgcagaagaagggcaaggccgccaagaccgccctgaacagcttcatgcacagcaaggaggccaccgccagagagaaggacctgttcagaagcgtgaaggacaccgacctgagcagaaacatccccggcaaggtgaaggtgagcgcccccaacctgctgaacgtgaagagaaagtag

SEQ ID NO: 9693 - DNA, 963 bp, synthetic construct
  source 1..963: mol_type = other DNA; note = Synthetic coding sequence
atgggcgacatccccgccgtgggcctgagcagctggaaggccagccccggcaaggtgaccgaggccgtgaaggaggccatcgacgccggctacagacacttcgactgcgcctacttctaccacaacgagagagaggtgggcgccggcatcagatgcaagatcaaggagggcgccgtgagaagagaggacctgttcatcgccaccaagctgtggtgcacctgccacaagaagagcctggtggagaccgcctgcagaaagagcctgaaggccctgaagctgaactacctggacctgtacctgatccactggcccatgggcttcaagcccccccaccccgagtggatcatgagctgcagcgagctgagcttctgcctgagccaccccagagtgcaggacctgcccctggacgagagcaacatggtgatccccagcgacaccgacttcctggacacctgggaggccatggaggacctggtgatcaccggcctggtgaagaacatcggcgtgagcaacttcaaccacgagcagctggagagactgctgaacaagcccggcctgagattcaagcccctgaccaaccagatcgagtgccacccctacctgacccagaagaacctgatcagcttctgccagagcagagacgtgagcgtgaccgcctacagacccctgggcggcagctgcgagggcgtggacctgatcgacaaccccgtgatcaagagaatcgccaaggagcacggcaagagccccgcccagatcctgatcagattccagatccagagaaacgtgatcgtgatccccggcagcatcacccccagccacatcaaggagaacatccaggtgttcgacttcgagctgacccagcacgacatggacaacatcctgagcctgaacagaaacctgagactggccatgttccccatcaccaagaaccacaaggactaccccttccacatcgagtactag

SEQ ID NO: 9694 - DNA, 1239 bp, synthetic construct
  source 1..1239: mol_type = other DNA; note = Synthetic coding sequence
atgagcggctaccagagaagacccggcgccacccccctgagcagagccagaagcctggccatccccgacgcccccgccttctacgagagaagaagctgcctgccccagctgaactgcgagagaccccacggcagagacctggacagccccttcttcggcatcagacccgccttcatgtgctacgtgcccagccccgtgctggccagcgtgggcgacaccgacgacagattcgaggacctggaggaggccaaccccttcagcttcagagagttcctgaagaccaagaacctgggcctgagcaaggaggaccccgccagcagaatctacgccaaggaggccagcagacacagcctgggcctggaccacaacagcccccccagccagaccggcggctacggcctggagtaccagcagcccttcttcgaggaccccaccggcgccggcgacctgctggacgaggaggaggacgaggacaccggctggagcggcgcctacctgcccagcgccatcgagcagacccaccccgagagagtgcccgccggcaccagcccctgcagcacctacctgagcttcttcagcacccccagcgagctggccggccccgagagcctgcccagctgggccctgagcgacaccgacagcagagtgagccccgccagccccgccggcagccccagcgccgacttcgccgtgcacggcgagagcctgggcgacagacacctgagaaccctgcagatcagctacgacgccctgaaggacgagaacagcaagctgagaagaaagctgaacgaggtgcagagcttcagcgaggcccagaccgagatggtgagaaccctggagagaaagctggaggccaagatgatcaaggaggagagcgactaccacgacctggagagcgtggtgcagcaggtggagcagaacctggagctgatgaccaagagagccgtgaaggccgagaaccacgtggtgaagctgaagcaggagatcagcctgctgcaggcccaggtgagcaacttccagagagagaacgaggccctgagatgcggccagggcgccagcctgaccgtggtgaagcagaacgccgacgtggccctgcagaacctgagagtggtgatgaacagcgcccaggccagcatcaagcagctggtgagcggcgccgagaccctgaacctggtggccgagatcctgaagagcatcgacagaatcagcgaggtgaaggacgaggaggaggacagctag

SEQ ID NO: 9695 - DNA, 1440 bp, synthetic construct
  source 1..1440: mol_type = other DNA; note = Synthetic coding sequence
atggacgccaccatcgccccccacagaatcccccccgagatgccccagtacggcgaggagaaccacatcttcgagctgatgcagaacatgctggagcagctgctgatccaccagcccgaggaccccatccccttcatgatccagcacctgcacagagacaacgacaacgtgcccagaatcgtgatcctgggcccccccgccagcggcaagaccaccatcgccatgtggctgtgcaagcacctgaacagcagcctgctgaccctggagaacctgatcctgaacgagttcagctacaccgccaccgaggccagaagactgtacctgcagagaaagaccgtgcccagcgccctgctggtgcagctgatccaggagagactggccgaggaggactgcatcaagcagggctggatcctggacggcatccccgagaccagagagcaggccctgagaatccagaccctgggcatcacccccagacacgtgatcgtgctgagcgcccccgacaccgtgctgatcgagagaaacctgggcaagagaatcgacccccagaccggcgagatctaccacaccaccttcgactggccccccgagagcgagatccagaacagactgatggtgcccgaggacatcagcgagctggagaccgcccagaagctgctggagtaccacagaaacatcgtgagagtgatccccagctaccccaagatcctgaaggtgatcagcgccgaccagccctgcgtggacgtgttctaccaggccctgacctacgtgcagagcaaccacagaaccaacgcccccttcacccccagagtgctgctgctgggccccgtgggcagcggcaagagcctgcaggccgccctgctggcccagaagtacagactggtgaacgtgtgctgcggccagctgctgaaggaggccgtggccgacagaaccaccttcggcgagctgatccagcccttcttcgagaaggagatggccgtgcccgacagcctgctgatgaaggtgctgagccagagactggaccagcaggactgcatccagaagggctgggtgctgcacggcgtgcccagagacctggaccaggcccacctgctgaacagactgggctacaaccccaacagagtgttcttcctgaacgtgcccttcgacagcatcatggagagactgaccctgagaagaatcgaccccgtgaccggcgagagataccacctgatgtacaagcccccccccaccatggagatccaggccagactgctgcagaaccccaaggacgccgaggagcaggtgaagctgaagatggacctgttctacagaaacagcgccgacctggagcagctgtacggcagcgccatcaccctgaacggcgaccaggacccctacaccgtgttcgagtacatcgagagcggcatcatcaaccccctgcccaagaagatcccctag

SEQ ID NO: 9696 - DNA, 432 bp, synthetic construct
  source 1..432: mol_type = other DNA; note = Synthetic coding sequence
atggcccacgagatgatcggcacccagatcgtgaccgagagactggtggccctgctggagagcggcaccgagaaggtgctgctgatcgacagcagacccttcgtggagtacaacaccagccacatcctggaggccatcaacatcaactgcagcaagctgatgaagagaagactgcagcaggacaaggtgctgatcaccgagctgatccagcacagcgccaagcacaaggtggacatcgactgcagccagaaggtggtggtgtacgaccagagcagccaggacgtggccagcctgagcagcgactgcttcctgaccgtgctgctgggcaagctggagaagagcttcaacagcgtgcacctgctggccggcgccgacgccgccgagtgggactggctgtgcgtgaagtgccagcagtacctgagcaaggcctag

SEQ ID NO: 9697 - DNA, 1191 bp, synthetic construct
  source 1..1191: mol_type = other DNA; note = Synthetic coding sequence
atggccagcctgagcagagccctgagagtggccgccgcccaccccagacagagccccaccagaggcatgggcccctgcaacctgagcagcgccgccggccccaccgccgagaagagcgtgccctaccagagaaccctgaaggagggccagggcaccagcgtggtggcccagggccccagcagacccctgcccagcaccgccaacgtggtggtgatcggcggcggcagcctgggctgccagaccctgtaccacctggccaagctgggcatgagcggcgccgtgctgctggagagagagagactgaccagcggcaccacctggcacaccgccggcctgctgtggcagctgagacccagcgacgtggaggtggagctgctggcccacaccagaagagtggtgagcagagagctggaggaggagaccggcctgcacaccggctggatccagaacggcggcctgttcatcgccagcaacagacagagactggacgagtacaagagactgatgagcctgggcaaggcctacggcgtggagagccacgtgctgagccccgccgagaccaagaccctgtaccccctgatgaacgtggacgacctgtacggcaccctgtacgtgccccacgacggcaccatggaccccgccggcacctgcaccaccctggccagagccgccagcgccagaggcgcccaggtgatcgagaactgccccgtgaccggcatcagagtgtggaccgacgacttcggcgtgagaagagtggccggcgtggagacccagcacggcagcatccagaccccctgcgtggtgaactgcgccggcgtgtgggccagcgccgtgggcagaatggccggcgtgaaggtgcccctggtggccatgcaccacgcctacgtggtgaccgagagaatcgagggcatccagagcttcaccctgctgcccaccctggagtacagcggcaccgtgagcgcccactgcaacctgagactgcccggcagcagcaacagcagagccagcgccagccacgtggccggcatcaagtgcgccagacaccacaccagactgatcttcttctgcatcctggtggagaccgagttccaccacgtggccaaggccggcctggagctgctgagcagcggcaacccccccatcagcgacttccagagcgccagaatcaccggcgtgagccaccacgcctag

SEQ ID NO: 9698 - DNA, 4416 bp, synthetic construct
  source 1..4416: mol_type = other DNA; note = Synthetic coding sequence
atggagcccgagcccgtggaggactgcgtgcagagcaccctggccgccctgtacccccccttcgaggccaccgcccccaccctgctgggccaggtgttccaggtggtggagagaacctacagagaggacgccctgagatacaccctggacttcctggtgcccgccaagcacctgctggccaaggtgcagcaggaggcctgcgcccagtacagcggcttcctgttcttccacgagggctggcccctgtgcctgcacgagcaggtggtggtgcagctggccgccctgccctggcagctgctgagacccggcgacttctacctgcaggtggtgcccagcgccgcccaggcccccagactggccctgaagtgcctggcccccggcggcggcagagtgcaggaggtgcccgtgcccaacgaggcctgcgcctacctgttcacccccgagtggctgcagggcatcaacaaggacagacccaccggcagactgagcacctgcctgctgagcgcccccagcggcatccagagactgccctgggccgagctgatctgccccagattcgtgcacaaggagggcctgatggtgggccaccagcccagcaccctgccccccgagctgcccagcggcccccccggcctgcccagcccccccctgcccgaggaggccctgggcaccagaagccccggcgacggccacaacgcccccgtggagggccccgagggcgagtacgtggagctgctggaggtgaccctgcccgtgagaggcagccccaccgacgccgagggcagccccggcctgagcagagtgagaaccgtgcccaccagaaagggcgccggcggcaagggcagacacagaagacacagagcctggatgcaccagaagggcctgggccccagaggccaggacggcgccagaccccccggcgagggcagcagcaccggcgccagccccgagagcccccccggcgccgaggccgtgcccgaggccgccgtgctggaggtgagcgagccccccgccgaggccgtgggcgaggccagcggcagctgccccctgagacccggcgagctgagaggcggcggcggcggcggccagggcgccgagggcccccccggcacccccagaagaaccggcaagggcaacagaagaaagaagagagccgccggcagaggcgccctgagcagaggcggcgacagcgcccccctgagccccggcgacaaggaggacgccagccaccaggaggccctgggcaacctgcccagccccagcgagcacaagctgcccgagtgccacctggtgaaggaggagtacgagggcagcggcaagcccgagagcgagcccaaggagctgaagaccgccggcgagaaggagccccagctgagcgaggcctgcggccccaccgaggagggcgccggcgagagagagctggagggccccggcctgctgtgcatggccggccacaccggccccgagggccccctgagcgacacccccaccccccccctggagaccgtgcaggagggcaagggcgacaacatccccgaggaggccctggccgtgagcgtgagcgaccaccccgacgtggcctgggacctgatggccagcggcttcctgatcctgaccggcggcgtggaccagagcggcagagccctgctgaccatcacccccccctgcccccccgaggagcccccccccagcagagacaccctgaacaccaccctgcactacctgcacagcctgctgagacccgacctgcagaccctgggcctgagcgtgctgctggacctgagacaggccccccccctgccccccgccctgatccccgccctgagccagctgcaggacagcggcgacccccccctggtgcagagactgctgatcctgatccacgacgacctgcccaccgagctgtgcggcttccagggcgccgaggtgctgagcgagaacgacctgaagagagtggccaagcccgaggagctgcagtgggagctgggcggccacagagaccccagccccagccactgggtggagatccaccaggaggtggtgagactgtgcagactgtgccagggcgtgctgggcagcgtgagacaggccatcgaggagctggagggcgccgccgagcccgaggaggaggaggccgtgggcatgcccaagcccctgcagaaggtgctggccgaccccagactgaccgccctgcagagagacggcggcgccatcctgatgagactgagaagcacccccagcagcaagctggagggccagggccccgccaccctgtaccaggaggtggacgaggccatccaccagctggtgagactgagcaacctgcacgtgcagcagcaggagcagagacagtgcctgagaagactgcagcaggtgctgcagtggctgagcggccccggcgaggagcagctggccagcttcgccatgcccggcgacaccctgagcgccctgcaggagaccgagctgagattcagagccttcagcgccgaggtgcaggagagactggcccaggccagagaggccctggccctggaggagaacgccaccagccagaaggtgctggacatcttcgagcagagactggagcaggtggagagcggcctgcacagagccctgagactgcagagattcttccagcaggcccacgagtgggtggacgagggcttcgccagactggccggcgccggccccggcagagaggccgtgctggccgccctggccctgagaagagcccccgagcccagcgccggcaccttccaggagatgagagccctggccctggacctgggcagccccgccgccctgagagagtggggcagatgccaggccagatgccaggagctggagagaagaatccagcagcacgtgggcgaggaggccagccccagaggctacagaagaagaagagccgacggcgccagcagcggcggcgcccagtggggccccagaagccccagccccagcctgagcagcctgctgctgcccagcagccccggccccagacccgcccccagccactgcagcctggccccctgcggcgaggactacgaggaggagggccccgagctggcccccgaggccgagggcagaccccccagagccgtgctgatcagaggcctggaggtgaccagcaccgaggtggtggacagaacctgcagccccagagagcacgtgctgctgggcagagccagaggccccgacggcccctggggcgtgggcacccccagaatggagagaaagagaagcatcagcgcccagcagagactggtgagcgagctgatcgcctgcgagcaggactacgtggccaccctgagcgagcccgtgcccccccccggccccgagctgacccccgagctgagaggcacctgggccgccgccctgagcgccagagagagactgagaagcttccacagaacccacttcctgagagagctgcagggctgcgccacccaccccctgagaatcggcgcctgcttcctgagacacggcgaccagttcagcctgtacgcccagtacgtgaagcacagacacaagctggagaacggcctggccgccctgagccccctgagcaagggcagcatggaggccggcccctacctgcccagagccctgcagcagcccctggagcagctgaccagatacggcagactgctggaggagctgctgagagaggccggccccgagctgagcagcgagtgcagagccctgggcgccgccgtgcagctgctgagagagcaggaggccagaggcagagacctgctggccgtggaggccgtgagaggctgcgagatcgacctgaaggagcagggccagctgctgcacagagaccccttcaccgtgatctgcggcagaaagaagtgcctgagacacgtgttcctgttcgagcacctgctgctgttcagcaagctgaagggccccgagggcggcagcgagatgttcgtgtacaagcaggccttcaagaccgccgacatgggcctgaccgagaacatcggcgacagcggcctgtgcttcgagctgtggttcagaagaagaagagccagagaggcctacaccctgcaggccaccagccccgagatcaagctgaagtggaccagcagcatcgcccagctgctgtggagacaggccgcccacaacaaggagctgagagtgcagcagatggtgagcatgggcatcggcaacaagcccttcctggacatcaaggccctgggcgagagaaccctgagcgccctgctgaccggcagagcccccgagaccctggacagcagcggcgacgtgagccccggccccagaaacagccccagcctgcagcccccccaccccggcagcagcacccccaccctggccagcagaggcatcctgggcctgagcagacagagccacgccagagccctgagcgaccccaccacccccctgtag

SEQ ID NO: 9699 - DNA, 4560 bp, synthetic construct
  source 1..4560: mol_type = other DNA; note = Synthetic coding sequence
atggagcccgagcccgtggaggactgcgtgcagagcaccctggccgccctgtacccccccttcgaggccaccgcccccaccctgctgggccaggtgttccaggtggtggagagaacctacagagaggacgccctgagatacaccctggacttcctggtgcccgccaagcacctgctggccaaggtgcagcaggaggcctgcgcccagtacagcggcttcctgttcttccacgagggctggcccctgtgcctgcacgagcaggtggtggtgcagctggccgccctgccctggcagctgctgagacccggcgacttctacctgcaggtggtgcccagcgccgcccaggcccccagactggccctgaagtgcctggcccccggcggcggcagagtgcaggaggtgcccgtgcccaacgaggcctgcgcctacctgttcacccccgagtggctgcagggcatcaacaaggacagacccaccggcagactgagcacctgcctgctgagcgcccccagcggcatccagagactgccctgggccgagctgatctgccccagattcgtgcacaaggagggcctgatggtgggccaccagcccagcaccctgccccccgagctgcccagcggcccccccggcctgcccagcccccccctgcccgaggaggccctgggcaccagaagccccggcgacggccacaacgcccccgtggagggccccgagggcgagtacgtggagctgctggaggtgaccctgcccgtgagaggcagccccaccgacgccgagggcagccccggcctgagcagagtgagaaccgtgcccaccagaaagggcgccggcggcaagggcagacacagaagacacagagcctggatgcaccagaagggcctgggccccagaggccaggacggcgccagaccccccggcgagggcagcagcaccggcgccagccccgagagcccccccggcgccgaggccgtgcccgaggccgccgtgctggaggtgagcgagccccccgccgaggccgtgggcgaggccagcggcagctgccccctgagacccggcgagctgagaggcggcggcggcggcggccagggcgccgagggcccccccggcacccccagaagaaccggcaagggcaacagaagaaagaagagagccgccggcagaggcgccctgagcagaggcggcgacagcgcccccctgagccccggcgacaaggaggacgccagccaccaggaggccctgggcaacctgcccagccccagcgagcacaagctgcccgagtgccacctggtgaaggaggagtacgagggcagcggcaagcccgagagcgagcccaaggagctgaagaccgccggcgagaaggagccccagctgagcgaggcctgcggccccaccgaggagggcgccggcgagagagagctggagggccccggcctgctgtgcatggccggccacaccggccccgagggccccctgagcgacacccccaccccccccctggagaccgtgcaggagggcaagggcgacaacatccccgaggaggccctggccgtgagcgtgagcgaccaccccgacgtggcctgggacctgatggccagcggcttcctgatcctgaccggcggcgtggaccagagcggcagagccctgctgaccatcacccccccctgcccccccgaggagcccccccccagcagagacaccctgaacaccaccctgcactacctgcacagcctgctgagacccgacctgcagaccctgggcctgagcgtgctgctggacctgagacaggccccccccctgccccccgccctgatccccgccctgagccagctgcaggacagcggcgacccccccctggtgcagagactgctgatcctgatccacgacgacctgcccaccgagctgtgcggcttccagggcgccgaggtgctgagcgagaacgacctgaagagagtggccaagcccgaggagctgcagtgggagctgggcggccacagagaccccagccccagccactgggtggagatccaccaggaggtggtgagactgtgcagactgtgccagggcgtgctgggcagcgtgagacaggccatcgaggagctggagggcgccgccgagcccgaggaggaggaggccgtgggcatgcccaagcccctgcagaaggtgctggccgaccccagactgaccgccctgcagagagacggcggcgccatcctgatgagactgagaagcacccccagcagcaagctggagggccagggccccgccaccctgtaccaggaggtggacgaggccatccaccagctggtgagactgagcaacctgcacgtgcagcagcaggagcagagacagtgcctgagaagactgcagcaggtgctgcagtggctgagcggccccggcgaggagcagctggccagcttcgccatgcccggcgacaccctgagcgccctgcaggagaccgagctgagattcagagccttcagcgccgaggtgcaggagagactggcccaggccagagaggccctggccctggaggagaacgccaccagccagaaggtgctggacatcttcgagcagagactggagcaggtggagagcggcctgcacagagccctgagactgcagagattcttccagcaggcccacgagtgggtggacgagggcttcgccagactggccggcgccggccccggcagagaggccgtgctggccgccctggccctgagaagagcccccgagcccagcgccggcaccttccaggagatgagagccctggccctggacctgggcagccccgccgccctgagagagtggggcagatgccaggccagatgccaggagctggagagaagaatccagcagcacgtgggcgaggaggccagccccagaggctacagaagaagaagagccgacggcgccagcagcggcggcgcccagtggggccccagaagccccagccccagcctgagcagcctgctgctgcccagcagccccggccccagacccgcccccagccactgcagcctggccccctgcggcgaggactacgaggaggagggccccgagctggcccccgaggccgagggcagaccccccagagccgtgctgatcagaggcctggaggtgaccagcaccgaggtggtggacagaacctgcagccccagagagcacgtgctgctgggcagagccagaggccccgacggcccctggggcgtgggcacccccagaatggagagaaagagaagcatcagcgcccagcagagactggtgagcgagctgatcgcctgcgagcaggactacgtggccaccctgagcgagcccgtgcccccccccggccccgagctgacccccgagctgagaggcacctgggccgccgccctgagcgccagagagagactgagaagcttccacagaacccacttcctgagagagctgcagggctgcgccacccaccccctgagaatcggcgcctgcttcctgagacacggcgaccagttcagcctgtacgcccagtacgtgaagcacagacacaagctggagaacggcctggccgccctgagccccctgagcaagggcagcatggaggccggcccctacctgcccagagccctgcagcagcccctggagcagctgaccagatacggcagactgctggaggagctgctgagagaggccggccccgagctgagcagcgagtgcagagccctgggcgccgccgtgcagctgctgagagagcaggaggccagaggcagagacctgctggccgtggaggccgtgagaggctgcgagatcgacctgaaggagcagggccagctgctgcacagagaccccttcaccgtgatctgcggcagaaagaagtgcctgagacacgtgttcctgttcgagcacctgctgctgttcagcaagctgaagggccccgagggcggcagcgagatgttcgtgtacaagcaggccttcaagaccgccgacatgggcctgaccgagaacatcggcgacagcggcctgtgcttcgagctgtggttcagaagaagaagagccagagaggcctacaccctgcaggccaccagccccgagatcaagctgaagtggaccagcagcatcgcccagctgctgtggagacaggccgcccacaacaaggagctgagagtgcagcagatggtgagcatgggcatcggcaacaagcccttcctggacatcaaggccctgggcgagagaaccctgagcgccctgctgaccggcagagccgccagaaccagagccagcgtggccgtgagcagcttcgagcacgccggccccagcctgcccggcctgagccccggcgcctgcagcctgcccgccagagtggaggaggaggcctgggacctggacgtgaagcagatcagcctggcccccgagaccctggacagcagcggcgacgtgagccccggccccagaaacagccccagcctgcagcccccccaccccggcagcagcacccccaccctggccagcagaggcatcctgggcctgagcagacagagccacgccagagccctgagcgaccccaccacccccctgtag

SEQ ID NO: 9700 - DNA, 2709 bp, synthetic construct
  source 1..2709: mol_type = other DNA; note = Synthetic coding sequence
atgttccccgccctggagacccacctgaagcagaccatccccgacccctacgaggacttcatgtacagacacctgcagtactacggctacttcaaggcccagagaggcagcctgcccaacagcgccacccaccagcacgtgagaaagaacaacccccagtgcctgctgaacggcagcctgggcgagaaggacgacctgatccccgacaccctgcagaaggagaagctgctgtggcccatcagcctgagcagcgccgtgcacagacagatcgaggccatcaacagagacttccacagctgcctgggctggatgcagtggagaggcctgagcagcctgcagccccccccccccagattcaaggacagccccgccagcgccttcagagtggccggcatcaccgacagccacatgctgagcctgccccacctgagaagcagacagctgctgtacgacgagctggacgaggtgaaccccagactgagagagccccaggagctgttcagcatcctgagcaccaagagacccctgcaggcccccagatggcccatcgagtgcgaggtgatcaaggagaacatccaccacatcgagtgggcccccccccagcccgagtacttctaccagcccaagggcaacgagaaggtgcccgagatcgtgggcgagaagaagggcaccgtggtgtaccagctggacagcgtgcccatcgagggcagctacttcaccagcagcagagtgggcggcaagagaggcatcgtgaaggagctggccgtgaccctgcagggccccgaggacaacaccctgctgttcgagagcagattcgagagcggcaacctgcagaaggccgtgagagtggacacctacgagtacgagctgaccctgagaaccgacctgtacaccaacaagcacacccagtggttctacttcagagtgcagaacaccagaaaggacgccacctacagattcaccatcgtgaacctgctgaagcccaagagcctgtacaccgtgggcatgaagcccctgctgtacagccagctggacgccaacaccagaaacatcggctggagaagagagggcaacgagatcaagtactacaagaacaacaccgacgacggccagcagcccttctactgcctgacctggaccatccagttcccctacgaccaggacacctgcttcttcgcccacttctacccctacacctacaccgacctgcagtgctacctgctgagcgtggccaacaaccccatccagagccagttctgcaagctgcagaccctgtgcagaagcctggccggcaacaccgtgtacctgctgaccatcaccaaccccagccagaccccccaggaggccgccgccaagaaggccgtggtgctgagcgccagagtgcaccccggcgagagcaacggcagctgggtgatgaagggcttcctggacttcatcctgagcaacagccccgacgcccagctgctgagagacatcttcgtgttcaaggtgctgcccatgctgaaccccgacggcgtgatcgtgggcaactacagatgcagcctggccggcagagacctgaacagacactacaagaccatcctgaaggagagcttcccctgcatctggtacaccagaaacatgatcaagagactgctggaggagagagaggtgctgctgtactgcgacttccacggccacagcagaaagaacaacatcttcctgtacggctgcaacaacaacaacagaaagtactggctgcacgagagagtgttccccctgatgctgtgcaagaacgcccccgacaagttcagcttccacagctgcaacttcaaggtgcagaagtgcaaggagggcaccggcagagtggtgatgtggagaatgggcatcctgaacagctacaccatggagagcaccttcggcggcagcaccctgggcaacaagagagacacccacttcaccatcgaggacctgaagagcctgggctaccacgtgtgcgacaccctgctggacttctgcgaccccgaccagatgaagttcacccagtgcctggccgagctgaaggagctgctgagacaggagatccacaagaagttccacgagctgggccaggacgtggacctggagggcagctggagcgacatcagcctgagcgacatcgagagcagcaccagcggcagcgacagcagcctgagcgacggcctgcccgtgcacctggccaacatcgccgacgagctgacccagaagaagaagatgttcaagaagaagaagaagaagagcctgcagaccagaaagcagagaaacgagcagtaccagaagaagaacctgatgcagaagctgaagctgaccgaggacaccagcgagaaggccggcttcgccagcaccctgcagaagcagcccaccttcttcaagaacagcgagaacagcagcttcctgcccatgaagaacgagaaccccagactgaacgagaccaacctgaacagaagagacaaggacacccccctggaccccagcatggccaccctgatcctgcccaagaacaagggcagaatgcagaacaagaagcccggcttcaccgtgagctgcagccccaagagaaccatcaacagcagccaggagcccgcccccggcatgaagcccaactggcccagaagcagataccccgccaccaagagaggctgcgccgccatggccgcctaccccagcctgcacatctacacctacccctag

SEQ ID NO: 9701 - DNA, 3234 bp, synthetic construct
  source 1..3234: mol_type = other DNA; note = Synthetic coding sequence
atggaggtgcaggtgagccaggccagcctgggcttcgagctgaccagcgtggagaagagcctgagagagtggagcagactgagcagagaggtgatcgcctggctgtgccccagcagccccaacttcatcctgaacttcccccccccccccagcgccagcagcgtgagcatggtgcagctgttcagcagccccttcggctaccagagccccagcggccacagcgaggaggagagagagggcaacatgaagagcgccaagccccaggtgaaccacagccagcacggcgagagccagagagccctgagccccctgcagagcaccctgagcagcgccgccagccccagccaggcctacgagacctacatcgagaacggcctgatctgcctgaagcacaagatcagaaacatcgagaagaagaagctgaagctggaggactacaaggacagactgaagagcggcgagcacctgaaccccgaccagctggaggccgtggagaagtacgaggaggtgctgcacaacctggagttcgccaaggagctgcagaagaccttcagcggcctgagcctggacctgctgaaggcccagaagaaggcccagagaagagagcacatgctgaagctggaggccgagaagaagaagctgagaaccatcctgcaggtgcagtacgtgctgcagaacctgacccaggagcacgtgcagaaggacttcaagggcggcctgaacggcgccgtgtacctgcccagcaaggagctggactacctgatcaagttcagcaagctgacctgccccgagagaaacgagagcctgagcgtggaggaccagatggagcagagcagcctgtacttctgggacctgctggagggcagcgagaaggccgtggtgggcaccacctacaagcacctgaaggacctgctgagcaagctgctgaacagcggctacttcgagagcatccccgtgcccaagaacgccaaggagaaggaggtgcccctggaggaggagatgctgatccagagcgagaagaagacccagctgagcaagaccgagagcgtgaaggagagcgagagcctgatggagttcgcccagcccgagatccagccccaggagttcctgaacagaagatacatgaccgaggtggactacagcaacaagcagggcgaggagcagccctgggaggccgactacgccagaaagcccaacctgcccaagagatgggacatgctgaccgagcccgacggccaggagaagaagcaggagagcttcaagagctgggaggccagcggcaagcaccaggaggtgagcaagcccgccgtgagcctggagcagagaaagcaggacaccagcaagctgagaagcaccctgcccgaggagcagaagaagcaggagatcagcaagagcaagcccagccccagccagtggaagcaggacacccccaagagcaaggccggctacgtgcaggaggagcagaagaagcaggagacccccaagctgtggcccgtgcagctgcagaaggagcaggaccccaagaagcagacccccaagagctggacccccagcatgcagagcgagcagaacaccaccaagagctggaccacccccatgtgcgaggagcaggacagcaagcagcccgagacccccaagagctgggagaacaacgtggagagccagaagcacagcctgaccagccagagccagatcagccccaagagctggggcgtggccaccgccagcctgatccccaacgaccagctgctgcccagaaagctgaacaccgagcccaaggacgtgcccaagcccgtgcaccagcccgtgggcagcagcagcaccctgcccaaggaccccgtgctgagaaaggagaagctgcaggacctgatgacccagatccagggcacctgcaacttcatgcaggagagcgtgctggacttcgacaagcccagcagcgccatccccaccagccagccccccagcgccacccccggcagccccgtggccagcaaggagcagaacctgagcagccagagcgacttcctgcaggagcccctgcaggccaccagcagccccgtgacctgcagcagcaacgcctgcctggtgaccaccgaccaggccagcagcggcagcgagaccgagttcatgaccagcgagacccccgaggtgttcaacgtgaacgcccccctgccccccagaaaggagcaggagatcaaggagagcccctacagccccggctacaaccagagcttcaccaccgccagcacccagacccccccccagtgccagctgcccagcatccacgtggagcagaccgtgcacagccaggagaccgccaactaccaccccgacggcaccatccaggtgagcaacggcagcctggccttctaccccgcccagaccaacgtgttccccagacccacccagcccttcgtgaacagcagaggcagcgtgagaggctgcaccagaggcggcagactgatcaccaacagctacagaagccccggcggctacaagggcttcgacacctacagaggcctgcccagcatcagcaacggcaactacagccagctgcagttccaggccagagagtacagcggcgccccctacagccagagagacaacttccagcagtgctacaagagaggcggcaccagcggcggccccagagccaacagcagagccggctggagcgacagcagccaggtgagcagccccgagagagacaacgagaccttcaacagcggcgacagcggccagggcgacagcagaagcatgacccccgtggacgtgcccgtgaccaaccccgccgccaccatcctgcccgtgcacgtgtaccccctgccccagcagatgagagtggccttcagcgccgccagaaccagcaacctggcccccggcaccctggaccagcccatcgtgttcgacctgctgctgaacaacctgggcgagaccttcgacctgcagctgggcagattcaactgccccgtgaacggcacctacgtgttcatcttccacatgctgaagctggccgtgaacgtgcccctgtacgtgaacctgatgaagaacgaggaggtgctggtgagcgcctacgccaacgacggcgcccccgaccacgagaccgccagcaaccacgccatcctgcagctgttccagggcgaccagatctggctgagactgcacagaggcgccatctacggcagcagctggaagtacagcaccttcagcggctacctgctgtaccaggactag

SEQ ID NO: 9702 - DNA, 1056 bp, synthetic construct
  source 1..1056: mol_type = other DNA; note = Synthetic coding sequence
atgaccctgagactgctggaggactggtgcagaggcatggacatgaaccccagaaaggccctgctgatcgccggcatcagccagagctgcagcgtggccgagatcgaggaggccctgcaggccggcctggcccccctgggcgagtacagactgctgggcagaatgttcagaagagacgagaacagaaaggtggccctggtgggcctgaccgccgagaccagccacgccctggtgcccaaggagatccccggcaagggcggcatctggagagtgatcttcaagccccccgaccccgacaacaccttcctgagcagactgaacgagttcctggccggcgagggcatgaccgtgggcgagctgagcagagccctgggccacgagaacggcagcctggaccccgagcagggcatgatccccgagatgtgggcccccatgctggcccaggccctggaggccctgcagcccgccctgcagtgcctgaagtacaagaagctgagagtgttcagcggcagagagagccccgagcccggcgaggaggagttcggcagatggatgttccacaccacccagatgatcaaggcctggcaggtgcccgacgtggagaagagaagaagactgctggagagcctgagaggccccgccctggacgtgatcagagtgctgaagatcaacaaccccctgatcaccgtggacgagtgcctgcaggccctggaggaggtgttcggcgtgaccgacaaccccagagagctgcaggtgaagtacctgaccacctaccagaaggacgaggagaagctgagcgcctacgtgctgagactggagcccctgctgcagaagctggtgcagagaggcgccatcgagagagacgccgtgaaccaggccagactggaccaggtgatcgccggcgccgtgcacaagaccatcagaagagagctgaacctgcccgaggacggccccgcccccggcttcctgcagctgctggtgctgatcaaggactacgaggccgccgaggaggaggaggccctgctgcaggccatcctggagggcaacttcacctag

SEQ ID NO: 9703 - DNA, 2559 bp, synthetic construct
  source 1..2559: mol_type = other DNA; note = Synthetic coding sequence
atgagcggcagagccagagtgaaggccagaggcatcgccagaagccccagcgccaccgaggtgggcagaatccaggccagccccctgcccagaagcgtggacctgagcaacaacgaggccagcagcagcaacggcttcctgggcaccagcagaatcagcaccaacgacaagtacggcatcagcagcggcgacgccggcagcaccttcatggagagaggcgtgaagaacaagcaggacttcatggacctgagcatctgcaccagagagaagctggcccacgtgagaaactgcaagaccggcagcagcggcatccccgtgaagctggtgaccaacctgttcaacctggacttcccccaggactggcagctgtaccagtaccacgtgacctacatccccgacctggccagcagaagactgagaatcgccctgctgtacagccacagcgagctgagcaacaaggccaaggccttcgacggcgccatcctgttcctgagccagaagctggaggagaaggtgaccgagctgagcagcgagacccagagaggcgagaccatcaagatgaccatcaccctgaagagagagctgcccagcagcagccccgtgtgcatccaggtgttcaacatcatcttcagaaagatcctgaagaagctgagcatgtaccagatcggcagaaacttctacaaccccagcgagcccatggagatcccccagcacaagctgagcctgtggcccggcttcgccatcagcgtgagctacttcgagagaaagctgctgttcagcgccgacgtgagctacaaggtgctgagaaacgagaccgtgctggagttcatgaccgccctgtgccagagaaccggcctgagctgcttcacccagacctgcgagaagcagctgatcggcctgatcgtgctgaccagatacaacaacagaacctacagcatcgacgacatcgactggagcgtgaagcccacccacaccttccagaagagagacggcaccgagatcacctacgtggactactacaagcagcagtacgacatcaccgtgagcgacctgaaccagcccatgctggtgagcctgctgaagaagaagagaaacgacaacagcgaggcccagctggcccacctgatccccgagctgtgcttcctgaccggcctgaccgaccaggccaccagcgacttccagctgatgaaggccgtggccgagaagaccagactgagccccagcggcagacagcagagactggccagactggtggacaacatccagagaaacaccaacgccagattcgagctggagacctggggcctgcacttcggcagccagatcagcctgaccggcagaatcgtgcccagcgagaagatcctgatgcaggaccacatctgccagcccgtgagcgccgccgactggagcaaggacatcagaacctgcaagatcctgaacgcccagagcctgaacacctggctgatcctgtgcagcgacagaaccgagtacgtggccgagagcttcctgaactgcctgagaagagtggccggcagcatgggcttcaacgtggactaccccaagatcatcaaggtgcaggagaaccccgccgccttcgtgagagccatccagcagtacgtggaccccgacgtgcagctggtgatgtgcatcctgcccagcaaccagaagacctactacgacagcatcaagaagtacctgagcagcgactgccccgtgcccagccagtgcgtgctggccagaaccctgaacaagcagggcatgatgatgagcatcgccaccaagatcgccatgcagatgacctgcaagctgggcggcgagctgtgggccgtggagatccccctgaagagcctgatggtggtgggcatcgacgtgtgcaaggacgccctgagcaaggacgtgatggtggtgggctgcgtggccagcgtgaaccccagaatcaccagatggttcagcagatgcatcctgcagagaaccatgaccgacgtggccgactgcctgaaggtgttcatgaccggcgccctgaacaagtggtacaagtacaaccacgacctgcccgccagaatcatcgtgtacagagccggcgtgggcgacggccagctgaagaccctgatcgagtacgaggtgccccagctgctgagcagcgtggccgagagcagcagcaacaccagcagcagactgagcgtgatcgtggtgagaaagaagtgcatgcccagattcttcaccgagatgaacagaaccgtgcagaacccccccctgggcaccgtggtggacagcgaggccaccagaaacgagtggtacgacttctacctgatcagccaggtggcctgcagaggcaccgtgagccccacctactacaacgtgatctacgacgacaacggcctgaagcccgaccacatgcagagactgaccttcaagctgtgccacctgtactacaactggcccggcatcgtgagcgtgcccgccccctgccagtacgcccacaagctgaccttcctggtggcccagagcatccacaaggagcccagcctggagctggccaaccacctgttctacctgtag

SEQ ID NO: 9704 - DNA, 2163 bp, synthetic construct
  source 1..2163: mol_type = other DNA; note = Synthetic coding sequence
atgtacggcagcgccagaagcgtgggcaaggtggagcccagcagccagagccccggcagaagccccagactgcccagaagccccagactgggccacagaagaaccaacagcaccggcggcagcagcggcagcagcgtgggcggcggcagcggcaagaccctgagcatggagaacatccagagcctgaacgccgcctacgccaccagcggccccatgtacctgagcgaccacgagaacgtgggcagcgagacccccaagagcaccatgaccctgggcagaagcggcggcagactgccctacggcgtgagaatgaccgccatgggcagcagccccaacatcgccagcagcggcgtggccagcgacaccatcgccttcggcgagcaccacctgccccccgtgagcatggccagcaccgtgccccacagcctgagacaggccagagacaacaccatcatggacctgcagacccagctgaaggaggtgctgagagagaacgacctgctgagaaaggacgtggaggtgaaggagagcaagctgagcagcagcatgaacagcatcaagaccttctggagccccgagctgaagaaggagagagccctgagaaaggacgaggccagcaagatcaccatctggaaggagcagtacagagtggtgcaggaggagaaccaggtggacgccctgagactgagactggaggagaaggagaccatgctgaacaagaagaccaagcagatccaggacatggccgaggagaagggcacccaggccggcgagatccacgacctgaaggacatgctggacgtgaaggagagaaaggtgaacgtgctgcagaagaagatcgagaacctgcaggagcagctgagagacaaggagaagcagatgagcagcctgaaggagagagtgaagagcctgcaggccgacaccaccaacaccgacaccgccctgaccaccctggaggaggccctggccgagaaggagagaaccatcgagagactgaaggagcagagagacagagacgagagagagaagcaggaggagatcgacaactacaagaaggacctgaaggacctgaaggagaaggtgagcctgctgcagggcgacctgagcgagaaggaggccagcctgctggacctgaaggagcacgccagcagcctggccagcagcggcctgaagaaggacagcagactgaagaccctggagatcgccctggagcagaagaaggaggagtgcctgaagatggagagccagctgaagaaggcccacgaggccgccctggaggccagagccagccccgagatgagcgacagaatccagcacctggagagagagatcaccagatacaaggacgagagcagcaaggcccaggccgaggtggacagactgctggagatcctgaaggaggtggagaacgagaagaacgacaaggacaagaagatcgccgagctggagagcctgttcagcagacaggtgaaggaccagaacaagaaggtggccaacctgaagcacaaggagcaggtggagaagaagaagagcgcccagatgctggaggaggccagaagaagagaggacaacctgaacgacagcagccagcagctgcaggacagcctgagaaagaaggacgacagaatcgaggagctggaggaggccctgagagagagcgtgcagatcaccgccgagagagagatggtgctggcccaggaggagagcgccagaaccaacgccgagaagcaggtggaggagctgctgatggccatggagaaggtgaagcaggagctggagagcatgaaggccaagctgagcagcacccagcagagcctggccgagaaggagacccacctgaccaacctgagagccgagagaagaaagcacctggaggaggtgctggagatgaagcaggaggccctgctggccgccatcagcgagaaggacgccaacatcgccctgctggagctgagcagcagcaagaagaagacccaggaggaggtggccgccctgaagagagagaaggacagactggtgcagcagctgaagcagcagacccagaacagaatgaagctgatggccgacaactacgaggacgaccacttcaagagcagccacagcaaccagaccaaccacaagcccagccccgaccaggacgaggaggagggcatctgggcctag

SEQ ID NO: 9705 - DNA, 1344 bp, synthetic construct
  source 1..1344: mol_type = other DNA; note = Synthetic coding sequence
atggacatgggcaaccagcaccccagcatcagcagactgcaggagatccagaaggaggtgaagagcgtggagcagcaggtgatcggcttcagcggcctgagcgacgacaagaactacaagaagctggagagaatcctgaccaagcagctgttcgagatcgacagcgtggacaccgagggcaagggcgacatccagcaggccagaaagagagccgcccaggagaccgagagactgctgaaggagctggagcagaacgccaaccacccccacagaatcgagatccagaacatcttcgaggaggcccagagcctggtgagagagaagatcgtgcccttctacaacggcggcaactgcgtgaccgacgagttcgaggagggcatccaggacatcatcctgagactgacccacgtgaagaccggcggcaagatcagcctgagaaaggccagataccacaccctgaccaagatctgcgccgtgcaggagatcatcgaggactgcatgaagaagcagcccagcctgcccctgagcgaggacgcccaccccagcgtggccaagatcaacttcgtgatgtgcgaggtgaacaaggccagaggcgtgctgatcgccctgctgatgggcgtgaacaacaacgagacctgcagacacctgagctgcgtgctgagcggcctgatcgccgacctggacgccctggacgtgtgcggcagaaccgagatcagaaactacagaagagaggtggtggaggacatcaacaagctgctgaagtacctggacctggaggaggaggccgacaccaccaaggccttcgacctgagacagaaccacagcatcctgaagatcgagaaggtgctgaagagaatgagagagatcaagaacgagctgctgcaggcccagaaccccagcgagctgtacctgagcagcaagaccgagctgcagggcctgatcggccagctggacgaggtgagcctggagaagaacccctgcatcagagaggccagaagaagagccgtgatcgaggtgcagaccctgatcacctacatcgacctgaaggaggccctggagaagagaaagctgttcgcctgcgaggagcaccccagccacaaggccgtgtggaacgtgctgggcaacctgagcgagatccagggcgaggtgctgagcttcgacggcaacagaaccgacaagaactacatcagactggaggagctgctgaccaagcagctgctggccctggacgccgtggacccccagggcgaggagaagtgcaaggccgccagaaagcaggccgtgagactggcccagaacatcctgagctacctggacctgaagagcgacgagtgggagtactag

SEQ ID NO: 9706 - DNA, 1476 bp, synthetic construct
  source 1..1476: mol_type = other DNA; note = Synthetic coding sequence
atggcccagagcggcggcgaggccagacccggccccaagaccgccgtgcagatcagagtggccatccaggaggccgaggacgtggacgagctggaggacgaggaggagggcgccgagaccagaggcgccggcgaccccgccagatacctgagccccggctggggcagcgccagcgaggaggagcccagcagaggccacagcggcaccaccgccagcggcggcgagaacgagagagaggacctggagcaggagtggaagccccccgacgaggagctgatcaagaagctggtggaccagatcgagttctacttcagcgacgagaacctggagaaggacgccttcctgctgaagcacgtgagaagaaacaagctgggctacgtgagcgtgaagctgctgaccagcttcaagaaggtgaagcacctgaccagagactggagaaccaccgcccacgccctgaagtacagcgtggtgctggagctgaacgaggaccacagaaaggtgagaagaaccacccccgtgcccctgttccccaacgagaacctgcccagcaagatgctgctggtgtacgacctgtacctgagccccaagctgtgggccctggccaccccccagaagaacggcagagtgcaggagaaggtgatggagcacctgctgaagctgttcggcaccttcggcgtgatcagcagcgtgagaatcctgaagcccggcagagagctgccccccgacatcagaagaatcagcagcagatacagccaggtgggcacccaggagtgcgccatcgtggagttcgaggaggtggaggccgccatcaaggcccacgagttcatgatcaccgagagccagggcaaggagaacatgaaggccgtgctgatcggcatgaagccccccaagaagaagcccgccaaggacaagaaccacgacgaggagcccaccgccagcatccacctgaacaagagcctgaacaagagagtggaggagctgcagtacatgggcgacgagagcagcgccaacagcagcagcgaccccgagagcaaccccaccagccccatggccggcagaagacacgccgccaccaacaagctgagccccagcggccaccagaacctgttcctgagccccaacgccagcccctgcaccagcccctggagcagccccctggcccagagaaagggcgtgagcagaaagagccccctggccgaggagggcagactgaactgcagcaccagccccgagatcttcagaaagtgcatggactacagcagcgacagcagcgtgacccccagcggcagcccctgggtgagaagaagaagacaggccgagatgggcacccaggagaagagccccggcaccagccccctgctgagcagaaagatgcagaccgccgacggcctgcccgtgggcgtgctgagactgcccagaggccccgacaacaccagaggcttccacggccacgagagaagcagagcctgcgtgtag

SEQ ID NO: 9707 - DNA, 315 bp, synthetic construct
  source 1..315: mol_type = other DNA; note = Synthetic coding sequence
atggccggcaaggcccacagactgagcgccgaggagagagaccagctgctgcccaacctgagagccgtgggctggaacgagctggagggcagagacgccatcttcaagcagttccacttcaaggacttcaacagagccttcggcttcatgaccagagtggccctgcaggccgagaagctggaccaccaccccgagtggttcaacgtgtacaacaaggtgcacatcaccctgagcacccacgagtgcgccggcctgagcgagagagacatcaacctggccagcttcatcgagcaggtggccgtgagcatgacctag

SEQ ID NO: 9708 - DNA, 738 bp, synthetic construct
  source 1..738: mol_type = other DNA; note = Synthetic coding sequence
atgatcggcgtgagcttcgaggaggccaagagcatcatcaccggcgccaagctgagcaccagactggagagcgcctgggagatcgccttcatcagacagaagagcgacaacatccagcccgagaacctgagctgcaccagcctgatcgaggccagcggcgagtacggcccccaggccagcaccctgagcctgttcagcagcccccccgagatcctgatccccaagaccagcagcacccccaagaccaacaacgacatcctgagcagctgcgagatcaagaccggctacaacaagaccgtgcagatccccatcaccagcgagaacagcaccgtgggcctgagcaacaccgacgtggccagcgcctggaccgagaactacggcctgcaggagaagatcagcctgaaccccagcgtgagattcaaggccgagaagctggagatggccctgaactacctgggcatccagcccaccaaggagcagcaccaggccctgagacagcaggtgcaggccgacagcaagggcaccgtgagcttcggcgacttcgtgcaggtggccagaaacctgttctgcctgcagctggacgaggtgaacgtgggcgcccacgagatcagcaacatcctggacagccagctgctgccctgcgacagcagcgaggccgacgagatggagagactgaagtgcgagagagacgacgccctgaaggaggtgaacaccctgaagtggcccggccagaactag

SEQ ID NO: 9709 - DNA, 849 bp, synthetic construct
  source 1..849: mol_type = other DNA; note = Synthetic coding sequence
atgggcggcgccgtgagcgccggcgaggacaacgacgagctgatcgacaacctgaaggaggcccagtacatcagaaccgagctggtggagcaggccttcagagccatcgacagagccgactactacctggaggagttcaaggagaacgcctacaaggacctggcctggaagcacggcaacatccacctgagcgccccctgcatctacagcgaggtgatggaggccctggacctgcagcccggcctgagcttcctgaacctgggcagcggcaccggctacctgagcagcatggtgggcctgatcctgggccccttcggcgtgaaccacggcgtggagctgcacagcgacgtgatcgagtacgccaagcagaagctggacttcttcatcagaaccagcgacagcttcgacaagttcgacttctgcgagcccagcttcgtgaccggcaactgcctggagatcagccccgactgcagccagtacgacagagtgtactgcggcgccggcgtgcagaaggagcacgaggagtacatgaagaacctgctgaaggtgggcggcatcctggtgatgcccctggaggagaagctgaccaagatcaccagaaccggccccagcgcctgggagaccaagaagatcctggccgtgagcttcgcccccctgatccagccctgccacagcgagagcggcaagagcagactggtgcagctgagaagccccagcttcgtgcagggctggagcgtggtggtgctgagccagctgaccgccgccagcaccttccaggccgaggccatcctgcccagccagagccccacctggctgaccctgcaggtgctggccaccatgcccaactag

SEQ ID NO: 9710 - DNA, 612 bp, synthetic construct
  source 1..612: mol_type = other DNA; note = Synthetic coding sequence
atggccagacccagacccagagagtacaaggccggcgacctggtgttcgccaagatgaagggctacccccactggcccgccagaatcgacgagctgcccgagggcgccgtgaagccccccgccaacaagtaccccatcttcttcttcggcacccacgagaccgccttcctgggccccaaggacctgttcccctacaaggagtacaaggacaagttcggcaagagcaacaagagaaagggcttcaacgagggcctgtgggagatcgagaacaaccccggcgtgaagttcaccggctaccaggccatccagcagcagagcagcagcgagaccgagggcgagggcggcaacaccgccgacgccagcagcgaggaggagggcgacagagtggaggaggacggcaagggcaagagaaagaacgagaaggccggcagcaagagaaagaagagctacaccagcaagaagagcagcaagcagagcagaaagagccccggcgacgaggacgacaaggactgcaaggaggaggagaacaagagcagcagcgagggcggcgacgccggcaacgacaccagaaacaccaccagcgacctgcagaagaccagcgagggcacctag

SEQ ID NO: 9711 - DNA, 540 bp, synthetic construct
  source 1..540: mol_type = other DNA; note = Synthetic coding sequence
atgaagacccccgtggagctggccgtgagcggcatgcagaccctgggcctgcagcacagatgcagaggcggctacagagtgaaggccagaaccagctacgtggacgagaccctgttcggcagccccgccggcaccagacccaccccccccgacttcgaccccccctgggtggagaaggccaacagaaccagaggcgtgggcaaggaggccagcaaggccctgggcgccaagggcagctgcgagaccacccccagcagaggcagcacccccaccctgacccccagaaagaagaacaagtacagacccatcagccacacccccagctactgcgacgagagcctgttcggcagcagaagcgagggcgccagcttcggcgcccccagaatggccaagggcgacgccgccaagctgagagccctgctgtggacccccccccccacccccagaggcagccacagccccagacccagagaggcccccccccccgtgccccccacccagatgggcctgagaatcagcggcctgcccagacagggctag

SEQ ID NO: 9712 - DNA, 1104 bp, synthetic construct
  source 1..1104: mol_type = other DNA; note = Synthetic coding sequence
atggacggcgaggacatccccgacttcagcagcctgaaggaggagaccgcctactggaaggagctgagcctgaagtacaagcagagcttccaggaggccagagacgagctggtggagttccaggagggcagcagagagctggaggccgagctggaggcccagctggtgcaggccgagcagagaaacagagacctgcaggccgacaaccagagactgaagtacgaggtggaggccctgaaggagaagctggagcaccagtacgcccagagctacaagcaggtgagcgtgctggaggacgacctgagccagaccagagccatcaaggagcagctgcacaagtacgtgagagagctggagcaggccaacgacgacctggagagagccaagagagccaccatcgtgagcctggaggacttcgagcagagactgaaccaggccatcgagagaaacgccttcctggagagcgagctggacgagaaggagagcctgctggtgagcgtgcagagactgaaggacgaggccagagacctgagacaggagctggccgtgagagagagacagcaggaggtgaccagaaagagcgcccccagcagccccaccctggactgcgagaagatggacagcgccgtgcaggccagcctgagcctgcccgccacccccgtgggcaagggcaccgagaacaccttccccagccccaaggccatccccaacggcttcggcaccagccccctgacccccagcgccagaatcagcgccctgaacatcgtgggcgacctgctgagaaaggtgggcgccctggagagcaagctggccgcctgcagaaacttcgccaaggaccaggccagcagaaagagctacatcagcggcaacgtgaactgcggcgtgctgaacggcaacggcaccaagttcagcagaagcggccacaccagcttcttcgacaagggcagcagcagcagctgcgccatcagagccagcagaagaagattcagcagcagcagcgccgacctggccggcagaggcggcggcgacggcagcatccccgcccagcacagcaccggcgccagcggcaaggcccccccccccaccctgctgctggagacctag

SEQ ID NO: 9713 - DNA, 591 bp, synthetic construct
  source 1..591: mol_type = other DNA; note = Synthetic coding sequence
atgggcagcagaagcagccacgccgccgtgatccccgacggcgacagcatcagaagagagaccggcttcagccaggccagcctgctgagactgcaccacagattcagagccctggacagaaacaagaagggctacctgagcagaatggacctgcagcagatcggcgccctggccgtgaaccccctgggcgacagaatcatcgagagcttcttccccgacggcagccagagagtggacttccccggcttcgtgagagtgctggcccacttcagacccgtggaggacgaggacaccgagacccaggaccccaagaagcccgagcccctgaacagcagaagaaacaagctgcactacgccttccagctgtacgacctggacagagacggcaagatcagcagacacgagatgctgcaggtgctgagactgatggtgggcgtgcaggtgaccgaggagcagctggagaacatcgccgacagaaccgtgcaggaggccgacgaggacggcgacggcgccgtgagcttcgtggagttcaccaagagcctggagaagatggacgtggagcagaagatgagcatcagaatcctgaagtag

SEQ ID NO: 9714 - DNA, 2313 bp, synthetic construct
  source 1..2313: mol_type = other DNA; note = Synthetic coding sequence
atgttcagatacgagagcctggaggactgccccctggacgaggacgaggacgccttccagggcctgggcgaggaggacgaggagatcgaccagttcaacgacgacaccttcggcagcggcgccgtggacgacgactggcaggaggcccacgagagactggccgagctggaggagaagctgcccgtggccgtgaacgagcagaccggcaacggcgagagagacgagatggacctgctgggcgaccacgaggagaacctggccgagagactgagcaagatggtgatcgagaacgagctggaggaccccgccatcatgagagccgtgcagaccagacccgtgctgcagccccagcccggcagcctgaacagcagcatctgggacggcagcgaggtgctgagaagaatcagaggccccctgctggcccaggagatgcccaccgtgagcgtgctggagtacgccctgccccagagacccccccagggccccgaggacgacagagacctgagcgagagagccctgcccagaagaagcaccagccccatcatcggcagcccccccgtgagagccgtgcccatcggcaccccccccaagcagatggccgtgcccagcttcacccagcagatcctgtgccccaagcccgtgcacgtgagaccccccatgccccccagataccccgccccctacggcgagagaatgagccccaaccagctgtgcagcgtgcccaacagcagcctgctgggccaccccttcccccccagcgtgccccccgtgctgagccccctgcagagagcccagctgctgggcggcgcccagctgcagcccggcagaatgagccccagccagttcgccagagtgcccggcttcgtgggcagccccctggccgccatgaaccccaagctgctgcagggcagagtgggccagatgctgccccccgcccccggcttcagagccttcttcagcgccccccccagcgccaccccccccccccagcagcacccccccggccccggcccccacctgcagaacctgagaagccaggcccccatgttcagacccgacaccacccacctgcacccccagcacagaagactgctgcaccagagacagcagcagaacagaagccagcacagaaacctgaacggcgccggcgacagaggcagccacagaagcagccaccaggaccacctgagaaaggacccctacgccaacctgatgctgcagagagagaaggactgggtgagcaagatccagatgatgcagctgcagagcaccgacccctacctggacgacttctactaccagaactacttcgagaagctggagaagctgagcgccgccgaggagatccagggcgacggccccaagaaggagagaaccaagctgatcaccccccaggtggccaagctggagcacgcctacaagcccgtgcagttcgagggcagcctgggcaagctgaccgtgagcagcgtgaacaaccccagaaagatgatcgacgccgtggtgaccagcagaagcgaggacgacgagaccaaggagaagcaggtgagagacaagagaagaaagaccctggtgatcatcgagaagacctacagcctgctgctggacgtggaggactacgagagaagatacctgctgagcctggaggaggagagacccgccctgatggacgacagaaagcacaagatctgcagcatgtacgacaacctgagaggcaagctgcccggccaggagagacccagcgacgaccacttcgtgcagatcatgtgcatcagaaagggcaagagaatggtggccagaatcctgcccttcctgagcaccgagcaggccgccgacatcctgatgaccaccgccagaaacctgcccttcctgatcaagaaggacgcccaggacgaggtgctgccctgcctgctgagccccttcagcctgctgctgtaccacctgcccagcgtgagcatcaccagcctgctgagacagctgatgaacctgccccagagcgccgccacccccgccctgagcaacccccacctgaccgccgtgctgcagaacaagttcggcctgagcctgctgctgatcctgctgagcagaggcgaggacctgcagagcagcgaccccgccaccgagagcacccagaacaaccagtggaccgaggtgatgttcatggccaccagagagctgctgagaatcccccaggccgccctggccaagcccatcagcatccccaccaacctggtgagcctgttcagcagatacgtggacagacagaagctgaacctgctggagaccaagctgcagctggtgcagggcatcagatag

SEQ ID NO: 9715 - DNA, 1518 bp, synthetic construct
  source 1..1518: mol_type = other DNA; note = Synthetic coding sequence
atgagactgagaagactggccctgttccccggcgtggccctgctgctggccgccgccagactggccgccgccagcgacgtgctggagctgaccgacgacaacttcgagagcagaatcagcgacaccggcagcgccggcctgatgctggtggagttcttcgccccctggtgcggccactgcaagagactggcccccgagtacgaggccgccgccaccagactgaagggcatcgtgcccctggccaaggtggactgcaccgccaacaccaacacctgcaacaagtacggcgtgagcggctaccccaccctgaagatcttcagagacggcgaggaggccggcgcctacgacggccccagaaccgccgacggcatcgtgagccacctgaagaagcaggccggccccgccagcgtgcccctgagaaccgaggaggagttcaagaagttcatcagcgacaaggacgccagcatcgtgggcttcttcgacgacagcttcagcgaggcccacagcgagttcctgaaggccgccagcaacctgagagacaactacagattcgcccacaccaacgtggagagcctggtgaacgagtacgacgacaacggcgagggcatcatcctgttcagacccagccacctgaccaacaagttcgaggacaagaccgtggcctacaccgagcagaagatgaccagcggcaagatcaagaagttcatccaggagaacatcttcggcatctgcccccacatgaccgaggacaacaaggacctgatccagggcaaggacctgctgatcgcctactacgacgtggactacgagaagaacgccaagggcagcaactactggagaaacagagtgatgatggtggccaagaagttcctggacgccggccacaagctgaacttcgccgtggccagcagaaagaccttcagccacgagctgagcgacttcggcctggagagcaccgccggcgagatccccgtggtggccatcagaaccgccaagggcgagaagttcgtgatgcaggaggagttcagcagagacggcaaggccctggagagattcctgcaggactacttcgacggcaacctgaagagatacctgaagagcgagcccatccccgagagcaacgacggccccgtgaaggtggtggtggccgagaacttcgacgagatcgtgaacaacgagaacaaggacgtgctgatcgagttctacgccccctggtgcggccactgcaagaacctggagcccaagtacaaggagctgggcgagaagctgagcaaggaccccaacatcgtgatcgccaagatggacgccaccgccaacgacgtgcccagcccctacgaggtgagaggcttccccaccatctacttcagccccgccaacaagaagctgaaccccaagaagtacgagggcggcagagagctgagcgacttcatcagctacctgcagagagaggccaccaacccccccgtgatccaggaggagaagcccaagaagaagaagaaggcccaggaggacctgtag

SEQ ID NO: 9716 - DNA, 684 bp, synthetic construct
  source 1..684: mol_type = other DNA; note = Synthetic coding sequence
atgagcgtggtgccccccaacagaagccagaccggctggcccagaggcgtgacccagttcggcaacaagtacatccagcagaccaagcccctgaccctggagagaaccatcaacctgtaccccctgaccaactacaccttcggcaccaaggagcccctgtacgagaaggacagcagcgtggccgccagattccagagaatgagagaggagttcgacaagatcggcatgagaagaaccgtggagggcgtgctgatcgtgcacgagcacagactgccccacgtgctgctgctgcagctgggcaccaccttcttcaagctgcccggcggcgagctgaaccccggcgaggacgaggtggagggcctgaagagactgatgaccgagatcctgggcagacaggacggcgtgctgcaggactgggtgatcgacgactgcatcggcaactggtggagacccaacttcgagcccccccagtacccctacatccccgcccacatcaccaagcccaaggagcacaagaagctgttcctggtgcagctgcaggagaaggccctgttcgccgtgcccaagaactacaagctggtggccgcccccctgttcgagctgtacgacaacgcccccggctacggccccatcatcagcagcctgccccagctgctgagcagattcaacttcatctacaactag

SEQ ID NO: 9717 - DNA, 2244 bp, synthetic construct
  source 1..2244: mol_type = other DNA; note = Synthetic coding sequence
atgagccaggtgaagagcagctacagctacgacgcccccagcgacttcatcaacttcagcagcctggacgacgagggcgacacccagaacatcgacagctggttcgaggagaaggccaacctggagaacaagctgctgggcaagaacggcaccggcggcctgttccagggcaagacccccctgagaaaggccaacctgcagcaggccatcgtgacccccctgaagcccgtggacaacacctactacaaggaggccgagaaggagaacctggtggagcagagcatccccagcaacgcctgcagcagcctggaggtggaggccgccatcagcagaaagacccccgcccagccccagagaagaagcctgagactgagcgcccagaaggacctggagcagaaggagaagcaccacgtgaagatgaaggccaagagatgcgccacccccgtgatcatcgacgagatcctgcccagcaagaagatgaaggtgagcaacaacaagaagaagcccgaggaggagggcagcgcccaccaggacaccgccgagaagaacgccagcagccccgagaaggccaagggcagacacaccgtgccctgcatgccccccgccaagcagaagttcctgaagagcaccgaggagcaggagctggagaagagcatgaagatgcagcaggaggtggtggagatgagaaagaagaacgaggagttcaagaagctggccctggccggcatcggccagcccgtgaagaagagcgtgagccaggtgaccaagagcgtggacttccacttcagaaccgacgagagaatcaagcagcaccccaagaaccaggaggagtacaaggaggtgaacttcaccagcgagctgagaaagcaccccagcagccccgccagagtgaccaagggctgcaccatcgtgaagcccttcaacctgagccagggcaagaagagaaccttcgacgagaccgtgagcacctacgtgcccctggcccagcaggtggaggacttccacaagagaacccccaacagataccacctgagaagcaagaaggacgacatcaacctgctgcccagcaagagcagcgtgaccaagatctgcagagacccccagacccccgtgctgcagaccaagcacagagccagagccgtgacctgcaagagcaccgccgagctggaggccgaggagctggagaagctgcagcagtacaagttcaaggccagagagctggaccccagaatcctggagggcggccccatcctgcccaagaagccccccgtgaagccccccaccgagcccatcggcttcgacctggagatcgagaagagaatccaggagagagagagcaagaagaagaccgaggacgagcacttcgagttccacagcagaccctgccccaccaagatcctggaggacgtggtgggcgtgcccgagaagaaggtgctgcccatcaccgtgcccaagagccccgccttcgccctgaagaacagaatcagaatgcccaccaaggaggacgaggaggaggacgagcccgtggtgatcaaggcccagcccgtgccccactacggcgtgcccttcaagccccagatccccgaggccagaaccgtggagatctgccccttcagcttcgacagcagagacaaggagagacagctgcagaaggagaagaagatcaaggagctgcagaagggcgaggtgcccaagttcaaggccctgcccctgccccacttcgacaccatcaacctgcccgagaagaaggtgaagaacgtgacccagatcgagcccttctgcctggagaccgacagaagaggcgccctgaaggcccagacctggaagcaccagctggaggaggagctgagacagcagaaggaggccgcctgcttcaaggccagacccaacaccgtgatcagccaggagcccttcgtgcccaagaaggagaagaagagcgtggccgagggcctgagcggcagcctggtgcaggagcccttccagctggccaccgagaagagagccaaggagagacaggagctggagaagagaatggccgaggtggaggcccagaaggcccagcagctggaggaggccagactgcaggaggaggagcagaagaaggaggagctggccagactgagaagagagctggtgcacaaggccaaccccatcagaaagtaccagggcctggagatcaagagcagcgaccagcccctgaccgtgcccgtgagccccaagttcagcaccagattccactgctag

SEQ ID NO: 9718 - DNA, 360 bp, synthetic construct
  source 1..360: mol_type = other DNA; note = Synthetic coding sequence
atgaagctggtgagattcctgatgaagctgagccacgagaccgtgaccatcgagctgaagaacggcacccaggtgcacggcaccatcaccggcgtggacgtgagcatgaacacccacctgaaggccgtgaagatgaccctgaagaacagagagcccgtgcagctggagaccctgagcatcagaggcaacaacatcagatacttcatcctgcccgacagcctgcccctggacaccctgctggtggacgtggagcccaaggtgaagagcaagaagagagaggccgtggccggcagaggcagaggcagaggcagaggcagaggcagaggcagaggcagaggcagaggcggccccagaagatag

SEQ ID NO: 9719 - DNA, 555 bp, synthetic construct
  source 1..555: mol_type = other DNA; note = Synthetic coding sequence
atgatgggcgccagcaccctgcaggagcccgccctgagccccggcagatgccccagacagcccctgagaagcaagttcggccaccagggcagcaccgtgcagagaaagtgcagcaagaccaacgccctgaacgtgagccagaagatgatcgagatgttcgtgagaaccaagcacaagatcgacaagagccacgagttcgccctggtggtggtgaacgacgacaccgcctggctgagcggcctgaccagcgaccccagagagctgtgcagctgcctgtacgacctggagaccgccagctgcagcaccttcaacatcagcggcgccagccccgccagacagcagaagaccgagctgcccgtgaccgagaacgtgcagaccatcccccccccctacgtggtgagaaccatcctggtgtacagcagacccccctgccagccccagttcagcctgaccgagcccatgaagaagatgttccagtgcccctacttcttcttcgacgtggtgtacatccacaacggcaccgaggagaaggaggaggagatgagctggaagtag

SEQ ID NO: 9720 - DNA, 1203 bp, synthetic construct
  source 1..1203: mol_type = other DNA; note = Synthetic coding sequence
atggccagcgagaagcccctggccgccgtgacctgcaccgcccccgtgaacatcgccgtgatcaagtactggggcaagagagacgaggagctggtgctgcccatcaacagcagcctgagcgtgaccctgcaccaggaccagctgaagaccaccaccaccgccgtgatcagcaaggacttcaccgaggacagaatctggctgaacggcagagaggaggacgtgggccagcccagactgcaggcctgcctgagagagatcagatgcctggccagaaagagaagaaacagcagagacggcgaccccctgcccagcagcctgagctgcaaggtgcacgtggccagcgtgaacaacttccccaccgccgccggcctggccagcagcgccgccggctacgcctgcctggcctacaccctggccagagtgtacggcgtggagagcgacctgagcgaggtggccagaagaggcagcggcagcgcctgcagaagcctgtacggcggcttcgtggagtggcagatgggcgagcaggccgacggcaaggacagcatcgccagacaggtggcccccgagagccactggcccgagctgagagtgctgatcctggtggtgagcgccgagaagaagctgaccggcagcaccgtgggcatgagagccagcgtggagaccagccccctgctgagattcagagccgagagcgtggtgcccgccagaatggccgagatggccagatgcatcagagagagagacttccccagcttcgcccagctgaccatgaaggacagcaaccagttccacgccacctgcctggacaccttcccccccatcagctacctgaacgccatcagctggagaatcatccacctggtgcacagattcaacgcccaccacggcgacaccaaggtggcctacaccttcgacgccggccccaacgccgtgatcttcaccctggacgacaccgtggccgagttcgtggccgccgtgtggcacggcttcccccccggcagcaacggcgacaccttcctgaagggcctgcaggtgagacccgcccccctgagcgccgagctgcaggccgccctggccatggagcccacccccggcggcgtgaagtacatcatcgtgacccaggtgggccccggcccccagatcctggacgacccctgcgcccacctgctgggccccgacggcctgcccaagcccgccgcctag

SEQ ID NO: 9721 - DNA, 1350 bp, synthetic construct
  source 1..1350: mol_type = other DNA; note = Synthetic coding sequence
atgagagagtgcatcagcatccacgtgggccaggccggcgtgcagatcggcaacgcctgctgggagctgtactgcctggagcacggcatccagcccgacggccagatgcccagcgacaagaccatcggcggcggcgacgacagcttcaacaccttcttcagcgagaccggcgccggcaagcacgtgcccagagccgtgttcgtggacctggagcccaccgtgatcgacgaggtgagaaccggcacctacagacagctgttccaccccgagcagctgatcaccggcaaggaggacgccgccaacaactacgccagaggccactacaccatcggcaaggagatcatcgacctggtgctggacagaatcagaaagctggccgaccagtgcaccggcctgcagggcttcctggtgttccacagcttcggcggcggcaccggcagcggcttcaccagcctgctgatggagagactgagcgtggactacggcaagaagagcaagctggagttcagcatctaccccgccccccaggtgagcaccgccgtggtggagccctacaacagcatcctgaccacccacaccaccctggagcacagcgactgcgccttcatggtggacaacgaggccatctacgacatctgcagaagaaacctggacatcgagagacccacctacaccaacctgaacagactgatcagccagatcgtgagcagcatcaccgccagcctgagattcgacggcgccctgaacgtggacctgaccgagttccagaccaacctggtgccctaccccagaatccacttccccctggccacctacgcccccgtgatcagcgccgagaaggcctaccacgagcagctgaccgtggccgagatcaccaacgcctgcttcgagcccgccaaccagatggtgaagtgcgaccccagacacggcaagtacatggcctgctgcctgctgtacagaggcgacgtggtgcccaaggacgtgaacgccgccatcgccaccatcaagaccaagagaaccatccagttcgtggactggtgccccaccggcttcaaggtgggcatcaactaccagccccccaccgtggtgcccggcggcgacctggccaaggtgcagagagccgtgtgcatgctgagcaacaccaccgccgtggccgaggcctgggccagactggaccacaagttcgacctgatgtacgccaagagagccttcgtgcactggtacgtgggcgagggcatggaggagggcgagttcagcgaggccagagaggacatggccgccctggagaaggactacgaggaggtgggcgccgacagcgccgacggcgaggacgagggcgaggagtactag

SEQ ID NO: 9722 - DNA, 1365 bp, synthetic construct
  source 1..1365: mol_type = other DNA; note = Synthetic coding sequence
atgagcaccttcagacaggaggacgtggaggaccactacgagatgggcgaggagctgggcagcggccagttcgccatcgtgagaaagtgcagacagaagggcaccggcaaggagtacgccgccaagttcatcaagaagagaagactgagcagcagcagaagaggcgtgagcagagaggagatcgagagagaggtgaacatcctgagagagatcagacaccccaacatcatcaccctgcacgacatcttcgagaacaagaccgacgtggtgctgatcctggagctggtgagcggcggcgagctgttcgacttcctggccgagaaggagagcctgaccgaggacgaggccacccagttcctgaagcagatcctggacggcgtgcactacctgcacagcaagagaatcgcccacttcgacctgaagcccgagaacatcatgctgctggacaagaacgtgcccaaccccagaatcaagctgatcgacttcggcatcgcccacaagatcgaggccggcaacgagttcaagaacatcttcggcacccccgagttcgtggcccccgagatcgtgaactacgagcccctgggcctggaggccgacatgtggagcatcggcgtgatcacctacatcctgctgagcggcgccagccccttcctgggcgagaccaagcaggagaccctgaccaacatcagcgccgtgaactacgacttcgacgaggagtacttcagcaacaccagcgagctggccaaggacttcatcagaagactgctggtgaaggaccccaagagaagaatgaccatcgcccagagcctggagcacagctggatcaaggccatcagaagaagaaacgtgagaggcgaggacagcggcagaaagcccgagagaagaagactgaagaccaccagactgaaggagtacaccatcaagagccacagcagcctgccccccaacaacagctacgccgacttcgagagattcagcaaggtgctggaggaggccgccgccgccgaggagggcctgagagagctgcagagaagcagaagactgtgccacgaggacgtggaggccctggccgccatctacgaggagaaggaggcctggtacagagaggagagcgacagcctgggccaggacctgagaagactgagacaggagctgctgaagaccgaggccctgaagagacaggcccaggaggaggccaagggcgccctgctgggcaccagcggcctgaagagaagattcagcagactggagaacagatacgaggccctggccaagcaggtggccagcgagatgagattcgtgcaggacctggtgagagccctggagcaggagaagctgcagggcgtggagtgcggcctgagatag

SEQ ID NO: 9723 - DNA, 1326 bp, synthetic construct
  source 1..1326: mol_type = other DNA; note = Synthetic coding sequence
atgaagaagttcttccaggagttcaaggccgacatcaagttcaagagcgccggccccggccagaagctgaaggagagcgtgggcgagaaggcccacaaggagaagcccaaccagcccgcccccagaccccccagacagggccccaccaacgaggcccagatggccgccgccgccgccctggccagactggagcagaagcagagcagagcctggggccccaccagccaggacaccatcagaaaccaggtgagaaaggagctgcaggccgaggccaccgtgagcggcagccccgaggcccccggcaccaacgtggtgagcgagcccagagaggagggcagcgcccacctggccgtgcccggcgtgtacttcacctgccccctgaccggcgccaccctgagaaaggaccagagagacgcctgcatcaaggaggccatcctgctgcacttcagcaccgaccccgtggccgccagcatcatgaagatctacaccttcaacaaggaccaggacagagtgaagctgggcgtggacaccatcgccaagtacctggacaacatccacctgcaccccgaggaggagaagtacagaaagatcaagctgcagaacaaggtgttccaggagagaatcaactgcctggagggcacccacgagttcttcgaggccatcggcttccagaaggtgctgctgcccgcccaggaccaggaggaccccgaggagttctacgtgctgagcgagaccaccctggcccagccccagagcctggagagacacaaggagcagctgctggccgccgagcccgtgagagccaagctggacagacagagaagagtgttccagcccagccccctggccagccagttcgagctgcccggcgacttcttcaacctgaccgccgaggagatcaagagagagcagagactgagaagcgaggccgtggagagactgagcgtgctgagaaccaaggccatgagagagaaggaggagcagagaggcctgagaaagtacaactacaccctgctgagagtgagactgcccgacggctgcctgctgcagggcaccttctacgccagagagagactgggcgccgtgtacggcttcgtgagagaggccctgcagagcgactggctgcccttcgagctgctggccagcggcggccagaagctgagcgaggacgagaacctggccctgaacgagtgcggcctggtgcccagcgccctgctgaccttcagctgggacatggccgtgctggaggacatcaaggccgccggcgccgagcccgacagcatcctgaagcccgagctgctgagcgccatcgagaagctgctgtag

SEQ ID NO: 9724 - DNA, 900 bp, synthetic construct
  source 1..900: mol_type = other DNA; note = Synthetic coding sequence
atgagagacctgctgctgcactggggccccggcccccccatcagagccccccaggaggaggccgaggccctgctggagctgcagggcagactgcaggaggcccaggacaccaccgaggccctgagagcccagctgggcgtgcaggaggtgcagctgcagggcctgcagggcgccctgcagcagctgcagcaggagaccgagcagaactgcagaagagagctgcagcagatgcacggccagctggccggcctgagagccagaatggccagcctgagacagggctgcggcgacctgagaggcctggtgagcaccttcacccagagctgccagggcagcctgagcgaggccagaggccaggtgagctgggccctgggcgccctgagcagcggcggccccggcacccagctgcccgagggccagcagggcccccccgccggctgccccggcagactgcccgagctgaagggcaacatcagagtgctgtgcagactgagacccggcaccagcagcagcctggtgagcgtggagcccggccccggcggcaccgtgaccacctgctacagaggcagacacagaagattcagactggactgggtgttcccccccgacgccagccaggaggaggtgttcagagagctggagcccgccgtgctgagctgcctgagaggctacagcgtgtgcatcttcacctacggccagaccggcaccggcaagacctacagcatggagggcccccccgaggaccccggcatcgtgcccagagccctgcagagcctgttcagagagatgggcgccggcagacagcacagaagataccacggcagatgcctgagccccgccgagagccccgagcaccccagacccggcctgcccccctgcagagccagaagccccctgtag

SEQ ID NO: 9725 - DNA, 2517 bp, synthetic construct
  source 1..2517: mol_type = other DNA; note = Synthetic coding sequence
atgtacgccttctacagcctgctgatctacatcttctacagcctgttcagaagagacggcggcgccgccgccgccgccgagcccggcgaccccgcccagagagccagaaagcccagaggcagaagaagacccgacctgcccgcccccgagctgtggaccgagctgaccggcctggccgccagcagcgagcccgaggacggcagcgagggcgccgccgagggcagagccgccgccgtgagcctggaggaggccctgctgagactggccgagttcctgagcgtgcagctgggcgccgaggagagctgcggcggccccgccgacctgggccagagcggcgaggtgcccagcctgctgaccgtgaccagccagctgctggccctgctggcctggctgagaagccccagaggcagacaggccctgctgcagggcacccagcccgcccccagagtgagaccccccagccccgacggcagcaccagccaggaggagagccccagccacttcaccgccgtgcccggcgagcccctgggcgacgagacccagggccagcagcccctgcagctggaggaggaccagagagcctggcagagactggagcagctgatcctgggccagctggaggagctgaagcagcagctggagcagcaggaggaggagctgggcagactgagactgggcgtgggcgccaccgacagcgagaagagagtgcagcacctgaccctggagaacgaggccctgaagcagagcctgagcctgatgagagacctgctgctgcactggggccccggcccccccatcagagccccccaggaggaggccgaggccctgctggagctgcagggcagactgcaggaggcccaggacaccaccgaggccctgagagcccagctgggcgtgcaggaggtgcagctgcagggcctgcagggcgccctgcagcagctgcagcaggagaccgagcagaactgcagaagagagctgcagcagatgcacggccagctggccggcctgagagccagaatggccagcctgagacagggctgcggcgacctgagaggcctggtgagcaccttcacccagagctgccagggcagcctgagcgaggccagaggccaggtgagctgggccctgggcgccctgagcagcggcggccccggcacccagctgcccgagggccagcagggcccccccgccggctgccccggcagactgcccgagctgaagggcaacatcagagtgctgtgcagactgagacccggcaccagcagcagcctggtgagcgtggagcccggccccggcggcaccgtgaccacctgctacagaggcagacacagaagattcagactggactgggtgttcccccccgacgccagccaggaggaggtgttcagagagctggagcccgccgtgctgagctgcctgagaggctacagcgtgtgcatcttcacctacggccagaccggcaccggcaagacctacagcatggagggcccccccgaggaccccggcatcgtgcccagagccctgcagagcctgttcagagagatgggcgccggcagacagcacagagtgaccctgagcatggtggagatctacaacgaggccgtgagagacctgctggcccccggcccccccgagagactggccgtgagacagggccccgagggccagggcggcatccaggtggccggcctgacccactgggacgtgcccaacctggagaccctgcaccagatgctgaagctgggcagaagcaacagagccaccgccgccaccgccatgaaccagagaagcagcagaagccacgccctggtgaccctgaccctgagagccgccagcccccccagagcccccggcaccgccggcaccctgcacctggtggacctggccggcagcgagagagccagaaaggccggcgccgccggcccccccagaggcgaccccgacggcgccagaagactgagagaggcccagaccatcaacagaagcctgctggccctgggcggcgtgatggccgccctgagagcccacagaccccacgtgcccttcagagacagccagctgaccagactgctgcagcccgccctgggccccggcaccaccgccgtgctgctgctgcaggtgggcgccggcgccggccaggtgtgcgcctgcagaagcccccccaccagagccagaccccccgcccccctggccagaagaagccccagaggcagaagaatcagcggcagacagagcgcccccagcagcagccccaccgagtgggtgaagtggagctggggccagcccggcgccgccggcagcagagccccccccggcagactgctgcccagcgcccccaccctgagaagccccggcccccccgcccccctgagaagacccctggccgtgctgcacgcccccgtgcccaccaccgccagagccagactgagcagaccccagagagcctgccccagcagccccggcagcagaccctgcccctggggcctgagacccggcctgtgctggcagagaagatag

SEQ ID NO: 9726 - DNA, 597 bp, synthetic construct
  source 1..597: mol_type = other DNA; note = Synthetic coding sequence
atggccagcggcaacgccagaatcggcaagcccgcccccgacttcaaggccaccgccgtggtggacggcgccttcaaggaggtgaagctgagcgactacaagggcaagtacgtggtgctgttcttctaccccctggacttcaccttcgtgtgccccaccgagatcatcgccttcagcaacagagccgaggacttcagaaagctgggctgcgaggtgctgggcgtgagcgtggacagccagttcacccacctggcctggatcaacacccccagaaaggagggcggcctgggccccctgaacatccccctgctggccgacgtgaccagaagactgagcgaggactacggcgtgctgaagaccgacgagggcatcgcctacagaggcctgttcatcatcgacggcaagggcgtgctgagacagatcaccgtgaacgacctgcccgtgggcagaagcgtggacgaggccctgagactggtgcaggccttccagtacaccgacgagcacggcgaggtgtgccccgccggctggaagcccggcagcgacaccatcaagcccaacgtggacgacagcaaggagtacttcagcaagcacaactag

SEQ ID NO: 9727 - DNA, 1380 bp, synthetic construct
  source 1..1380: mol_type = other DNA; note = Synthetic coding sequence
atgagcgtgagattcagcagcaccagcagaagactgggcagctgcggcggcaccggcagcgtgagactgagcagcggcggcgccggcttcggcgccggcaacacctgcggcgtgcccggcatcggcagcggcttcagctgcgccttcggcggcagcagcagcgccggcggctacggcggcggcctgggcggcggcagcgccagctgcgccgccttcaccggcaacgagcacggcctgctgagcggcaacgagaaggtgaccatgcagaacctgaacgacagactggccagctacctggagaacgtgagagccctggaggaggccaacgccgacctggagcagaagatcaagggctggtacgagaagttcggccccggcagctgcagaggcctggaccacgactacagcagatacttccccatcatcgacgagctgaagaaccagatcatcagcgccaccaccagcaacgcccacgtggtgctgcagaacgacaacgccagactgaccgccgacgacttcagactgaagttcgagaacgagctggccctgcaccagagcgtggaggccgacatcaacggcctgagaagagtgctggacgagctgaccctgtgcagaaccgacctggagatccagctggagaccctgagcgaggagctggcctacctgaagaagaaccacgaggaggagatgaaggccctgcagtgcgccgccggcggcaacgtgaacgtggagatgaacgccgcccccggcgtggacctgaccgtgctgctgaacaacatgagagccgagtacgaggccctggccgagcagaacagaagagacgccgaggcctggttcaacgagaagagcgccagcctgcagcagcagatcagcgacgacgccggcgccaccaccagcgccagaaacgagctgatcgagatgaagagaaccctgcagaccctggagatcgagctgcagagcctgctggccaccaagcacagcctggagtgcagcctgaccgagaccgagagcaactactgcgcccagctggcccagatccaggcccagatcggcgccctggaggagcagctgcaccaggtgagaaccgagaccgagggccagaagctggagtacgagcagctgctggacatcaaggtgcacctggagaaggagatcgagacctactgcctgctgatcgacggcgaggacggcagctgcagcaagagcaagggctacggcggccccggcaaccagaccaaggacagcagcaagaccaccatcgtgaagaccgtggtggaggagatcgaccccagaggcaaggtgctgagcagcagagtgcacaccgtggaggagaagagcaccaaggtgaacaacaagaacgagcagagagtgagcagctag

SEQ ID NO: 9728 - DNA, 834 bp, synthetic construct
  source 1..834: mol_type = other DNA; note = Synthetic coding sequence
atgcccagcgtgagcaaggccgccgccgccgccctgagcggcagccccccccagaccgagaagcccacccactacagatacctgaaggagttcagaaccgagcagtgccccctgttcagccagcacaagtgcgcccagcacagacccttcacctgcttccactggcacttcctgaaccagagaagaagaagacccctgagaagaagagacggcaccttcaactacagccccgacgtgtactgcagcaagtacaacgaggccaccggcgtgtgccccgacggcgacgagtgcccctacctgcacagaaccaccggcgacaccgagagaaagtaccacctgagatactacaagaccggcacctgcatccacgagaccgacgccagaggccactgcgtgaagaacggcctgcactgcgccttcgcccacggccccctggacctgagaccccccgtgtgcgacgtgagagagctgcaggcccaggaggccctgcagaacggccagctgggcggcggcgagggcgtgcccgacctgcagcccggcgtgctggccagccaggccatgatcgagaagatcctgagcgaggaccccagatggcaggacgccaacttcgtgctgggcagctacaagaccgagcagtgccccaagccccccagactgtgcagacagggctacgcctgcccccactaccacaacagcagagacagaagaagaaaccccagaagattccagtacagctggcagctgggcagaagagtgctgagactgagccccagagccaacaaccccagagtggccctgcccagagtgcacaccggccccagcagcaccgcctag

SEQ ID NO: 9729 - DNA, 918 bp, synthetic construct
  source 1..918: mol_type = other DNA; note = Synthetic coding sequence
atggacctgagcggcgtgaagaagaagagcctgctgggcgtgaaggagaacaacaagaagagcagcaccagagcccccagccccaccaagagaaaggacagaagcgacgagaagagcaaggacagaagcaaggacaagggcgccaccaaggagagcagcgagaaggacagaggcagagacaagaccagaaagagaagaagcgccagcagcggcagcagcagcaccagaagcagaagcagcagcaccagcagcagcggcagcagcaccagcaccggcagcagcagcggcagcagcagcagcagcgccagcagcagaagcggcagcagcagcaccagcagaagcagcagcagcagcagcagcagcggcagccccagccccagcagaagaagacacgacaacagaagaagaagcagaagcaagagcaagccccccaagagagacgagaaggagagaaagagaagaagccccagccccaagcccaccaaggtgcacatcggcagactgaccagaaacgtgaccaaggaccacatcatggagatcttcagcacctacggcaagatcaagatgatcgacatgcccgtggagagaatgcacccccacctgagcaagggctacgcctacgtggagttcgagaaccccgacgaggccgagaaggccctgaagcacatggacggcggccagatcgacggccaggagatcaccgccaccgccgtgctggccccctggcccagacccccccccagaagattcagcccccccagaagaatgctgccccccccccccatgtggagaagaagcccccccagaatgagaagaagaagcagaagccccagaagaagaagccccgtgagaagaagaagcagaagccccggcagaagaagacacagaagcagaagcagcagcaacagcagcagatag

SEQ ID NO: 9730 - DNA, 3198 bp, synthetic construct
  source 1..3198: mol_type = other DNA; note = Synthetic coding sequence
atgagaaagcaggaggtgagaaccggcagagaggccggccagggccacggcaccggcagccccgccgagcaggtgaaggccctgatggacctgctggccggcaagggcagccagggcagccaggccccccaggccctggacagaacccccgacgcccccctgggcccctgcagcaacgacagcagaatccagagacacagaaaggccctgctgagcaaggtgggcggcggccccgagctgggcggcccctggcacagactggccagcctgctgctggtggagggcctgaccgacctgcagctgagagagcacgacttcacccaggtggaggccaccagaggcggcggccaccccgccagaaccgtggccctggacagactgttcctgcccctgagcagagtgagcgtgccccccagagtgagcatcaccatcggcgtggccggcatgggcaagaccaccctggtgagacacttcgtgagactgtgggcccacggccaggtgggcaaggacttcagcctggtgctgcccctgaccttcagagacctgaacacccacgagaagctgtgcgccgacagactgatctgcagcgtgttcccccacgtgggcgagcccagcctggccgtggccgtgcccgccagagccctgctgatcctggacggcctggacgagtgcagaacccccctggacttcagcaacaccgtggcctgcaccgaccccaagaaggagatccccgtggaccacctgatcaccaacatcatcagaggcaacctgttccccgaggtgagcatctggatcaccagcagacccagcgccagcggccagatccccggcggcctggtggacagaatgaccgagatcagaggcttcaacgaggaggagatcaaggtgtgcctggagcagatgttccccgaggaccaggccctgctgggctggatgctgagccaggtgcaggccgacagagccctgtacctgatgtgcaccgtgcccgccttctgcagactgaccggcatggccctgggccacctgtggagaagcagaaccggcccccaggacgccgagctgtggccccccagaaccctgtgcgagctgtacagctggtacttcagaatggccctgagcggcgagggccaggagaagggcaaggccagccccagaatcgagcaggtggcccacggcggcagaaagatggtgggcaccctgggcagactggccttccacggcctgctgaagaagaagtacgtgttctacgagcaggacatgaaggccttcggcgtggacctggccctgctgcagggcgccccctgcagctgcttcctgcagagagaggagaccctggccagcagcgtggcctactgcttcacccacctgagcctgcaggagttcgtggccgccgcctactactacggcgccagcagaagagccatcttcgacctgttcaccgagagcggcgtgagctggcccagactgggcttcctgacccacttcagaagcgccgcccagagagccatgcaggccgaggacggcagactggacgtgttcctgagattcctgagcggcctgctgagccccagagtgaacgccctgctggccggcagcctgctggcccagggcgagcaccaggcctacagaacccaggtggccgagctgctgcagggctgcctgagacccgacgccgccgtgtgcgccagagccatcaacgtgctgcactgcctgcacgagctgcagcacaccgagctggccagaagcgtggaggaggccatggagagcggcgccctggccagactgaccggccccgcccacagagccgccctggcctacctgctgcaggtgagcgacgcctgcgcccaggaggccaacctgagcctgagcctgagccagggcgtgctgcagagcctgctgccccagctgctgtactgcagaaagctgagactggacaccaaccagttccaggaccccgtgatggagctgctgggcagcgtgctgagcggcaaggactgcagaatccagaagatcagcctggccgagaaccagatcagcaacaagggcgccaaggccctggccagaagcctgctggtgaacagaagcctgaccagcctggacctgagaggcaacagcatcggcccccagggcgccaaggccctggccgacgccctgaagatcaacagaaccctgaccagcctgagcctgcagggcaacaccgtgagagacgacggcgccagaagcatggccgaggccctggccagcaacagaaccctgagcatgctgcacctgcagaagaacagcatcggccccatgggcgcccagagaatggccgacgccctgaagcagaacagaagcctgaaggagctgatgttcagcagcaacagcatcggcgacggcggcgccaaggccctggccgaggccctgaaggtgaaccagggcctggagagcctggacctgcagagcaacagcatcagcgacgccggcgtggccgccctgatgggcgccctgtgcaccaaccagaccctgctgagcctgagcctgagagagaacagcatcagccccgagggcgcccaggccatcgcccacgccctgtgcgccaacagcaccctgaagaacctggacctgaccgccaacctgctgcacgaccagggcgccagagccatcgccgtggccgtgagagagaacagaaccctgaccagcctgcacctgcagtggaacttcatccaggccggcgccgcccaggccctgggccaggccctgcagctgaacagaagcctgaccagcctggacctgcaggagaacgccatcggcgacgacggcgcctgcgccgtggccagagccctgaaggtgaacaccgccctgaccgccctgtacctgcaggtggccagcatcggcgccagcggcgcccaggtgctgggcgaggccctggccgtgaacagaaccctggagatcctggacctgagaggcaacgccatcggcgtggccggcgccaaggccctggccaacgccctgaaggtgaacagcagcctgagaagactgaacctgcaggagaacagcctgggcatggacggcgccatctgcatcgccaccgccctgagcggcaaccacagactgcagcacatcaacctgcagggcaaccacatcggcgacagcggcgccagaatgatcagcgaggccatcaagaccaacgcccccacctgcaccgtggagatgtag

SEQ ID NO: 9731 - DNA, 927 bp, synthetic construct
  source 1..927: mol_type = other DNA; note = Synthetic coding sequence
atgaaccccatcgtggtggtgcacggcggcggcgccggccccatcagcaaggacagaaaggagagagtgcaccagggcatggtgagagccgccaccgtgggctacggcatcctgagagagggcggcagcgccgtggacgccgtggagggcgccgtggtggccctggaggacgaccccgagttcaacgccggctgcggcagcgtgctgaacaccaacggcgaggtggagatggacgccagcatcatggacggcaaggacctgagcgccggcgccgtgagcgccgtgcagtgcatcgccaaccccatcaagctggccagactggtgatggagaagaccccccactgcttcctgaccgaccagggcgccgcccagttcgccgccgccatgggcgtgcccgagatccccggcgagaagctggtgaccgagagaaacaagaagagactggagaaggagaagcacgagaagggcgcccagaagaccgactgccagaagaacctgggcaccgtgggcgccgtggccctggactgcaagggcaacgtggcctacgccaccagcaccggcggcatcgtgaacaagatggtgggcagagtgggcgacagcccctgcctgggcgccggcggctacgccgacaacgacatcggcgccgtgagcaccaccggccacggcgagagcatcctgaaggtgaacctggccagactgaccctgttccacatcgagcagggcaagaccgtggaggaggccgccgacctgagcctgggctacatgaagagcagagtgaagggcctgggcggcctgatcgtggtgagcaagaccggcgactgggtggccaagtggaccagcaccagcatgccctgggccgccgccaaggacggcaagctgcacttcggcatcgaccccgacgacaccaccatcaccgacctgccctag

SEQ ID NO: 9732 - DNA, 1212 bp, synthetic construct
  source 1..1212: mol_type = other DNA; note = Synthetic coding sequence
atggccggcagaagagcccagaccggcagcgccccccccagacccgccgccccccacccccccgccagcagagccttcccccagcactgcagacccagagacgccgagagaccccccagccccagaagccccctgatgcccggctgcgagctgcccgtgggcacctgccccgacatgtgccccgccgccgagagagcccagagagagagagagcacagactgcacagactggaggtggtgcccggctgcagacaggacccccccagagccgacccccagagagccgtgaaggagtacagcagacccgccgccggcaagcccagacccccccccagccagctgagaccccccagcgtgctgctggccaccgtgagatacctggccggcgaggtggccgagagcgccgacatcgccagagccgaggtggccagcttcgtggccgacagactgagagccgtgctgctggacctggccctgcagggcgccggcgacgccgaggccgccgtggtgctggaggccgccctggccaccctgctgaccgtggtggccagactgggccccgacgccgccagaggccccgccgaccccgtgctgctgcaggcccaggtgcaggagggcttcggcagcctgagaagatgctacgccagaggcgccggcccccaccccagacagcccgccttccagggcctgttcctgctgtacaacctgggcagcgtggaggccctgcacgaggtgctgcagctgcccgccgccctgagagcctgcccccccctgagaaaggccctggccgtggacgccgccttcagagagggcaacgccgccagactgttcagactgctgcagaccctgccctacctgcccagctgcgccgtgcagtgccacgtgggccacgccagaagagaggccctggccagattcgccagagccttcagcacccccaagggccagaccctgcccctgggcttcatggtgaacctgctggccctggacggcctgagagaggccagagacctgtgccaggcccacggcctgcccctggacggcgaggagagagtggtgttcctgagaggcagatacgtggaggagggcctgccccccgccagcacctgcaaggtgctggtggagagcaagctgagaggcagaaccctggaggaggtggtgatggccgaggaggaggacgagggcaccgacagacccggcagccccgcctag

SEQ ID NO: 9733 - DNA, 894 bp, synthetic construct
  source 1..894: mol_type = other DNA; note = Synthetic coding sequence
atggccgagctgaccgccctggagagcctgatcgagatgggcttccccagaggcagagccgagaaggccctggccctgaccggcaaccagggcatcgaggccgccatggactggctgatggagcacgaggacgaccccgacgtggacgagcccctggagacccccctgggccacatcctgggcagagagcccaccagcagcgagcagggcggcctggagggcagcggcagcgccgccggcgagggcaagcccgccctgagcgaggaggagagacaggagcagaccaagagaatgctggagctggtggcccagaagcagagagagagagaggagagagaggagagagaggccctggagagagagagacagagaagaagacagggccaggagctgagcgccgccagacagagactgcaggaggacgagatgagaagagccgccgaggagagaagaagagagaaggccgaggagctggccgccagacagagagtgagagagaagatcgagagagacaaggccgagagagccaagaagtacggcggcagcgtgggcagccagcccccccccgtggcccccgagcccggccccgtgcccagcagccccagccaggagccccccaccaagagagagtacgaccagtgcagaatccaggtgagactgcccgacggcaccagcctgacccagaccttcagagccagagagcagctggccgccgtgagactgtacgtggagctgcacagaggcgaggagctgggcggcggccaggaccccgtgcagctgctgagcggcttccccagaagagccttcagcgaggccgacatggagagacccctgcaggagctgggcctggtgcccagcgccgtgctgatcgtggccaagaagtgccccagctag

SEQ ID NO: 9734 - DNA, 570 bp, synthetic construct
  source 1..570: mol_type = other DNA; note = Synthetic coding sequence
atgagactgagcctgcccctgctgctgctgctgctgggcgcctgggccatccccggcggcctgggcgacagagcccccctgaccgccaccgccccccagctggacgacgaggagatgtacagcgcccacatgcccgcccacctgagatgcgacgcctgcagagccgtggcctaccagatgtggcagaacctggccaaggccgagaccaagctgcacaccagcaacagcggcggcagaagagagctgagcgagctggtgtacaccgacgtgctggacagaagctgcagcagaaactggcaggactacggcgtgagagaggtggaccaggtgaagagactgaccggccccggcctgagcgagggccccgagcccagcatcagcgtgatggtgaccggcggcccctggcccaccagactgagcagaacctgcctgcactacctgggcgagttcggcgaggaccagatctacgaggcccaccagcagggcagaggcgccctggaggccctgctgtgcggcggcccccagggcgcctgcagcgagaaggtgagcgccaccagagaggagctgtag

SEQ ID NO: 9735 - DNA, 3129 bp, synthetic construct
  source 1..3129: mol_type = other DNA; note = Synthetic coding sequence
atggccaacgacagccccgccaagagcctggtggacatcgacctgagcagcctgagagaccccgccggcatcttcgagctggtggaggtggtgggcaacggcacctacggccaggtgtacaagggcagacacgtgaagaccggccagctggccgccatcaaggtgatggacgtgaccgaggacgaggaggaggagatcaagctggagatcaacatgctgaagaagtacagccaccacagaaacatcgccacctactacggcgccttcatcaagaagagcccccccggccacgacgaccagctgtggctggtgatggagttctgcggcgccggcagcatcaccgacctggtgaagaacaccaagggcaacaccctgaaggaggactggatcgcctacatcagcagagagatcctgagaggcctggcccacctgcacatccaccacgtgatccacagagacatcaagggccagaacgtgctgctgaccgagaacgccgaggtgaagctggacgagaccgagtacgagtacagcggcagcgaggaggaggaggaggaggtgcccgagcaggagggcgagcccagcagcatcgtgaacgtgcccggcgagagcaccctgagaagagacttcctgagactgcagcaggagaacaaggagagaagcgaggccctgagaagacagcagctgctgcaggagcagcagctgagagagcaggaggagtacaagagacagctgctggccgagagacagaagagaatcgagcagcagaaggagcagagaagaagactggaggagcagcagagaagagagagagaggccagaagacagcaggagagagagcagagaagaagagagcaggaggagaagagaagactggaggagctggagagaagaagaaaggaggaggaggagagaagaagagccgaggaggagaagagaagagtggagagagagcaggagtacatcagaagacagctggaggaggagcagagacacctggaggtgctgcagcagcagctgctgcaggagcaggccatgctgctggagtgcagatggagagagatggaggagcacagacaggccgagagactgcagagacagctgcagcaggagcaggcctacctgctgagcctgcagcacgaccacagaagaccccacccccagcacagccagcagcccccccccccccagcaggagagaagcaagcccagcttccacgcccccgagcccaaggcccactacgagcccgccgacagagccagagaggtgcccgtgagaaccaccagcagaagccccgtgctgagcagaagagacagccccctgcagggcagcggccagcagaacagccaggccggccagagaaacagcaccagcagcatcgagcccagactgctgtgggagagagtggagaagctggtgcccagacccggcagcggcagcagcagcggcagcagcaacagcggcagccagcccggcagccaccccggcagccagagcggcagcggcgagagattcagagtgagaagcagcagcaagagcgagggcagccccagccagagactggagaacgccgtgaagaagcccgaggacaagaaggaggtgttcagacccctgaagcccgccgtgagaatcgacctgaccgccctggccaaggagctgagagccgtggaggacgtgagacccccccacaaggtgaccgactacagcagcagcagcgaggagagcggcaccaccgacgaggaggacgacgacgtggagcaggagggcgccgacgagagcaccagcggccccgaggacaccagagccgccagcagcctgaacctgagcaacggcgagaccgagagcgtgaagaccatgatcgtgcacgacgacgtggagagcgagcccgccatgacccccagcaaggagggcaccctgatcgtgagacagacccagagcgccagcagcaccctgcagaagcacaagagcagcagcagcttcacccccttcatcgaccccagactgctgcagatcagccccagcagcggcaccaccgtgaccagcgtggtgggcttcagctgcgacggcatgagacccgaggccatcagacaggaccccaccagaaagggcagcgtggtgaacgtgaaccccaccaacaccagaccccagagcgacacccccgagatcagaaagtacaagaagagattcaacagcgagatcctgtgcgccgccctgtggggcgtgaacctgctggtgggcaccgagagcggcctgatgctgctggacagaagcggccagggcaaggtgtaccccctgatcaacagaagaagattccagcagatggacgtgctggagggcctgaacgtgctggtgaccatcagcggcaagaaggacaagctgagagtgtactacctgagctggctgagaaacaagatcctgcacaacgaccccgaggtggagaagaagcagggctggaccaccgtgggcgacctggagggctgcgtgcactacaaggtggtgaagtacgagagaatcaagttcctggtgatcgccctgaagagcagcgtggaggtgtacgcctgggcccccaagccctaccacaagttcatggccttcaagagcttcggcgagctggtgcacaagcccctgctggtggacctgaccgtggaggagggccagagactgaaggtgatctacggcagctgcgccggcttccacgccgtggacgtggacagcggcagcgtgtacgacatctacctgcccacccacatccagtgcagcatcaagccccacgccatcatcatcctgcccaacaccgacggcatggagctgctggtgtgctacgaggacgagggcgtgtacgtgaacacctacggcagaatcaccaaggacgtggtgctgcagtggggcgagatgcccaccagcgtggcctacatcagaagcaaccagaccatgggctggggcgagaaggccatcgagatcagaagcgtggagaccggccacctggacggcgtgttcatgcacaagagagcccagagactgaagttcctgtgcgagagaaacgacaaggtgttcttcgccagcgtgagaagcggcggcagcagccaggtgtacttcatgaccctgggcagaaccagcctgctgagctggtag

SEQ ID NO: 9736 - DNA, 1113 bp, synthetic construct
  source 1..1113: mol_type = other DNA; note = Synthetic coding sequence
atgggcttcaacagacccagcaagatccaggagaacgccctgcccatgatgctggccgagcccccccagaacctgatcgcccagagccagagcggcaccggcaagaccgccgccttcgtgctggccatgctgagcagagtggagcccagcgacagatacccccagtgcctgtgcctgagccccacctacgagctggccctgcagaccggcaaggtgatcgagcagatgggcaagttctaccccgagctgaagctggcctacgccgtgagaggcaacaagctggagagaggccagaagatcagcgagcagatcgtgatcggcacccccggcaccgtgctggactggtgcagcaagctgaagttcatcgaccccaagaagatcaaggtgttcgtgctggacgaggccgacgtgatgatcgccacccagggccaccaggaccagagcatcagaatccagagaatgctgcccagaaactgccagatgctgctgttcagcgccaccttcgaggacagcgtgtggaagttcgcccagaaggtggtgcccgaccccaacgtgatcaagctgaagagagaggaggagaccctggacaccatcaagcagtactacgtgctgtgcagcagcagagacgagaagttccaggccctgtgcaacctgtacggcgccatcaccatcgcccaggccatgatcttctgccacaccagaaagaccgccagctggctggccgccgagctgagcaaggagggccaccaggtggccctgctgagcggcgagatgatggtggagcagagagccgccgtgatcgagagattcagagagggcaaggagaaggtgctggtgaccaccaacgtgtgcgccagaggcatcgacgtggagcaggtgagcgtggtgatcaacttcgacctgcccgtggacaaggacggcaaccccgacaacgagacctacctgcacagaatcggcagaaccggcagattcggcaagagaggcctggccgtgaacatggtggacagcaagcacagcatgaacatcctgaacagaatccaggagcacttcaacaagaagatcgagagactggacaccgacgacctggacgagatcgagaagatcgccaactag

SEQ ID NO: 9737 - DNA, 1437 bp, synthetic construct
  source 1..1437: mol_type = other DNA; note = Synthetic coding sequence
atggccaccgacagctgggccctggccgtggacgagcaggaggccgccgtgaagagcatgaccaacctgcagatcaaggaggagaaggtgaaggccgacaccaacggcatcatcaagaccagcaccaccgccgagaagaccgacgaggaggagaaggaggacagagccgcccagagcctgctgaacaagctgatcagaagcaacctggtggacaacaccaaccaggtggaggtgctgcagagagaccccaacagccccctgtacagcgtgaagagcttcgaggagctgagactgaagccccagctgctgcagggcgtgtacgccatgggcttcaacagacccagcaagatccaggagaacgccctgcccatgatgctggccgagcccccccagaacctgatcgcccagagccagagcggcaccggcaagaccgccgccttcgtgctggccatgctgagcagagtggagcccagcgacagatacccccagtgcctgtgcctgagccccacctacgagctggccctgcagaccggcaaggtgatcgagcagatgggcaagttctaccccgagctgaagctggcctacgccgtgagaggcaacaagctggagagaggccagaagatcagcgagcagatcgtgatcggcacccccggcaccgtgctggactggtgcagcaagctgaagttcatcgaccccaagaagatcaaggtgttcgtgctggacgaggccgacgtgatgatcgccacccagggccaccaggaccagagcatcagaatccagagaatgctgcccagaaactgccagatgctgctgttcagcgccaccttcgaggacagcgtgtggaagttcgcccagaaggtggtgcccgaccccaacgtgatcaagctgaagagagaggaggagaccctggacaccatcaagcagtactacgtgctgtgcagcagcagagacgagaagttccaggccctgtgcaacctgtacggcgccatcaccatcgcccaggccatgatcttctgccacaccagaaagaccgccagctggctggccgccgagctgagcaaggagggccaccaggtggccctgctgagcggcgagatgatggtggagcagagagccgccgtgatcgagagattcagagagggcaaggagaaggtgctggtgaccaccaacgtgtgcgccagaggcatcgacgtggagcaggtgagcgtggtgatcaacttcgacctgcccgtggacaaggacggcaaccccgacaacgagacctacctgcacagaatcggcagaaccggcagattcggcaagagaggcctggccgtgaacatggtggacagcaagcacagcatgaacatcctgaacagaatccaggagcacttcaacaagaagatcgagagactggacaccgacgacctggacgagatcgagaagatcgccaactag

SEQ ID NO: 9738 - DNA, 2238 bp, synthetic construct
  source 1..2238: mol_type = other DNA; note = Synthetic coding sequence
atggtgggccccggccccaccgccgccgccgccgtggaggagagacagagaaagctgcaggagtacctggccgccaagggcaagctgaagagccagaacaccaagccctacctgaagagcaagaacaactgccagaaccagccccccagcaagagcaccatcagacccaagaacgacgtgaccaaccacgtggtgctgcccgtgaagcccaagagaagcatcagcatcaagctgcagcccagaccccccaacaccgccggcagccagaagcccaagctggagccccccaagctgctgggcaagagactgaccagcgagtgcgtgagcagcaacccctacagcaagcccagcagcaagagcttccagcagtgcgaggccggcagcagcaccaccggcgagctgagcagaaagcccgtgggcagcctgaacatcgagcagctgaagaccaccaagcagcagctgaccgaccagggcaacggcaagtgcatcgacttcatgaacaacatccacgtggagaacgagagcctggacaacttcctgaaggagaccaacaaggagaacctgctggacatcctgaccgagcccgagagaaagcccgaccccaagctgtacaccagaagcaagcccaagaccgacagctacaaccagaccaagaacagcctggtgcccaagcaggccctgggcaagagcagcgtgaacagcgccgtgctgaaggacagagtgaacaagcagttcgtgggcgagacccagagcagaaccttccccgtgaagagccagcagctgagcagaggcgccgacctggccagacccggcgtgaagcccagcagaaccgtgcccagccacttcatcagaaccctgagcaaggtgcagagcagcaagaagcccgtggtgaagaacatcaaggacatcaaggtgaacagaagccagtacgagagacccaacgagaccaagatcagaagctaccccgtgaccgagcagagagtgaagcacaccaagcccagaacctaccccagcctgctgcagggcgagtacaacaacagacaccccaacatcaagcaggaccagaagagcagccaggtgtgcatcccccagaccagctgcgtgctgcagaagagcaaggccatcagccagagacccaacctgaccgtgggcagattcaacagcgccatccccagcacccccagcatcagacccaacggcaccagcggcaacaagcacaacaacaacggcttccagcagaaggcccagaccctggacagcaagctgaagaaggccgtgccccagaaccacttcctgaacaagaccgcccccaagacccaggccgacgtgaccaccgtgaacggcacccagaccaaccccaacatcaagaagaaggccaccgccgaggacagaagaaagcagctggaggagtggcagaagagcaagggcaagacctacaagagaccccccatggagctgaagaccaagagaaaggtgatcaaggagatgaacatcagcttctggaagagcatcgagaaggaggaggaggagaagaaggcccagctggagctgagcagcaagatcaacaacaccctgaccgagtgcctgaacctgatcgagggcggcgtgcccagcaacgagatcctgaacatcctgagcagcatccccgaggccgagaagttcgccaagttctggatctgcaaggccaagctgctggccagcaagggcaccttcgacgtgatcggcctgtacgaggaggccatcaagaacggcgccacccccatccaggagctgagaaaggtggtgctgaacatcctgcaggacagcaacagaaccaccgagggcatcaccagcgacagcctggtggccgagaccagcatcaccagcgtggaggagctggccaagaagatggagagcgtgaagagctgcctgagccccaaggagagagagcaggtgaccgccacccccagaatcgccaaggccgagcagcacaactaccccggcatcaagctgcagatcggccccatccccagaatcaacggcatgcccgaggtgcaggacatgaagttcatcacccccgtgagaagaagcagcagaatcgagagagccgtgagcagataccccgagatgctgcaggagcacgacctggtggtggccagcctggacgagctgctggaggtggaggagaccaagtgcttcatcttcagaagaaacgaggccctgcccgtgaccctgggcttccagacccccgagagctag

SEQ ID NO: 9739 - DNA, 378 bp, synthetic construct
  source 1..378: mol_type = other DNA; note = Synthetic coding sequence
atgagcagcaccctgggcaagctgagcaaccaggtggaggagaccctgcccctgctgaagaaggtgcccgccaactacttccacatctgcagcgccatcctgatgggcttcagcctgagcaagagcgccacccaggtgagcgccatccacatggacagcaaggtggacgaccacctgatcagaggcaccgagaagagcagactggagcccgccacccagctgttccagaacaccaagaagatcagactggaggacaccaaccaggagaacttcaccagaatcgagggcaccggcaccggcagcctgagcggcaaggccctgggcagcgtggtgtacgtgaaggagagcgacggcctggagatgaccgacgtggagtag

SEQ ID NO: 9740 - DNA, 4284 bp, synthetic construct
  source 1..4284: mol_type = other DNA; note = Synthetic coding sequence
atgagcatgctgaagcccagcggcctgaaggcccccaccaagatcctgaagcccggcagcaccgccctgaagacccccaccgccgtggtggcccccgtggagaagaccatcagcagcgagaaggccagcagcacccccagcagcgagacccaggaggagttcgtggacgacttcagagtgggcgagagagtgtgggtgaacggcaacaagcccggcttcatccagttcctgggcgagacccagttcgcccccggccagtgggccggcatcgtgctggacgagcccatcggcaagaacgacggcagcgtggccggcgtgagatacttccagtgcgagcccctgaagggcatcttcaccagacccagcaagctgaccagaaaggtgcaggccgaggacgaggccaacggcctgcagaccacccccgccagcagagccaccagccccctgtgcaccagcaccgccagcatggtgagcagcagccccagcacccccagcaacatcccccagaagcccagccagcccgccgccaaggagcccagcgccaccccccccatcagcaacctgaccaagaccgccagcgagagcatcagcaacctgagcgaggccggcagcatcaagaagggcgagagagagctgaagatcggcgacagagtgctggtgggcggcaccaaggccggcgtggtgagattcctgggcgagaccgacttcgccaagggcgagtggtgcggcgtggagctggacgagcccctgggcaagaacgacggcgccgtggccggcaccagatacttccagtgccagcccaagtacggcctgttcgcccccgtgcacaaggtgaccaagatcggcttccccagcaccacccccgccaaggccaaggccaacgccgtgagaagagtgatggccaccaccagcgccagcctgaagagaagccccagcgccagcagcctgagcagcatgagcagcgtggccagcagcgtgagcagcagacccagcagaaccggcctgctgaccgagaccagcagcagatacgccagaaagatcagcggcaccaccgccctgcaggaggccctgaaggagaagcagcagcacatcgagcagctgctggccgagagagacctggagagagccgaggtggccaaggccaccagccacgtgggcgagatcgagcaggagctggccctggccagagacggccacgaccagcacgtgctggagctggaggccaagatggaccagctgagaaccatggtggaggccgccgacagagagaaggtggagctgctgaaccagctggaggaggagaagagaaaggtggaggacctgcagttcagagtggaggaggagagcatcaccaagggcgacctggagacccagaccaagctggagcacgccagaatcaaggagctggagcagagcctgctgttcgagaagaccaaggccgacaagctgcagagagagctggaggacaccagagtggccaccgtgagcgagaagagcagaatcatggagctggagaaggacctggccctgagagtgcaggaggtggccgagctgagaagaagactggagagcaacaagcccgccggcgacgtggacatgagcctgagcctgctgcaggagatcagcagcctgcaggagaagctggaggtgaccagaaccgaccaccagagagagatcaccagcctgaaggagcacttcggcgccagagaggagacccaccagaaggagatcaaggccctgtacaccgccaccgagaagctgagcaaggagaacgagagcctgaagagcaagctggagcacgccaacaaggagaacagcgacgtgatcgccctgtggaagagcaagctggagaccgccatcgccagccaccagcaggccatggaggagctgaaggtgagcttcagcaagggcctgggcaccgagaccgccgagttcgccgagctgaagacccagatcgagaagatgagactggactaccagcacgagatcgagaacctgcagaaccagcaggacagcgagagagccgcccacgccaaggagatggaggccctgagagccaagctgatgaaggtgatcaaggagaaggagaacagcctggaggccatcagaagcaagctggacaaggccgaggaccagcacctggtggagatggaggacaccctgaacaagctgcaggaggccgagatcaaggtgaaggagctggaggtgctgcaggccaagtgcaacgagcagaccaaggtgatcgacaacttcaccagccagctgaaggccaccgaggagaagctgctggacctggacgccctgagaaaggccagcagcgagggcaagagcgagatgaagaagctgagacagcagctggaggccgccgagaagcagatcaagcacctggagatcgagaagaacgccgagagcagcaaggccagcagcatcaccagagagctgcagggcagagagctgaagctgaccaacctgcaggagaacctgagcgaggtgagccaggtgaaggagaccctggagaaggagctgcagatcctgaaggagaagttcgccgaggccagcgaggaggccgtgagcgtgcagagaagcatgcaggagaccgtgaacaagctgcaccagaaggaggagcagttcaacatgctgagcagcgacctggagaagctgagagagaacctggccgacatggaggccaagttcagagagaaggacgagagagaggagcagctgatcaaggccaaggagaagctggagaacgacatcgccgagatcatgaagatgagcggcgacaacagcagccagctgaccaagatgaacgacgagctgagactgaaggagagagacgtggaggagctgcagctgaagctgaccaaggccaacgagaacgccagcttcctgcagaagagcatcgaggacatgaccgtgaaggccgagcagagccagcaggaggccgccaagaagcacgaggaggagaagaaggagctggagagaaagctgagcgacctggagaagaagatggagaccagccacaaccagtgccaggagctgaaggccagatacgagagagccaccagcgagaccaagaccaagcacgaggagatcctgcagaacctgcagaagaccctgctggacaccgaggacaagctgaagggcgccagagaggagaacagcggcctgctgcaggagctggaggagctgagaaagcaggccgacaaggccaaggccgcccagaccgccgaggacgccatgcagatcatggagcagatgaccaaggagaagaccgagaccctggccagcctggaggacaccaagcagaccaacgccaagctgcagaacgagctggacaccctgaaggagaacaacctgaagaacgtggaggagctgaacaagagcaaggagctgctgaccgtggagaaccagaagatggaggagttcagaaaggagatcgagaccctgaagcaggccgccgcccagaagagccagcagctgagcgccctgcaggaggagaacgtgaagctggccgaggagctgggcagaagcagagacgaggtgaccagccaccagaagctggaggaggagagaagcgtgctgaacaaccagctgctggagatgaagaagagagagagcaagttcatcaaggacgccgacgaggagaaggccagcctgcagaagagcatcagcatcaccagcgccctgctgaccgagaaggacgccgagctggagaagctgagaaacgaggtgaccgtgctgagaggcgagaacgccagcgccaagagcctgcacagcgtggtgcagaccctggagagcgacaaggtgaagctggagctgaaggtgaagaacctggagctgcagctgaaggagaacaagagacagctgagcagcagcagcggcaacaccgacacccaggccgacgaggacgagagagcccaggagagccagatcgacttcctgaacagcgtgatcgtggacctgcagagaaagaaccaggacctgaagatgaaggtggagatgatgagcgaggccgccctgaacggcaacggcgacgacctgaacaactacgacagcgacgaccaggagaagcagagcaagaagaagcccagactgttctgcgacatctgcgactgcttcgacctgcacgacaccgaggactgccccacccaggcccagatgagcgaggaccccccccacagcacccaccacggcagcagaggcgaggagagaccctactgcgagatctgcgagatgttcggccactgggccaccaactgcaacgacgacgagaccttctag

SEQ ID NO: 9741 - DNA, 975 bp, synthetic construct
  source 1..975: mol_type = other DNA; note = Synthetic coding sequence
atggccagcagcaacaccgtgctgatgagactggtggccagcgcctacagcatcgcccagaaggccggcatgatcgtgagaagagtgatcgccgagggcgacctgggcatcgtggagaagacctgcgccaccgacctgcagaccaaggccgacagactggcccagatgagcatctgcagcagcctggccagaaagttccccaagctgaccatcatcggcgaggaggacctgcccagcgaggaggtggaccaggagctgatcgaggacagccagtgggaggagatcctgaagcagccctgccccagccagtacagcgccatcaaggaggaggacctggtggtgtgggtggaccccctggacggcaccaaggagtacaccgagggcctgctggacaacgtgaccgtgctgatcggcatcgcctacgagggcaaggccatcgccggcgtgatcaaccagccctactacaactacgaggccggccccgacgccgtgctgggcagaaccatctggggcgtgctgggcctgggcgccttcggcttccagctgaaggaggtgcccgccggcaagcacatcatcaccaccaccagaagccacagcaacaagctggtgaccgactgcgtggccgccatgaaccccgacgccgtgctgagagtgggcggcgccggcaacaagatcatccagctgatcgagggcaaggccagcgcctacgtgttcgccagccccggctgcaagaagtgggacacctgcgcccccgaggtgatcctgcacgccgtgggcggcaagctgaccgacatccacggcaacgtgctgcagtaccacaagggcgtgagccacagaacctggcccaagcccgacttcttcagagcccagttcttcctggagagccacagctgcttcagcaacttcaagaacgtgagcacccccatcaagaacatctacgacgtgatcatctacgcctacgagaccgacctgtag

SEQ ID NO: 9742 - DNA, 270 bp, synthetic construct
  source 1..270: mol_type = other DNA; note = Synthetic coding sequence
atgggcaccaagagagaggccatcctgaaggtgctggagaacctgacccccgaggagctgaagaagttcaagatgaagctgggcaccgtgcccctgagagagggcttcgagagaatccccagaggcgccctgggccagctggacatcgtggacctgaccgacaagctggtggccagctactacgaggactacgccgccgagctggtggtggccgtgctgagagacatgagaatgctggaggaggccgccagactgcagagagccgcctag

SEQ ID NO: 9743 - DNA, 867 bp, synthetic construct
  source 1..867: mol_type = other DNA; note = Synthetic coding sequence
atgaccgtgggcaagagcagcaagatgctgcagcacatcgactacagaatgagatgcatcctgcaggacggcagaatcttcatcggcaccttcaaggccttcgacaagcacatgaacctgatcctgtgcgactgcgacgagttcagaaagatcaagcccaagaacagcaagcaggccgagagagaggagaagagagtgctgggcctggtgctgctgagaggcgagaacctggtgagcatgaccgtggagggccccccccccaaggacaccggcatcgccagagtgcccctggccggcgccgccggcggccccggcatcggcagagccgccggcagaggcatccccgccggcgtgcccatgccccaggcccccgccggcctggccggccccgtgagaggcgtgggcggccccagccagcaggtgatgaccccccagggcagaggcaccgtggccgccgccgccgccgccgccaccgccagcatcgccggcgcccccacccagtacccccccggcagaggcggcccccccccccccatgggcagaggcgcccccccccccggcatgatgggccccccccccggcatgagaccccccatgggcccccccatgggcatcccccccggcagaggcacccccatgggcatgcccccccccggcatgagaccccccccccccggctgcgaggccttcttcgacccctggccccagagcatggaggtggccccccagagaagaggcctggacagcagcggccccagataccacagacccgtgtgcttcctgtgctgctgcagctggagcctgatgggcctgagcggcttcctgaccggcccccccccccccggcatgagaccccccagaccctag

SEQ ID NO: 9744 - DNA, 3300 bp, synthetic construct
  source 1..3300: mol_type = other DNA; note = Synthetic coding sequence
atgcacatcaagagcatcatcctggagggcttcaagagctacgcccagagaaccgaggtgaacggcttcgaccccctgttcaacgccatcaccggcctgaacggcagcggcaagagcaacatcctggacagcatctgcttcctgctgggcatcagcaacctgagccaggtgagagccagcaacctgcaggacctggtgtacaagaacggccaggccggcatcaccaaggccagcgtgagcatcaccttcgacaacagcgacaagaagcagagccccctgggcttcgaggtgcacgacgagatcaccgtgaccagacaggtggtgatcggcggcagaaacaagtacctgatcaacggcgtgaacgccaacaacaccagagtgcaggacctgttctgcagcgtgggcctgaacgtgaacaacccccacttcctgatcatgcagggcagaatcaccaaggtgctgaacatgaagccccccgagatcctgagcatgatcgaggaggccgccggcaccagaatgtacgagtacaagaagatcgccgcccagaagaccatcgagaagaaggaggccaagctgaaggagatcaagaccatcctggaggaggagatcacccccaccatccagaagctgaaggaggagagaagcagctacctggagtaccagaaggtgatgagagagatcgagcacctgagcagactgtacatcgcctaccagttcctgctggccgaggacaccaaggtgagaagcgccgaggagctgaaggagatgcaggacaaggtgatcaagctgcaggaggagctgagcgagaacgacaagaagatcaaggccctgaaccacgagatcgaggagctggagaagagaaaggacaaggagaccggcggcatcctgagaagcctggaggacgccctggccgaggcccagagagtgaacaccaagagccagagcgccttcgacctgaagaagaagaacctggcctgcgaggagagcaagagaaaggagctggagaagaacatggtggaggacagcaagaccctggccgccaaggagaaggaggtgaagaagatcaccgacggcctgcacgccctgcaggaggccagcaacaaggacgccgaggccctggccgccgcccagcagcacttcaacgccgtgagcgccggcctgagcagcaacgaggacggcgccgaggccaccctggccggccagatgatggcctgcaagaacgacatcagcaaggcccagaccgaggccaagcaggcccagatgaagctgaagcacgcccagcaggagctgaagaacaagcaggccgaggtgaagaagatggacagcggctacagaaaggaccaggaggccctggaggccgtgaagagactgaaggagaagctggaggccgagatgaagaagctgaactacgaggagaacaaggaggagagcctgctggagaagagaagacagctgagcagagacatcggcagactgaaggagacctacgaggccctgctggccagattccccaacctgagattcgcctacaaggaccccgagaagaactggaacagaaactgcgtgaagggcctggtggccagcctgatcagcgtgaaggacaccagcgccaccaccgccctggagctggtggccggcgagagactgtacaacgtggtggtggacaccgaggtgaccggcaagaagctgctggagagaggcgagctgaagagaagatacaccatcatccccctgaacaagatcagcgccagatgcatcgcccccgagaccctgagagtggcccagaacctggtgggccccgacaacgtgcacgtggccctgagcctggtggagtacaagcccgagctgcagaaggccatggagttcgtgttcggcaccaccttcgtgtgcgacaacatggacaacgccaagaaggtggccttcgacaagagaatcatgaccagaaccgtgaccctgggcggcgacgtgttcgacccccacggcaccctgagcggcggcgccagaagccaggccgccagcatcctgaccaagttccaggagctgaaggacgtgcaggacgagctgagaatcaaggagaacgagctgagagccctggaggaggagctggccggcctgaagaacaccgccgagaagtacagacagctgaagcagcagtgggagatgaagaccgaggaggccgacctgctgcagaccaagctgcagcagagcagctaccacaagcagcaggaggagctggacgccctgaagaagaccatcgaggagagcgaggagaccctgaagaacaccaaggagatccagagaaaggccgaggagaagtacgaggtgctggagaacaagatgaagaacgccgaggccgagagagagagagagctgaaggacgcccagaagaagctggactgcgccaagaccaaggccgacgccagcagcaagaagatgaaggagaagcagcaggaggtggaggccatcaccctggagctggaggagctgaagagagagcacaccagctacaagcagcagctggaggccgtgaacgaggccatcaagagctacgagagccagatcgaggtgatggccgccgaggtggccaagaacaaggagagcgtgaacaaggcccaggaggaggtgaccaagcagaaggaggtgatcaccgcccaggacaccgtgatcaaggccaagtacgccgaggtggccaagcacaaggagcagaacaacgacagccagctgaagatcaaggagctggaccacaacatcagcaagcacaagagagaggccgaggacggcgccgccaaggtgagcaagatgctgaaggactacgactggatcaacgccgagagacacctgttcggccagcccaacagcgcctacgacttcaagaccaacaaccccaaggaggccggccagagactgcagaagctgcaggagatgaaggagaagctgggcagaaacgtgaacatgagagccatgaacgtgctgaccgaggccgaggagagatacaacgacctgatgaagaagaagagaatcgtggagaacgacaagagcaagatcctgaccaccatcgaggacctggaccagaagaagaaccaggccctgaacatcgcctggcagaaggtgaacaaggacttcggcagcatcttcagcaccctgctgcccggcgccaacgccatgctggccccccccgagggccagaccgtgctggacggcctggagttcaaggtggccctgggcaacacctggaaggagaacctgaccgagctgagcggcggccagagacagaagcagcagaaccacaccaccggctag

SEQ ID NO: 9745 - DNA, 381 bp, synthetic construct
  source 1..381: mol_type = other DNA; note = Synthetic coding sequence
atgttccagaaggacgagtactgcatcctgatcctgggcctggacaacgccggcaagaccaccttcctggagcagagcaagaccagattcaacaagaactacaagggcatgagcctgagcaagatcaccaccaccgtgggcctgaacatcggcaccgtggacgtgggcaaggccagactgatgttctgggacctgggcggccaggaggagctgcagagcctgtgggacaaggacaagaccaagtgcggcgacctgggcaccctgcacagcagcaaggtgagcgccagcttcagactgagagacctggccgccgaccaccacagaacccagaagtggcagagacccgacgtgggcaccgccggctggctgcccctgccctag

SEQ ID NO: 9746 - DNA, 1119 bp, synthetic construct
  source 1..1119: mol_type = other DNA; note = Synthetic coding sequence
atgaccttccagttcaacttcaccatcgaggaccacctggagaacgagctgacccccatcagagacggcgccctgaccctggacagcagcaaggagctgagcgtgagcgagagccagaagggcgaggagagagacagaaagtgcagcgccgagcagttcgacctgccccaggaccacctgtgggagcacaagagcatggagaacgccgcccccagccaggacaccgacagccccctgagcgccgccagcagcagcagaaacctggagccccacggcaagcagcccagcctgagagccgccaaggagcacgccatgcccaaggacctgaagaagatgctggagaacaaggtgatcgagaccctgcccggcttccagcacgtgaagctgagcgtggtgaagaccatcctgctgaaggagaacttccccggcgagaacatcgtgagcaagagcttcagcagccacagcgacctgatcaccggcgtgtacgagggcggcctgaagatctgggagtgcaccttcgacctgctggcctacttcaccaaggccaaggtgaagttcgccggcaagaaggtgctggacctgggctgcggcagcggcctgctgggcatcaccgccttcaagggcggcagcaaggagatccacttccaggactacaacagcatggtgatcgacgaggtgaccctgcccaacgtggtggccaacagcaccctggaggacgaggagaacgacgtgaacgagcccgacgtgaagagatgcagaaagcccaaggtgacccagctgtacaagtgcagattcttcagcggcgagtggagcgagttctgcaagctggtgctgagcagcgagaagctgttcgtgaagtacgacctgatcctgaccagcgagaccatctacaaccccgactactacagcaacctgcaccagaccttcctgagactgctgagcaagaacggcagagtgctgctggccagcaaggcccactacttcggcgtgggcggcggcgtgcacctgttccagaagttcgtggaggagagagacgtgttcaagaccagaatcctgaagatcatcgacgagggcctgaagagattcatcatcgagatcaccttcaagttccccggctag

SEQ ID NO: 9747 - DNA, 1635 bp, synthetic construct
  source 1..1635: mol_type = other DNA; note = Synthetic coding sequence
atgaagtgccactacgaggccctgggcgtgagaagagacgccagcgaggaggagctgaagaaggcctacagaaagctggccctgaagtggcaccccgacaagaacctggacaacgccgccgaggccgccgagcagttcaagctgatccaggccgcctacgacgtgctgagcgacccccaggagagagcctggtacgacaaccacagagaggccctgctgaagggcggcttcgacggcgagtaccaggacgacagcctggacctgctgagatacttcaccgtgacctgctacagcggctacggcgacgacgagaagggcttctacaccgtgtacagaaacgtgttcgagatgatcgccaaggaggagctggagagcgtgctggaggaggaggtggacgacttccccaccttcggcgacagccagagcgactacgacaccgtggtgcaccccttctacgcctactggcagagcttctgcacccagaagaacttcgcctggaaggaggagtacgacaccagacaggccagcaacagatgggagaagagagccatggagaaggagaacaagaagatcagagacaaggccagaaaggagaagaacgagctggtgagacagctggtggccttcatcagaaagagagacaagagagtgcaggcccacagaaagctggtggaggagcagaacgccgagaaggccagaaaggccgaggagatgagaagacagcagaagctgaagcaggccaagctggtggagcagtacagagagcagagctggatgaccatggccaacctggagaaggagctgcaggagatggaggccagatacgagaaggagttcggcgacggcagcgacgagaacgagatggaggagcacgagctgaaggacgaggaggacggcaaggacagcgacgaggccgaggacgccgagctgtacgacgacctgtactgccccgcctgcgacaagagcttcaagaccgagaaggccatgaagaaccacgagaagagcaagaagcacagagagatggtggccctgctgaagcagcagctggaggaggaggaggagaacttcagcagaccccagatcgacgagaaccccctggacgacaacagcgaggaggagatggaggacgcccccaagcagaaggtgaagtacctgaccttcagattcatcttcgccctgagactgagcaagaagcagaagaagaagaagcagaagcccgcccagaactacgacgacaacttcaacgtgaacggccccggcgagggcgtgaaggtggaccccgaggacaccaacctgaaccaggacagcgccaaggagctggaggacagcccccaggagaacgtgagcgtgaccgagatcatcaagccctgcgacgaccccaagagcgaggccaagagcgtgcccaagcccaagggcaagaagaccaaggacatgaagaagcccgtgagagtgcccgccgagccccagaccatgagcgtgctgatcagctgcaccacctgccacagcgagttccccagcagaaacaagctgttcgaccacctgaaggccaccggccacgccagagcccccagcagcagcagcctgaacagcgccaccagcagccagagcaagaaggagaagagaaagaacagatag

SEQ ID NO: 9748 - DNA, 945 bp, synthetic construct
  source 1..945: mol_type = other DNA; note = Synthetic coding sequence
atgcccggcttcacctgctgcgtgcccggctgctacaacaacagccacagagacaaggccctgcacttctacaccttccccaaggacgccgagctgagaagactgtggctgaagaacgtgagcagagccggcgtgagcggctgcttcagcaccttccagcccaccaccggccacagactgtgcagcgtgcacttccagggcggcagaaagacctacaccgtgagagtgcccaccatcttccccctgagaggcgtgaacgagagaaaggtggccagaagacccgccggcgccgccgccgccagaagaagacagcagcagcagcagcagcagcagcagcagcagcagcagcagcagcagcagcagcagcagcagcagcagcagcagcagcagcagcagagcagccccagcgccagcaccgcccagaccgcccagctgcagcccaacctggtgagcgccagcgccgccgtgctgctgaccctgcaggccaccgtggacagcagccaggcccccggcagcgtgcagcccgcccccatcacccccaccggcgaggacgtgaagcccatcgacctgaccgtgcaggtggagttcgccgccgccgagggcgccgccgccgccgccgccgccagcgagctgcaggccgccaccgccggcctggaggccgccgagtgccccatgggcccccagctggtggtggtgggcgaggagggcttccccgacaccggcagcgaccacagctacagcctgagcagcggcaccaccgaggaggagctgctgagaaagctgaacgagcagagagacatcctggccctgatggaggtgaagatgaaggagatgaagggcagcatcagacacctgagactgaccgaggccaagctgagagaggagctgagagagaaggacagactgctggccatggccgtgatcagaaagaagcacggcatgtag

SEQ ID NO: 9749 - DNA, 645 bp, synthetic construct
  source 1..645: mol_type = other DNA; note = Synthetic coding sequence
atggccggcgagaacttcgccacccccttccacggccacgtgggcagaggcgccttcagcgacgtgtacgagcccgccgaggacaccttcctgctgctgaacgccctggaggccgccgccgccgagctggccggcgtggagatctgcctggaggtgggcagcggcagcggcgtggtgagcgccttcctggccagcatgatcggcccccaggccctgtacatgtgcaccgacatcaaccccgaggccgccgcctgcaccctggagaccgccagatgcaacaaggtgcacatccagcccgtgatcaccgacctggtgaagggcctgctgcccagactgaccgagaaggtggacctgctggtgttcaaccccccctacgtggtgacccccccccaggaggtgggcagccacggcatcgaggccgcctgggccggcggcaagaacggcagagaggtgatggacagattcttccccctggtgcccgacctgctgagccccaagggcctgttctacctggtgaccatcaaggagaacaaccccgaggagatcctgaagatcatgaagaccaagggcctgcagggcaccaccgccctgagcagacaggccggccaggagaccctgagcgtgctgaagttcaccaagagctag

SEQ ID NO: 9750 - DNA, 1536 bp, synthetic construct
  source 1..1536: mol_type = other DNA; note = Synthetic coding sequence
atgagcggcggcttcgagctgcagcccagagacggcggccccagagtggccctggcccccggcgagaccgtgatcggcagaggccccctgctgggcatcaccgacaagagagtgagcagaagacacgccatcctggaggtggccggcggccagctgagaatcaagcccatccacaccaacccctgcttctaccagagcagcgagaagagccagctgctgcccctgaagcccaacctgtggtgctacctgaaccccggcgacagcttcagcctgctggtggacaagtacatcttcagaatcctgagcatccccagcgaggtggagatgcagtgcaccctgagaaacagccaggtgctggacgaggacaacatcctgaacgagacccccaagagccccgtgatcaacctgccccacgagaccaccggcgccagccagctggagggcagcaccgagatcgccaagacccagatgacccccaccaacagcgtgagcttcctgggcgagaacagagactgcaacaagcagcagcccatcctggccgagagaaagagaatcctgcccacctggatgctggccgagcacctgagcgaccagaacctgagcgtgcccgccatcagcggcggcaacgtgatccagggcagcggcaaggaggagatctgcaaggacaagagccagctgaacaccacccagcagggcagaagacagctgatcagcagcggcagcagcgagaacaccagcgccgagcaggacaccggcgaggagtgcaagaacaccgaccaggaggagagcaccatcagcagcaaggagatgccccagagcttcagcgccatcaccctgagcaacaccgagatgaacaacatcaagaccaacgcccagagaaacaagctgcccatcgaggagctgggcaaggtgagcaagcacaagatcgccaccaagagaaccccccacaaggaggacgaggccatgagctgcagcgagaactgcagcagcgcccagggcgacagcctgcaggacgagagccagggcagccacagcgagagcagcagcaaccccagcaaccccgagaccctgcacgccaaggccaccgacagcgtgctgcagggcagcgagggcaacaaggtgaagagaaccagctgcatgtacggcgccaactgctacagaaagaaccccgtgcacttccagcacttcagccaccccggcgacagcgactacggcggcgtgcagatcgtgggccaggacgagaccgacgacagacccgagtgcccctacggccccagctgctacagaaagaacccccagcacaagatcgagtacagacacaacaccctgcccgtgagaaacgtgctggacgaggacaacgacaacgtgggccagcccaacgagtacgacctgaacgacagcttcctggacgacgaggaggaggactacgagcccaccgacgaggacagcgactgggagcccggcaaggaggacgaggagaaggaggacgtggaggagctgctgaaggaggccaagagattcatgaagagaaagtag

SEQ ID NO: 9751 - DNA, 984 bp, synthetic construct
  source 1..984: mol_type = other DNA; note = Synthetic coding sequence
atggccgccgccgccgccgccgccgccgccaccaacggcaccggcggcagcagcggcatggaggtggacgccgccgtggtgcccagcgtgatggcctgcggcgtgaccggcagcgtgagcgtggccctgcaccccctggtgatcctgaacatcagcgaccactggatcagaatgagaagccaggagggcagacccgtgcaggtgatcggcgccctgatcggcaagcaggagggcagaaacatcgaggtgatgaacagcttcgagctgctgagccacaccgtggaggagaagatcatcatcgacaaggagtactactacaccaaggaggagcagttcaagcaggtgttcaaggagctggagttcctgggctggtacaccaccggcggcccccccgaccccagcgacatccacgtgcacaagcaggtgtgcgagatcatcgagagccccctgttcctgaagctgaaccccatgaccaagcacaccgacctgcccgtgagcgtgttcgagagcgtgatcgacatcatcaacggcgaggccaccatgctgttcgccgagctgacctacaccctggccaccgaggaggccgagagaatcggcgtggaccacgtggccagaatgaccgccaccggcagcggcgagaacagcaccgtggccgagcacctgatcgcccagcacagcgccatcaagatgctgcacagcagagtgaagctgatcctggagtacgtgaaggccagcgaggccggcgaggtgcccttcaaccacgagatcctgagagaggcctacgccctgtgccactgcctgcccgtgctgagcaccgacaagttcaagaccgacttctacgaccagtgcaacgacgtgggcctgatggcctacctgggcaccatcaccaagacctgcaacaccatgaaccagttcgtgaacaagttcaacgtgctgtacgacagacagggcatcggcagaagaatgagaggcctgttcttctag

SEQ ID NO: 9752 - DNA, 2574 bp, synthetic construct
  source 1..2574: mol_type = other DNA; note = Synthetic coding sequence
atgaactaccagcagcagctggccaacagcgccgccatcagagccgagatccagagattcgagagcgtgcaccccaacatctacagcatctacgagctgctggagagagtggaggagcccgtgctgcagaaccagatcagagagcacgtgatcgccatcgaggacgccttcgtgaacagccaggagtggaccctgagcagaagcgtgcccgagctgaaggtgggcatcgtgggcaacctggccagcggcaagagcgccctggtgcacagatacctgaccggcacctacgtgcaggaggagagccccgagggcggcagattcaagaaggagatcgtggtggacggccagagctacctgctgctgatcagagacgagggcggcccccccgaggcccagttcgccatgtgggtggacgccgtgatcttcgtgttcagcctggaggacgagatcagcttccagaccgtgtaccactactacagcagaatggccaactacagaaacaccagcgagatccccctggtgctggtgggcacccaggacgccatcagcagcgccaaccccagagtgatcgacgacgccagagccagaaagctgagcaacgacctgaagagatgcacctactacgagacctgcgccacctacggcctgaacgtggagagagtgttccaggacgtggcccagaagatcgtggccaccagaaagaagcagcagctgagcatcggcccctgcaagagcctgcccaacagccccagccacagcagcgtgtgcagcgcccaggtgagcgccgtgcacatcagccagaccagcaacggcggcggcagcctgagcgactacagcagcagcgtgcccagcacccccagcaccagccagaaggagctgagaatcgacgtgccccccaccgccaacacccccacccccgtgagaaagcagagcaagagaagaagcaacctgttcaccagcagaaagggcagcgaccccgacaaggagaagaagggcctggagagcagagccgacagcatcggcagcggcagagccatccccatcaagcagggcatgctgctgaagagaagcggcaagagcctgaacaaggagtggaagaagaagtacgtgaccctgtgcgacaacggcgtgctgacctaccaccccagcctgcacgactacatgcagaacgtgcacggcaaggagatcgacctgctgagaaccaccgtgaaggtgcccggcaagagaccccccagagccaccagcgcctgcgcccccatcagcagccccaagaccaacggcctgagcaaggacatgagcagcctgcacatcagccccaacagcggcaacgtgaccagcgccagcggcagccagatggccagcggcatcagcctggtgagcttcaacagcagacccgacggcatgcaccagagaagctacagcgtgagcagcgccgaccagtggagcgaggccaccgtgatcgccaacagcgccatcagcagcgacaccggcctgggcgacagcgtgtgcagcagccccagcatcagcagcaccaccagccccaagctggaccccccccccagcccccacgccaacagaaagaagcacagaagaaagaagagcaccagcaacttcaaggccgacggcctgagcggcaccgccgaggagcaggaggagaacttcgagttcatcatcgtgagcctgaccggccagacctggcacttcgaggccaccacctacgaggagagagacgcctgggtgcaggccatcgagagccagatcctggccagcctgcagagctgcgagagcagcaagaacaagagcagactgaccagccagagcgaggccatggccctgcagagcatcagaaacatgagaggcaacagccactgcgtggactgcgagacccagaaccccaactgggccagcctgaacctgggcgccctgatgtgcatcgagtgcagcggcatccacagaaacctgggcacccacctgagcagagtgagaagcctggacctggacgactggcccgtggagctgatcaaggtgatgagcagcatcggcaacgagctggccaacagcgtgtgggaggagagcagccagggcagaaccaagcccagcgtggacagcaccagagaggagaaggagagatggatcagagccaagtacgagcagaagctgttcctggcccccctgccctgcaccgagctgagcctgggccagcacctgctgagagccaccgccgacgaggacctgagaaccgccatcctgctgctggcccacggcagcagagacgaggtgaacgagacctgcggcgagggcgacggcagaaccgccctgcacctggcctgcagaaagggcaacgtggtgctggcccagctgctgatctggtacggcgtggacgtgaccgccagagacgcccacggcaacaccgccctggcctacgccagacaggccagcagccaggagtgcatcgacgtgctgctgcagtacggctgccccgacgagagattcgtgctgatggccacccccaacctgagcagaagaaacaacaacagaaacaacagcagcggcagagtgcccaccatcatctag

SEQ ID NO: 9753 - DNA, 1653 bp, synthetic construct
  source 1..1653: mol_type = other DNA; note = Synthetic coding sequence
atgagccagaccagcctgaagcagaagaagaacgagcccggcatgagaagcagcaaggagagcctggaggccgagaagagaaaggagagcgacaagaccggcgtgagactgagcaaccagggcagccaggagagcagcctgagaaagaccgacagcagaggctacctggtgagaagccagtggagcagaatcagcagaagccccagcaccaaggcccccagcatcgacgagcccagaagcagaaacaccagcgccaagctgcccagcagcagcaccagcagcagaacccccagcaccagccccagcctgcacgacagcagccccccccccctgagcggccagcccagcctgcagccccccgccagcccccagctgcccagaagcctggacagcagaccccccaccccccccgagcccgaccccggcagcagaagaagcaccaagatgcaggagaaccccgaggcctgggcccagggcatcgtgagagagatcagacagaccagagacagccagcccctggagtacagcagaaccagccccaccgagtggaagagcagcagccagagaagaggcatctaccccgccagcacccagctggacagaaacagcctgagcgagcagcagcagcagcagagagaggacgaggacgactacgaggccgcctactgggccagcatgagaagcttctacgagaagaaccccagctgcagcagaccctggccccccaagcccaagaacgccatcaccatcgccctgagcagctgcgccctgttcaacatggtggacggcagaaagatctacgagcaggagggcctggagaagtacatggagtaccagctgaccaacgagaacgtgatcctgacccccggccccgccttcagattcgtgaaggccctgcagtacgtgaacgccagactgagagacctgtaccccgacgagcaggacctgttcgacatcgtgctgatgaccaacaaccacgcccaggtgggcgtgagactgatcaacagcgtgaaccactacggcctgctgatcgacagattctgcctgaccggcggcaaggaccccatcggctacctgaaggcctacctgaccaacctgtacatcgccgccgacagcgagaaggtgcaggaggccatccaggagggcatcgccagcgccaccatgttcgacggcgccaaggacatggcctactgcgacacccagctgagagtggccttcgacggcgacgccgtgctgttcagcgacgagagcgagcacttcaccaaggagcacggcctggacaagttcttccagtacgacaccctgtgcgagagcaagcccctggcccagggccccctgaagggcttcctggaggacctgggcagactgcagaagaagttctacgccaagaacgagagactgctgtgccccatcagaacctacctggtgaccgccagaagcgccgccagcagcggcgccagagtgctgaagaccctgagaagatggggcctggagatcgacgaggccctgttcctggccggcgcccccaagagccccatcctggtgaagatcagaccccacatcttcttcgacgaccacatgttccacatcgagggcgcccagagactgggcagcatcgccgcctacggcttcaacaagaagttcagcagctag

SEQ ID NO: 9754 - DNA, 888 bp, synthetic construct; identical to SEQ ID NO: 9312
  source 1..888: mol_type = other DNA; note = Synthetic coding sequence

SEQ ID NO: 9755 - DNA, 549 bp, synthetic construct
  source 1..549: mol_type = other DNA; note = Synthetic coding sequence
atgagcggcagaagcgtgccccacgcccaccccgccaccgccgagtacgagttcgccaaccccagcagactgggcgagcagagattcggcgagggcctgctgcccgaggagatcctgacccccaccctgtaccacggctactacgtgagacccagagccgcccccgccggcgagggcagcagagccggcgccagcgagctgagactgagcgagggcaagttccaggccttcctggacgtgagccacttcacccccgacgaggtgaccgtgagaaccgtggacaacctgctggaggtgagcgccagacacccccagagactggacagacacggcttcgtgagcagagagttctgcagaacctacgtgctgcccgccgacgtggacccctggagagtgagagccgccctgagccacgacggcatcctgaacctggaggcccccagaggcggcagacacctggacaccgaggtgaacgaggtgtacatcagcctgctgcccgccccccccgaccccgaggaggaggaggaggccgccatcgtggagccctag

SEQ ID NO: 9756 - DNA, 636 bp, synthetic construct
  source 1..636: mol_type = other DNA; note = Synthetic coding sequence
atgagcaccgccgccgtgcccgagctgaagcagatcagcagagtggaggccatgagactgggccccggctggagccacagctgccacgccatgctgtacgccgccaaccccggccagctgttcggcagaatccccatgagattcagcgtgctgatgcagatgagattcgacggcctgctgggcttccccggcggcttcgtggacagaagattctggagcctggaggacggcctgaacagagtgctgggcctgggcctgggctgcctgagactgaccgaggccgactacctgagcagccacctgaccgagggcccccacagagtggtggcccacctgtacgccagacagctgaccctggagcagctgcacgccgtggagatcagcgccgtgcacagcagagaccacggcctggaggtgctgggcctggtgagagtgcccctgtacacccagaaggacagagtgggcggcttccccaacttcctgagcaacgccttcgtgagcaccgccaagtgccagctgctgttcgccctgaaggtgctgaacatgatgcccgaggagaagctggtggaggccctggccgccgccaccgagaagcagaagaaggccctggagaagctgctgcccgccagcagctag

SEQ ID NO: 9757 - DNA, 2622 bp, synthetic construct
  source 1..2622: mol_type = other DNA; note = Synthetic coding sequence
atgcacccccccccccccgccgccgccatggacttcagccagaacagcctgttcggctacatggaggacctgcaggagctgaccatcatcgagagacccgtgagaagaagcctgaagacccccgaggagatcgagagactgaccgtggacgaggacctgagcgacatcgagagagccgtgtacctgctgagcgccggccaggacgtgcagggcaccagcgtgatcgccaacctgcccttcctgatgagacagaaccccaccgagaccctgagaagagtgctgcccaaggtgagagaggccctgcacgtggccggcgtggagatgcagctgaccgccgccatgagcttcctgaccatcctgcaggacgagagcgtgagcatccacgcctacacccacagcttcctgcaggtgatcctgctgcacctggagcacagagacaccggcgtgagcaacgcctggctggagaccctgctgagcgtgatcgaggtgctgcccaaggagaccctgagacacgagatcctgaaccccctggtgagcaaggcccagctgagccagaccgtgcagagcagactggtgagctgcaagatcctgggcaagctgaccaacaagttcgacgcccacaccatcaagagagagatcctgcccctggtgaagagcctgtgccaggacgtggagtacgaggtgagaagctgcatgtgcagacagctggagaacatcgcccagggcatcggcaccgagctgaccaagagcgtggtgctgcccgagctgatcgagctgagcagagacgagggcagcagcgtgagactggccgccttcgagaccctggtgaacctgctggacatcttcgacaccgacgacagaagccagaccatcctgcccctggtgaagagcttctgcgagaagagcttcaaggccgacgagagcatcctgatcagcctgagcttccacctgggcaagctgtgccacggcctgtacggcatcttcacccccgaccagcacctgagattcctggagttctacaagaagctgtgcaccctgggcctgcagcaggagaacggccacaacgagaaccagatccccccccagatcctggagcaggagaagaagtacatcagcgtgagaaagaactgcgcctacaacttccccgccatgatcgtgttcgtggaccccaagaacttccacatggagctgtacagcaccttcttctgcctgtgccacgaccccgaggtgcccgtgagatacaccatcgccatctgcttctacgaggtgagcaagctgctgaacagcggcgtgtacctgatccacaaggagctgatcaccctgctgcaggacgagagcctggaggtgctggacgccctgatcgaccacctgcccgagatcctggagctgatgagcaccggcggcgagagcagcgtgcaggagaacaagctgagcagcctgcccgacctgatccccgccctgaccgccgccgagcagagagccgccgccagcctgaagtggagaacccacgagaagctgctgcagaagtacgcctgcctgccccacgtgatcagcagcgaccagatctactacagattcctgcagagaatgttcaccatcatgatgaccaacaacgtgctgcccgtgcagaaggccgccagcagaaccctgtgcatcttcctgagatacaacagaaagcaggagcagagacacgaggtgatccagaagctgatcgagcagctgggccagggcaagagctactggaacagactgagattcctggacacctgcgagttcatcatcgagatcttcagcaagagcttcttctgcaagtacttcttcctgcccgccatcgagctgacccacgaccccgtggccaacgtgagaatgaagctgtgctacctgctgcccaaggtgaagagcaccctgaagatccccgccgacaagcacctgctgcagcagctggagatgtgcgtgagaaagctgctgtgccaggagaaggacaaggacgtgctggccatcgtgaagagaaccgtgctggagctggacagaatggagatgagcatggacgccttccagaagaagttctacgagaaggacctgctggaccaggagaaggagagagaggagctgctgctgctggagatggagcagctggagaaggagaagcagcagaacgacggcagacccatgagcgacaagatgttcgagaagaagagaagagacaccaagacccccacccagagcctgcccaagaacatccccatcagcgtgcccggccccagcagcgtgacccccagcaccagcaaggagatcaagaagagcaagctgatcagaagccagagcttcaacaaccaggccttccacgccaagtacggcaacctggagaagtgcgccagcaagagcagcaccaccggctacaccaccagcgtgagcggcctgggcaagaccagcgtgctgagcctggccgacgacagcttcagaaccagaaacgccagcagcgtgcccagcagcttcagccccaacacccccctgcccagcaccagcagaggcaccggcaacagcgtggaccccaagagcagcggcagcaaggacacccagcccagaaaggccaccctgaagagcagaaagagcaacccctag

SEQ ID NO: 9758 - DNA, 951 bp, synthetic construct
  source 1..951: mol_type = other DNA; note = Synthetic coding sequence
atgagacagcccctgagctggggcagatggagagccatgctggccagaacctacggccccggccccagcgccggctacagatgggccagcggcgcccagggctacgtgagaaacccccccgtgggcgcctgcgacctgcagggcgagctggacagattcggcggcatcagcgtgagactggccagactggacgccctggacagactggacgccgccgccttccagaagggcctgcaggccgccgtgcagcagtggagaagcgagggcagaaccgccgtgtggctgcacatccccatcctgcagagcagattcatcgcccccgccgccagcctgggcttctgcttccaccacgccgagagcgacagcagcaccctgaccctgtggctgagagagggccccagcagactgcccggctacgccagccaccaggtgggcgtggccggcgccgtgttcgacgagagcaccagaaagatcctggtggtgcaggacagaaacaagctgaagaacatgtggaagttccccggcggcctgagcgagcccgaggaggacatcggcgacaccgccgtgagagaggtgttcgaggagaccggcatcaagagcgagttcagaagcgtgctgagcatcagacagcagcacaccaaccccggcgccttcggcaagagcgacatgtacatcatctgcagactgaagccctacagcttcaccatcaacttctgccaggaggagtgcctgagatgcgagtggatggacctgaacgacctggccaagaccgagaacaccacccccatcaccagcagagtggccagactgctgctgtacggctacagagagggcttcgacaagatcgacctgaccgtggaggagctgcccgccgtgtacaccggcctgttctacaagctgtaccacaaggagctgcccgagaactacaagaccatgaagggcatcgactag

SEQ ID NO: 9759 - DNA, 537 bp, synthetic construct
  source 1..537: mol_type = other DNA; note = Synthetic coding sequence
atgggcgagacctggaagaacatctgcagcaccgtgagacacggctggtggctgagagaccacagaatggccggcctgcccatcccccccgagatcgtgaaggaggccgaggtgccccaggccgccctgggcgtgcccgcccagggcaccggcgacaacggccacacccccgtggaggaggaggtgggcggcatccccgtgcccgcccccggcctgctgcaggtgaccgagagaagacagcccctgagcagcgtgagcagcctggaggtgcacttcgacctgctggacctgaccgagctgaccgacatgagcgaccaggagctggccgaggtgttcgccgacagcgacgacgagaacctgaacaccgagagccccgccggcctgcaccccctgcccagagccggctacctgagaagccccagctggaccagaaccagagccgagcagagccacgagaagcagcccctgggcgaccccgagagacaggccaccgtgctggacaccttcctgaccgtggagagaccccaggaggactag

SEQ ID NO: 9760 - DNA, 741 bp, synthetic construct
  source 1..741: mol_type = other DNA; note = Synthetic coding sequence
atggccgagcaggagcagagaaagatccccctggtgcccgagaacctgctgaagaagagaaaggcctaccaggccctgaaggccacccaggccaagcaggccctgctggccaagaaggagcagaagaagggcaagggcctgagattcaagagactggagagcttcctgcacgacagctggagacagaagagagacaaggtgagactgagaagactggaggtgaagccccacgccctggagctgcccgacaagcacagcctggccttcgtggtgagaatcgagagaatcgacggcgtgagcctgctggtgcagagaaccatcgccagactgagactgaagaagatcttcagcggcgtgttcgtgaaggtgaccccccagaacctgaagatgctgagaatcgtggagccctacgtgacctggggcttccccaacctgaagagcgtgagagagctgatcctgaagagaggccaggccaaggtgaagaacaagaccatccccctgaccgacaacaccgtgatcgaggagcacctgggcaagttcggcgtgatctgcctggaggacctgatccacgagatcgccttccccggcaagcacttccaggagatcagctggttcctgtgccccttccacctgagcgtggccagacacgccaccaagaacagagtgggcttcctgaaggagatgggcacccccggctacagaggcgagagaatcaaccagctgatcagacagctgaactag

SEQ ID NO: 9761 - DNA, 2442 bp, synthetic construct
  source 1..2442: mol_type = other DNA; note = Synthetic coding sequence
atggcctggccctgcatcaccagagcctgctgcatcgccagattctggaaccagctggacaaggccgacatcgccgtgcccctggtgttcaccaagtacagcgaggccaccgagcaccccggcgcccccccccagcccccccccccccagcagcaggcccagcccgccctggccccccccagcgccagagccgtggccatcgagacccagcccgcccagggcgagctggacgccgtggccagagccaccggccccgcccccggccccaccggcgagagagagcccgccgccggccccggcagaagcggccccggccccggcctgggcagcggcagcaccagcggccccgccgacagcgtgatgagacaggactacagagcctggaaggtgcagagacccgagcccagctgcagacccagaagcgagtaccagcccagcgacgcccccttcgagagagagacccagtaccagaaggacttcagagcctggcccctgcccagaagaggcgaccacccctggatccccaagcccgtgcagatcagcgccgccagccaggccagcgcccccatcctgggcgcccccaagagaagaccccagagccaggagagatggcccgtgcaggccgccgccgaggccagagagcaggaggccgcccccggcggcgccggcggcctggccgccggcaaggccagcggcgccgacgagagagacaccagaagaaaggccggccccgcctggatcgtgagaagagccgagggcctgggccacgagcagacccccctgcccgccgcccaggcccaggtgcaggccaccggccccgaggccggcagaggcagagccgccgccgacgccctgaacagacagatcagagaggaggtggccagcgccgtgagcagcagctacagaaacgagttcagagcctggaccgacatcaagcccgtgaagcccatcaaggccaagccccagtacaagccccccgacgacaagatggtgcacgagaccagctacagcgcccagttcaagggcgaggccagcaagcccaccaccgccgacaacaaggtgatcgacagaagaagaatcagaagcctgtacagcgagcccttcaaggagccccccaaggtggagaagcccagcgtgcagagcagcaagcccaagaagaccagcgccagccacaagcccaccagaaaggccaaggacaagcaggccgtgagcggccaggccgccaagaagaagagcgccgagggccccagcaccaccaagcccgacgacaaggagcagagcaaggagatgaacaacaagctggccgaggccaaggagagcctggcccagcccgtgagcgacagcagcaagacccagggccccgtggccaccgagcccgacaaggaccagggcagcgtggtgcccggcctgctgaagggccagggccccatggtgcaggagcccctgaagaagcagggcagcgtggtgcccggcccccccaaggacctgggccccatgatccccctgcccgtgaaggaccaggaccacaccgtgcccgagcccctgaagaacgagagccccgtgatcagcgcccccgtgaaggaccagggccccagcgtgcccgtgccccccaagaaccagagccccatggtgcccgccaaggtgaaggaccagggcagcgtggtgcccgagagcctgaaggaccagggccccagaatccccgagcccgtgaagaaccaggcccccatggtgcccgcccccgtgaaggacgagggccccatggtgagcgccagcgtgaaggaccagggccccatggtgagcgcccccgtgaaggaccagggccccatcgtgcccgcccccgtgaagggcgagggccccatcgtgcccgcccccgtgaaggacgagggccccatggtgagcgcccccatcaaggaccaggaccccatggtgcccgagcaccccaaggacgagagcgccatggccaccgcccccatcaagaaccagggcagcatggtgagcgagcccgtgaagaaccagggcctggtggtgagcggccccgtgaaggaccaggacgtggtggtgcccgagcacgccaaggtgcacgacagcgccgtggtggcccccgtgaagaaccagggccccgtggtgcccgagagcgtgaagaaccaggaccccatcctgcccgtgctggtgaaggaccagggccccaccgtgctgcagccccccaagaaccagggcagaatcgtgcccgagcccctgaagaaccaggtgcccatcgtgcccgtgcccctgaaggaccaggaccccctggtgcccgtgcccgccaaggaccagggccccgccgtgcccgagcccctgaagacccagggccccagagacccccagctgcccaccgtgagccccctgcccagagtgatgatccccaccgccccccacaccgagtacatcgagagcagcccctag

SEQ ID NO: 9762 - DNA, 261 bp, synthetic construct
  source 1..261: mol_type = other DNA; note = Synthetic coding sequence
atgccccagtaccagacctgggaggagttcagcagagccgccgagaagctgtacctggccgaccccatgaaggccagagtggtgctgaagtacagacacagcgacggcaacctgtgcgtgaaggtgaccgacgacctggtgtgcctggtgtacaagaccgaccaggcccaggacgtgaagaagatcgagaagttccacagccagctgatgagactgatggtggccaaggaggccagaaacgtgaccatggagaccgagtag

SEQ ID NO: 9763 - DNA, 1206 bp, synthetic construct
  source 1..1206: mol_type = other DNA; note = Synthetic coding sequence
atggcccacgtgagcagcgagacccaggacgtgagccccaaggacgagctgaccgccagcgaggccagcaccagaagccccctgtgcgagcacaccttccccggcgacagcgacctgagaagcatgatcgaggagcacgccttccaggtgctgagccagggcagcctgctggagagccccagctacaccgtgtgcgtgagcgagcccgacaaggacgacgacttcctgagcctgaacttccccagaaagctgtggaagatcgtggagagcgaccagttcaagagcatcagctgggacgagaacggcacctgcatcgtgatcaacgaggagctgttcaagaaggagatcctggagaccaaggccccctacagaatcttccagaccgacgccatcaagagcttcgtgagacagctgaacctgtacggcttcagcaagatccagcagaacttccagagaagcgccttcctggccaccttcctgagcgaggagaaggagagcagcgtgctgagcaagctgaagttctactacaaccccaacttcaagagaggctacccccagctgctggtgagagtgaagagaagaatcggcgtgaagaacgccagccccatcagcaccctgttcaacgaggacttcaacaagaagcacttcagagccggcgccaacatggagaaccacaacagcgccctggccgccgaggccagcgaggagagcctgttcagcgccagcaagaacctgaacatgcccctgaccagagagagcagcgtgagacagatcatcgccaacagcagcgtgcccatcagaagcggcttccccccccccagccccagcaccagcgtgggccccagcgagcagatcgccaccgaccagcacgccatcctgaaccagctgaccaccatccacatgcacagccacagcacctacatgcaggccagaggccacatcgtgaacttcatcaccaccaccaccagccagtaccacatcatcagccccctgcagaacggctacttcggcctgaccgtggagcccagcgccgtgcccaccagataccccctggtgagcgtgaacgaggccccctacagaaacatgctgcccgccggcaacccctggctgcagatgcccaccatcgccgacagaagcgccgccccccacagcagactggccctgcagcccagccccctggacaagtaccaccccaactacaactag

SEQ ID NO: 9764 - DNA, 4302 bp, synthetic construct
  source 1..4302: mol_type = other DNA; note = Synthetic coding sequence
atgtggagcctgaccgccagcgagggcgagagcaccaccgcccacttcttcctgggcgccggcgacgagggcctgggcaccagaggcatcggcatgagacccgaggagagcgacagcgagctgctggaggacgaggaggacgaggtgccccccgagccccagatcatcgtgggcatctgcgccatgaccaagaagagcaagagcaagcccatgacccagatcctggagagactgtgcagattcgactacctgaccgtggtgatcctgggcgaggacgtgatcctgaacgagcccgtggagaactggcccagctgccactgcctgatcagcttccacagcaagggcttccccctggacaaggccgtggcctacagcaagctgagaaaccccttcctgatcaacgacctggccatgcagtactacatccaggacagaagagaggtgtacagaatcctgcaggaggagggcatcgacctgcccagatacgccgtgctgaacagagaccccgccagacccgaggagtgcaacctgatcgagggcgaggaccaggtggaggtgaacggcgccgtgttccccaagcccttcgtggagaagcccgtgagcgccgaggaccacaacgtgtacatctactaccccagcagcgccggcggcggcagccagagactgttcagaaagatcggcagcagaagcagcgtgtacagccccgagagcagcgtgagaaagaccggcagctacatctacgaggagttcatgcccaccgacggcaccgacgtgaaggtgtacaccgtgggccccgactacgcccacgccgaggccagaaagagccccgccctggacggcaaggtggagagagacagcgagggcaaggagatcagataccccgtgatgctgaccgccatggagaagctggtggccagaaaggtgtgcgtggccttcaagcagaccgtgtgcggcttcgacctgctgagagccaacggccacagcttcgtgtgcgacgtgaacggcttcagcttcgtgaagaacagcatgaagtactacgacgactgcgccaagatcctgggcaacaccatcatgagagagctggccccccagttccagatcccctggagcatccccaccgaggccgaggacatccccatcgtgcccaccaccagcggcaccatgatggagctgagatgcgtgatcgccatcatcagacacggcgacagaacccccaagcagaagatgaagatggaggtgaagcaccccagattcttcgccctgttcgagaagcacggcggctacaagaccggcaagctgaagctgaagagacccgagcagctgcaggaggtgctggacatcaccagactgctgctggccgagctggagaaggagcccggcggcgagatcgaggagaagaccggcaagctggagcagctgaagagcgtgctggagatgtacggccacttcagcggcatcaacagaaaggtgcagctgacctactacccccacggcgtgaaggccagcaacgagggccaggacccccagagagagaccctggcccccagcctgctgctggtgctgaagtggggcggcgagctgacccccgccggcagagtgcaggccgaggagctgggcagagccttcagatgcatgtaccccggcggccagggcgactacgccggcttccccggctgcggcctgctgagactgcacagcaccttcagacacgacctgaagatctacgccagcgacgagggcagagtgcagatgaccgccgccgccttcgccaagggcctgctggccctggagggcgagctgacccccatcctggtgcagatggtgaagagcgccaacatgaacggcctgctggacagcgacggcgacagcctgagcagctgccagcacagagtgaaggccagactgcaccacatcctgcagcaggacgcccccttcggccccgaggactacgaccagctggcccccaccagaagcaccagcctgctgaacagcatgaccatcatccagaaccccgtgaaggtgtgcgaccaggtgttcgccctgatcgagaacctgacccaccagatcagagagagaatgcaggaccccagaagcgtggacctgcagctgtaccacagcgagaccctggagctgatgctgcagagatggagcaagctggagagagacttcagacagaagagcggcagatacgacatcagcaagatccccgacatctacgactgcgtgaagtacgacgtgcagcacaacggcagcctgggcctgcagggcaccgccgagctgctgagactgagcaaggccctggccgacgtggtgatcccccaggagtacggcatcagcagagaggagaagctggagatcgccgtgggcttctgcctgcccctgctgagaaagatcctgctggacctgcagagaacccacgaggacgagagcgtgaacaagctgcaccccctgtgctacctgagatacagcagaggcgtgctgagccccggcagacacgtgagaaccagactgtacttcaccagcgagagccacgtgcacagcctgctgagcgtgttcagatacggcggcctgctggacgagacccaggacgcccagtggcagagagccctggactacctgagcgccatcagcgagctgaactacatgacccagatcgtgatcatgctgtacgaggacaacacccaggaccccctgagcgaggagagattccacgtggagctgcacttcagccccggcgtgaagggcgtggaggaggagggcagcgcccccgccggctgcggcttcagacccgccagcagcgagaacgaggagatgaagaccaaccagggcagcatggagaacctgtgccccggcaaggccagcgacgagcccgacagagccctgcagaccagcccccagccccccgagggccccggcctgcccagaagaagccccctgatcagaaacagaaaggccggcagcatggaggtgctgagcgagaccagcagcagcagacccggcggctacagactgttcagcagcagcagaccccccaccgagatgaagcagagcggcctgggcagccagtgcaccggcctgttcagcaccaccgtgctgggcggcagcagcagcgcccccaacctgcaggactacgccagaagccacggcaagaagctgccccccgccagcctgaagcacagagacgagctgctgttcgtgcccgccgtgaagagattcagcgtgagcttcgccaagcaccccaccaacggcttcgagggctgcagcatggtgcccaccatctaccccctggagaccctgcacaacgccctgagcctgagacaggtgagcgagttcctgagcagagtgtgccagagacacaccgacgcccaggcccaggccagcgccgccctgttcgacagcatgcacagcagccaggccagcgacaaccccttcagcccccccagaaccctgcacagcccccccctgcagctgcagcagagaagcgagaagcccccctggtacagcagcggccccagcagcaccgtgagcagcgccggccccagcagccccaccaccgtggacggcaacagccagttcggcttcagcgaccagcccagcctgaacagccacgtggccgaggagcaccagggcctgggcctgctgcaggagacccccggcagcggcgcccaggagctgagcatcgagggcgagcaggagctgttcgagcccaaccagagcccccaggtgccccccatggagaccagccagccctacgaggaggtgagccagccctgccaggaggtgcccgacatcagccagccctgccaggacatcagcgaggccctgagccagccctgccagaaggtgcccgacatcagccagcagtgccaggagaaccacgacaacggcaaccacacctgccaggaggtgccccacatcagccagccctgccagaagagcagccagctgtgccagaaggtgagcgaggaggtgtgccagctgtgcctggagaacagcgaggaggtgagccagccctgccagggcgtgagcgtggaggtgggcaagctggtgcacaagttccacgtgggcgtgggcagcctggtgcaggagaccctggtggaggtgggcagccccgccgaggagatccccgaggaggtgatccagccctaccaggagttcagcgtggaggtgggcagactggcccaggagaccagcgccatcaacctgctgagccagggcatccccgagatcgacaagcccagccaggagttccccgaggagatcgacctgcaggcccaggaggtgcccgaggagatcaactag

SEQ ID NO: 9765 - DNA, 1137 bp, synthetic construct
  source 1..1137: mol_type = other DNA; note = Synthetic coding sequence
atggacagcgtgagaagcggcgccttcggccacctgttcagacccgacaacttcatcttcggccagagcggcgccggcaacaactgggccaagggccactacaccgagggcgccgagctggtggacagcgtgctggacgtggtgagaaaggagtgcgagaactgcgactgcctgcagggcttccagctgacccacagcctgggcggcggcaccggcagcggcatgggcaccctgctgatcagcaaggtgagagaggagtaccccgacagaatcatgaacaccttcagcgtggtgcccagccccaaggtgagcgacaccgtggtggagccctacaacgccaccctgagcatccaccagctggtggagaacaccgacgagacctactgcatcgacaacgaggccctgtacgacatctgcttcagaaccctgaagctggccacccccacctacggcgacctgaaccacctggtgagcgccaccatgagcggcgtgaccaccagcctgagattccccggccagctgaacgccgacctgagaaagctggccgtgaacatggtgcccttccccagactgcacttcttcatgcccggcttcgcccccctgaccgccagaggcagccagcagtacagagccctgaccgtgcccgagctgacccagcagatgttcgacgccaagaacatgatggccgcctgcgaccccagacacggcagatacctgaccgtggccaccgtgttcagaggcagaatgagcatgaaggaggtggacgagcagatgctggccatccagagcaagaacagcagctacttcgtggagtggatccccaacaacgtgaaggtggccgtgtgcgacatcccccccagaggcctgaagatgagcagcaccttcatcggcaacagcaccgccatccaggagctgttcaagagaatcagcgagcagttcaccgccatgttcagaagaaaggccttcctgcactggtacaccggcgagggcatggacgagatggagttcaccgaggccgagagcaacatgaacgacctggtgagcgagtaccagcagtaccaggacgccaccgccgaggaggagggcgagatgtacgaggacgacgaggaggagagcgaggcccagggccccaagtag

SEQ ID NO: 9766 - DNA, 1161 bp, synthetic construct
  source 1..1161: mol_type = other DNA; note = Synthetic coding sequence
atgtgcgagagagccgccagactgtgcagagccggcgcccacagactgctgagagagcccccccagcagggcagagccctgggcggcctgctgagatgggtgggcgccagaatgggcgagcccagagagagcctggcccccgccgcccccgccgaccccggccccgccagccccagaggcggcaccgccgtgatcctggacatcttcagaagagccgacaagaacgacgacggcaagctgagcctggaggagttccagctgttcttcgccgacggcgtgctgaacgagaaggagctggaggacctgttccacaccatcgacagcgacaacaccaaccacgtggacaccaaggagctgtgcgactacttcgtggaccacatgggcgactacgaggacgtgctggccagcctggagaccctgaaccacagcgtgctgaaggccatgggctacaccaagaaggtgtacgagggcggcagcaacgtggaccagttcgtgaccagattcctgctgaaggagaccgccaaccagatccagagcctgctgagcagcgtggagagcgccgtggaggccatcgaggagcagaccagccagctgagacagaaccacatcaagcccagccacagcgccgcccagacctggtgcggcagccccacccccgccagcgcccccaaccacaagctgatggccatggagcagggcaagaccctgcccagcgccaccgaggacgccaaggaggagggcctggaggcccagatcagcagactggccgagctgatcggcagactggagagcaaggccctgtggttcgacctgcagcagagactgagcgacgaggacggcaccaacatgcacctgcagctggtgagacaggagatggccgtgtgccccgagcagctgagcgagttcctggacagcctgagacagtacctgagaggcaccaccggcgtgagaaactgcttccacatcaccgccgtgagactgagcgacggcttcaccttcgtgatctacgagttctgggagaccgaggaggcctggaagagacacctgcagagccccctgtgcaaggccttcagacacgtgaaggtggacaccctgagccagcccgaggccctgagcagaatcctggtgcccgccgcctggtgcaccgtgggcagagactag

SEQ ID NO: 9767 - DNA, 1482 bp, synthetic construct
  source 1..1482: mol_type = other DNA; note = Synthetic coding sequence
atggagagaagccccgacgtgagccccggccccagcagaagcttcaaggaggagctgctgtgcgccgtgtgctacgaccccttcagagacgccgtgaccctgagatgcggccacaacttctgcagaggctgcgtgagcagatgctgggaggtgcaggtgagccccacctgccccgtgtgcaaggacagagccagccccgccgacctgagaaccaaccacaccctgaacaacctggtggagaagctgctgagagaggaggccgagggcgccagatggaccagctacagattcagcagagtgtgcagactgcacagaggccagctgagcctgttctgcctggaggacaaggagctgctgtgctgcagctgccaggccgaccccagacaccagggccacagagtgcagcccgtgaaggacaccgcccacgacttcagagccaagtgcagaaacatggagcacgccctgagagagaaggccaaggccttctgggccatgagaagaagctacgaggccatcgccaagcacaaccaggtggaggccgcctggctggagggcagaatcagacaggagttcgacaagctgagagagttcctgagagtggaggagcaggccatcctggacgccatggccgaggagaccagacagaagcagctgctggccgacgagaagatgaagcagctgaccgaggagaccgaggtgctggcccacgagatcgagagactgcagatggagatgaaggaggacgacgtgagcttcctgatgaagcacaagagcagaaagagaagactgttctgcaccatggagcccgagcccgtgcagcccggcatgctgatcgacgtgtgcaagtacctgggcagcctgcagtacagagtgtggaagaagatgctggccagcgtggagagcgtgcccttcagcttcgaccccaacaccgccgccggctggctgagcgtgagcgacgacctgaccagcgtgaccaaccacggctacagagtgcaggtggagaaccccgagagattcagcagcgccccctgcctgctgggcagcagagtgttcagccagggcagccacgcctgggaggtggccctgggcggcctgcagagctggagagtgggcgtggtgagagtgagacaggacagcggcgccgagggccacagccacagctgctaccacgacaccagaagcggcttctggtacgtgtgcagaacccagggcgtggagggcgaccactgcgtgaccagcgaccccgccaccagccccctggtgctggccatccccagaagactgagagtggagctggagtgcgaggagggcgagctgagcttctacgacgccgagagacactgccacctgtacaccttccacgccagattcggcgaggtgagaccctacttctacctgggcggcgccagaggcgccggcccccccgagcccctgagaatctgccccctgcacatcagcgtgaaggaggagctggacggctag

SEQ ID NO: 9768 - DNA, 2262 bp, synthetic construct
  source 1..2262: mol_type = other DNA; note = Synthetic coding sequence
atggcccccgacagcgaccccttccccgagggccccctgctgaagctgctgcccctggacgccagagacagaggcacccagagatgcagactgggccccgccgccctgcacgccctgggcgccagactgggcagcgccgtgaagatcagcctgcccgacggcggcagctgcctgtgcaccgcctggcccagaagagacggcgccgacggcttcgtgcagctggaccccctgtgcgccagccccggcgccgccgtgggcgccagcagaagcagaagaagcctgagcctgaacagactgctgctggtgccctgcccccccctgagaagagtggccgtgtggcccgtgctgagagagagagccggcgcccccggcgccagaaacaccgccgccgtgctggaggccgcccaggagctgctgagaaacagacccatcagcctgggccacgtggtggtggccccccccggcgcccccggcctggtggccgccctgcacatcgtgggcggcacccccagccccgaccccgccggcctggtgacccccagaaccagagtgagcctgggcggcgagccccccagcgaggcccagccccagcccgaggtgcccctgggcggcctgagcgaggccgccgacagcctgagagagctgctgagactgcccctgagataccccagagccctgaccgccctgggcctggccgtgcccagaggcgtgctgctggccggcccccccggcgtgggcaagacccagctggtgagagccgtggccagagaggccggcgccgagctgctggccgtgagcgcccccgccctgcagggcagcagacccggcgagaccgaggagaacgtgagaagagtgttccagagagccagagagctggccagcagaggccccagcctgctgttcctggacgagatggacgccctgtgcccccagagaggcagcagagcccccgagagcagagtggtggcccaggtgctgaccctgctggacggcgccagcggcgacagagaggtggtggtggtgggcgccaccaacagacccgacgccctggaccccgccctgagaagacccggcagattcgacagagaggtggtgatcggcacccccaccctgaagcagagaaaggagatcctgcaggtgatcaccagcaagatgcccatcagcagccacgtggacctgggcctgctggccgagatgaccgtgggctacgtgggcgccgacctgaccgccctgtgcagagaggccgccatgcacgccctgctgcacagcgagaagaaccaggacaaccccgtgatcgacgagatcgacttcctggaggccttcaagaacatccagcccagcagcttcagaagcgtgatcggcctgatggacatcaagcccgtggactgggaggagatcggcggcctggaggacgtgaagctgaagctgaagcagagcatcgagtggcccctgaagttcccctgggagttcgtgagaatgggcctgacccagcccaagggcgtgctgctgtacggcccccccggctgcgccaagaccaccctggtgagagccctggccaccagctgccactgcagcttcgtgagcgtgagcggcgccgacctgttcagccccttcgtgggcgacagcgagaaggtgctgagccagatcttcagacaggccagagccagcacccccgccatcctgttcctggacgagatcgacagcatcctgggcgccagaagcgccagcaagaccggctgcgacgtgcaggagagagtgctgagcgtgctgctgaacgagctggacggcgtgggcctgaagaccatcgagagaagaggcagcaagagcagccagcaggagttccaggaggtgttcaacagaagcgtgatgatcatcgccgccaccaacagacccgacgtgctggacaccgccctgctgagacccggcagactggacaagatcatctacatccccccccccgaccacaagggcagactgagcatcctgaaggtgtgcaccaagaccatgcccatcggccccgacgtgagcctggagaacctggccgccgagacctgcttcttcagcggcgccgacctgagaaacctgtgcaccgaggccgccctgctggccctgcaggagaacggcctggacgccaccaccgtgaagcaggagcacttcctgaagagcctgaagaccgtgaagcccagcctgagctgcaaggacctggccctgtacgagaacctgttcaagaaggagggcttcagcaacgtggagggcatctag

SEQ ID NO: 9769 - DNA, 1026 bp, synthetic construct
  source 1..1026: mol_type = other DNA; note = Synthetic coding sequence
atgcccaagagaaaggtgaccttccagggcgtgggcgacgaggaggacgaggacgagatcatcgtgcccaagaagaagctggtggaccccgtggccggcagcggcggccccggcagcagattcaagggcaagcacagcctggacagcgacgaggaggaggacgacgacgacggcggcagcagcaagtacgacatcctggccagcgaggacgtggagggccaggaggccgccaccctgcccagcgagggcggcgtgagaatcacccccttcaacctgcaggaggagatggaggagggccacttcgacgccgacggcaactacttcctgaacagagacgcccagatcagagacagctggctggacaacatcgactgggtgaagatcagagagagaccccccggccagagacaggccagcgacagcgaggaggaggacagcctgggccagaccagcatgagcgcccaggccctgctggagggcctgctggagctgctgctgcccagagagaccgtggccggcgccctgagaagactgggcgccagaggcggcggcaagggcagaaagggccccggccagcccagcagcccccagagactggacagactgagcggcctggccgaccagatggtggccagaggcaacctgggcgtgtaccaggagaccagagagagactggccatgagactgaagggcctgggctgccagaccctgggcccccacaaccccacccccccccccagcctggacatgttcgccgaggagctggccgaggaggagctggagacccccacccccacccagagaggcgaggccgagagcagaggcgacggcctggtggacgtgatgtgggagtacaagtgggagaacaccggcgacgccgagctgtacggccccttcaccagcgcccagatgcagacctgggtgagcgagggctacttccccgacggcgtgtactgcagaaagctggacccccccggcggccagttctacaacagcaagagaatcgacttcgacctgtacacctag

SEQ ID NO: 9770 - DNA, 690 bp, synthetic construct
  source 1..690: mol_type = other DNA; note = Synthetic coding sequence
atggccgaggagatggagagcagcctggaggccagcttcagcagcagcggcgccgtgagcggcgccagcggcttcctgccccccgccagaagcagaatcttcaagatcatcgtgatcggcgacagcaacgtgggcaagacctgcctgacctacagattctgcgccggcagattccccgacagaaccgaggccaccatcggcgtggacttcagagagagagccgtggagatcgacggcgagagaatcaagatccagctgtgggacaccgccggccaggagagattcagaaagagcatggtgcagcactactacagaaacgtgcacgccgtggtgttcgtgtacgacatgaccaacatggccagcttccacagcctgcccagctggatcgaggagtgcaagcagcacctgctggccaacgacatccccagaatcctggtgggcaacaagtgcgacctgagaagcgccatccaggtgcccaccgacctggcccagaagttcgccgacacccacagcatgcccctgttcgagaccagcgccaagaaccccaacgacaacgaccacgtggaggccatcttcatgaccctggcccacaagctgaagagccacaagcccctgatgctgagccagccccccgacaacggcatcatcctgaagcccgagcccaagcccgccatgacctgctggtgctag

SEQ ID NO: 9771 - DNA, 2352 bp, synthetic construct
  source 1..2352: mol_type = other DNA; note = Synthetic coding sequence
atgctgctgggcttcagaagaggcagaagaagccacttcaagcacatcatccacggcctgctgcccgccgccagcgtggcccccaaggccgccgtgcccagaacccccccccccagaagccccaaccccagccccgagagacccagaagcgccctggccgccgccatcctggccaccaccctgaccggcagaaccgtggccatcccccagcccagacagagaagcagaagcgagagcgacgtgagcagcgtggagcaggacagcttcatcgagccctacgccaccaccagccagctgagacccagacccaactggcagagcgagatgggcagaagaagcagcctgcccagcttcgagaccctggactacggcgacgaggaggacatcgagacccagctgagcagcagcggcaaggagctgggcgacgtgagcgccagagaggacagaggcggccacagcgacgacctgtacgccgtgccccacagaaaccaggtgcccctgctgcacgaggtgaacagcgaggacgacgagaacatcagccaccaggacggcttccccggcagcccccccgccccccagagaacccagcagaaggacggcaagcaccccgtgctgaacctgaaggacgagaagccccccctgtgcgagaagcccccccccagccccgacatcaccggcagagccagacagagatacaccgagatcaccagagagaagttcgaggccctgaaggaggagaacatggacctgaacaacatgaaccagagcctgaccctggagctgaacaccatgaagcaggccatgaaggagctgcagctgaagctgaagggcatggagaaggagaagagaaagctgaaggaggccgagaaggccagcagccaggaggtggccgcccccgagctgctgtacctgagaaagcaggcccaggagctggtggacgagaacgacggcctgaagatgaccgtgcacagactgaacgtggagctgagcagataccagaccaagttcagacacctgagcaaggaggagagcctgaacatcgagggcctgcccagcaagggccccatccccccctggctgctggacatcaagtacctgagccccctgctgctggcctacgaggacatgatgaaggagaaggacgagctgaacgccaccctgaaggaggagatgagaatgttcagaatgagagtgcaggaggtggtgaaggagaacgaggagctgcaccaggagctgaacaagagcagcgccgtgaccagcgaggagtggagacagctgcagacccaggccaagctggtgctggaggagaacaagctgctgctggagcagctggagatccagcagagaaaggccaaggacagccaccaggagagactgcaggaggtgagcaagctgaccaagcagctgatgctgctggaggccaagacccacggccaggagaaggagctggccgagaacagagagcagctggagatcctgagagccaagtgccaggagctgaagacccacagcgacggcaagatcgccgtggaggtgcacaagagcatcgtgaacgagctgaagagccagctgcagaaggaggaggagaaggagagagccgagatggaggagctgatggagaagctgaccgtgctgcaggcccagaagaagagcctgctgctggagaagaacagcctgaccgagcagaacaaggccctggaggccgagctggagagagcccagaagatcaacagaaagagccagaagaagatcgaggtgctgaagaagcaggtggagaaggccatgggcaacgagatgagcgcccaccagtacctggccaacctggtgggcctggccgagaacatcacccaggagagagacagcctgatgtgcctggccaagtgcctggagagcgagaaggacggcgtgctgaacaaggtgatcaagagcaacatcagactgggcaagctggaggagaaggtgaagggctacaagaagcaggccgccctgaagctgggcgacatcagccacagactgctggagcagcaggaggacttcgccggcaagaccgcccagtacagacaggagatgagacacctgcaccaggtgctgaaggacaagcaggaggtgctggaccaggccctgcagcagaacagagagatggagggcgagctggaggtgatctgggagagcaccttcagagagaacagaagaatcagagagctgctgcaggacaccctgaccagaaccggcgtgcaggacaaccccagagccctggtggcccccagcctgaacggcgtgagccaggccgacctgctggacggctgcgacgtgtgcagctacgacctgaagagccacgcccccacctgctag

SEQ ID NO: 9772 - DNA, 639 bp, synthetic construct
  source 1..639: mol_type = other DNA; note = Synthetic coding sequence
atggccgccagaagaggcgccctgatcgtgctggagggcgtggacagagccggcaagagcacccagagcagaaagctggtggaggccctgtgcgccgccggccacagagccgagctgctgagattccccgagagaagcaccgagatcggcaagctgctgagcagctacctgcagaagaagagcgacgtggaggaccacagcgtgcacctgctgttcagcgccaacagatgggagcaggtgcccctgatcaaggagaagctgagccagggcgtgaccctggtggtggacagatacgccttcagcggcgtggccttcaccggcgccaaggagaacttcagcctggactggtgcaagcagcccgacgtgggcctgcccaagcccgacctggtgctgttcctgcagctgcagctggccgacgccgccaagagaggcgccttcggccacgagagatacgagaacggcgccttccaggagagagccctgagatgcttccaccagctgatgaaggacaccaccctgaactggaagatggtggacgccagcaagagcatcgaggccgtgcacgaggacatcagagtgctgagcgaggacgccatcagaaccgccaccgagaagcccctgggcgagctgtggaagtag

SEQ ID NO: 9773 - DNA, 504 bp, synthetic construct
  source 1..504: mol_type = other DNA; note = Synthetic coding sequence
atggaggagacctacaccgacagcctggaccccgagaagctgctgcagtgcccctacgacaagaaccaccagatcagagcctgcagattcccctaccacctgatcaagtgcagaaagaaccaccccgacgtggccagcaagctggccacctgccccttcaacgccagacaccaggtgcccagagccgagatcagccaccacatcagcagctgcgacgacagaagctgcatcgagcaggacgtggtgaaccagaccagaagcctgagacaggagaccctggccgagagcacctggcagtgccccccctgcgacgaggactgggacaaggacctgtgggagcagaccagcacccccttcgtgtggggcaccacccactacagcgacaacaacagccccgccagcaacatcgtgaccgagcacaagaacaacctggccagcggcatgagagtgcccaagagcctgccctacgtgctgccctggaagaacaacggcaacgcccagtag

SEQ ID NO: 9774 - DNA, 381 bp, synthetic construct
  source 1..381: mol_type = other DNA; note = Synthetic coding sequence
atggccgccggccccgagccccccgagtgggagcccagatggagaaaggccctgagaggcaaggagaacaagggcagcgtggagatcatgagaaaggacctgaacgacgccagagacctgcacggccaggccgagagcgccgccgccgtgtggaagggccacgtgatggacagaagaaagaaggccctgaccgactacaagaagctgagagccttcttcgtggaggaggaggagcacttcctgcaggaggccgagaaggaggagggcctgcccgaggacgagctggccgaccccaccgagagattcagaagcctgctgcaggccgtgagcgagctggagaagaagcacagaaacctgggcctgagcatgctgctgcagtag

SEQ ID NO: 9775 - DNA, 1668 bp, synthetic construct
  source 1..1668: mol_type = other DNA; note = Synthetic coding sequence
atgcagagctgcgagagcagcggcgacagcgccgacgaccccctgagcagaggcctgagaagaagaggccagcccagagtggtggtgatcggcgccggcctggccggcctggccgccgccaaggccctgctggagcagggcttcaccgacgtgaccgtgctggaggccagcagccacatcggcggcagagtgcagagcgtgaagctgggccacgccaccttcgagctgggcgccacctggatccacggcagccacggcaaccccatctaccacctggccgaggccaacggcctgctggaggagaccaccgacggcgagagaagcgtgggcagaatcagcctgtacagcaagaacggcgtggcctgctacctgaccaaccacggcagaagaatccccaaggacgtggtggaggagttcagcgacctgtacaacgaggtgtacaacctgacccaggagttcttcagacacgacaagcccgtgaacgccgagagccagaacagcgtgggcgtgttcaccagagaggaggtgagaaacagaatcagaaacgaccccgacgaccccgaggccaccaagagactgaagctggccatgatccagcagtacctgaaggtggagagctgcgagagcagcagccacagcatggacgaggtgagcctgagcgccttcggcgagtggaccgagatccccggcgcccaccacatcatccccagcggcttcatgagagtggtggagctgctggccgagggcatccccgcccacgtgatccagctgggcaagcccgtgagatgcatccactgggaccaggccagcgccagacccagaggccccgagatcgagcccagaggcgagggcgaccacaaccacgacaccggcgagggcggccagggcggcgaggagcccagaggcggcagatgggacgaggacgagcagtggagcgtggtggtggagtgcgaggactgcgagctgatccccgccgaccacgtgatcgtgaccgtgagcctgggcgtgctgaagagacagtacaccagcttcttcagacccggcctgcccaccgagaaggtggccgccatccacagactgggcatcggcaccaccgacaagatcttcctggagttcgaggagcccttctggggccccgagtgcaacagcctgcagttcgtgtgggaggacgaggccgagagccacaccctgacctacccccccgagctgtggtacagaaagatctgcggcttcgacgtgctgtacccccccgagagatacggccacgtgctgagcggctggatctgcggcgaggaggccctggtgatggagaagtgcgacgacgaggccgtggccgagatctgcaccgagatgctgagacagttcaccggcaaccccaacatccccaagcccagaagaatcctgagaagcgcctggggcagcaacccctacttcagaggcagctacagctacacccaggtgggcagcagcggcgccgacgtggagaagctggccaagcccctgccctacaccgagagcagcaagaccgcccccatgcaggtgctgttcagcggcgaggccacccacagaaagtactacagcaccacccacggcgccctgctgagcggccagagagaggccgccagactgatcgagatgtacagagacctgttccagcagggcacctag

SEQ ID NO: 9776 - DNA, 3153 bp, synthetic construct
  source 1..3153: mol_type = other DNA; note = Synthetic coding sequence
atggccctgtacgacgaggacctgctgaagaaccccttctacctggccctgcagaagtgcagacccgacctgtgcagcaaggtggcccagatccacggcatcgtgctggtgccctgcaagggcagcctgagcagcagcatccagagcacctgccagttcgagagctacatcctgatccccgtggaggagcacttccagaccctgaacggcaaggacgtgttcatccagggcaacagaatcaagctgggcgccggcttcgcctgcctgctgagcgtgcccatcctgttcgaggagaccttctacaacgagaaggaggagagcttcagcatcctgtgcatcgcccaccccctggagaagagagagagcagcgaggagcccctggcccccagcgaccccttcagcctgaagaccatcgaggacgtgagagagttcctgggcagacacagcgagagattcgacagaaacatcgccagcttccacagaaccttcagagagtgcgagagaaagagcctgagacaccacatcgacagcgccaacgccctgtacaccaagtgcctgcagcagctgctgagagacagccacctgaagatgctggccaagcaggaggcccagatgaacctgatgaagcaggccgtggagatctacgtgcaccacgagatctacaacctgatcttcaagtacgtgggcaccatggaggccagcgaggacgccgccttcaacaagatcaccagaagcctgcaggacctgcagcagaaggacatcggcgtgaagcccgagttcagcttcaacatccccagagccaagagagagctggcccagctgaacaagtgcaccagcccccagcagaagctggtgtgcctgagaaaggtggtgcagctgatcacccagagccccagccagagagtgaacctggagaccatgtgcgccgacgacctgctgagcgtgctgctgtacctgctggtgaagaccgagatccccaactggatggccaacctgagctacatcaagaacttcagattcagcagcctggccaaggacgagctgggctactgcctgaccagcttcgaggccgccatcgagtacatcagacagggcagcctgagcgccaagccccccgagagcgagggcttcggcgacagactgttcctgaagcagagaatgagcctgctgagccagatgaccagcagccccaccgactgcctgttcaagcacatcgccagcggcaaccagaaggaggtggagagactgctgagccaggaggaccacgacaaggacaccgtgcagaagatgtgccaccccctgtgcttctgcgacgactgcgagaagctggtgagcggcagactgaacgaccccagcgtggtgacccccttcagcagagacgacagaggccacacccccctgcacgtggccgccgtgtgcggccaggccagcctgatcgacctgctggtgagcaagggcgccatggtgaacgccaccgactaccacggcgccacccccctgcacctggcctgccagaagggctaccagagcgtgaccctgctgctgctgcactacaaggccagcgccgaggtgcaggacaacaacggcaacacccccctgcacctggcctgcacctacggccacgaggactgcgtgaaggccctggtgtactacgacgtggagagctgcagactggacatcggcaacgagaagggcgacacccccctgcacatcgccgccagatggggctaccagggcgtgatcgagaccctgctgcagaacggcgccagcaccgagatccagaacagactgaaggagacccccctgaagtgcgccctgaacagcaagatcctgagcgtgatggaggcctaccacctgagcttcgagagaagacagaagagcagcgaggcccccgtgcagagcccccagagaagcgtggacagcatcagccaggagagcagcaccagcagcttcagcagcatgagcgccagcagcagacaggaggagaccaagaaggactacagagaggtggagaagctgctgagagccgtggccgacggcgacctggagatggtgagatacctgctggagtggaccgaggaggacctggaggacgccgaggacaccgtgagcgccgccgaccccgagttctgccaccccctgtgccagtgccccaagtgcgcccccgcccagaagagactggccaaggtgcccgccagcggcctgggcgtgaacgtgaccagccaggacggcagcagccccctgcacgtggccgccctgcacggcagagccgacctgatccccctgctgctgaagcacggcgccaacgccggcgccagaaacgccgaccaggccgtgcccctgcacctggcctgccagcagggccacttccaggtggtgaagtgcctgctggacagcaacgccaagcccaacaagaaggacctgagcggcaacacccccctgatctacgcctgcagcggcggccaccacgagctggtggccctgctgctgcagcacggcgccagcatcaacgccagcaacaacaagggcaacaccgccctgcacgaggccgtgatcgagaagcacgtgttcgtggtggagctgctgctgctgcacggcgccagcgtgcaggtgctgaacaagagacagagaaccgccgtggactgcgccgagcagaacagcaagatcatggagctgctgcaggtggtgcccagctgcgtggccagcctggacgacgtggccgagaccgacagaaaggagtacgtgaccgtgaagatcagaaagaagtggaacagcaagctgtacgacctgcccgacgagcccttcaccagacagttctacttcgtgcacagcgccggccagttcaagggcaagaccagcagagagatcatggccagagacagaagcgtgcccaacctgaccgagggcagcctgcacgagcccggcagacagagcgtgaccctgagacagaacaacctgcccgcccagagcggcagccacgccgccgagaagggcaacagcgactggcccgagagacccggcctgacccagaccggccccggccacagaagaatgctgagaagacacaccgtggaggacgccgtggtgagccagggccccgaggccgccggccccctgagcaccccccaggaggtgagcgccagcagaagctag

SEQ ID NO: 9777 - DNA, 1662 bp, synthetic construct
  source 1..1662: mol_type = other DNA; note = Synthetic coding sequence
atggacgtggacaaggagctgggcatggagagcgtgaaggccggcgccagcggcaagcccgagatgagactgggcacccaggaggagaccagcgagggcgacgccaacgagagcagcctgctggtgctgagcagcaacgtgcccctgctggccctggagttcctggagatcgcccaggccaaggagaaggccttcctgcccatggtgagccacaccttccacatgagaaccgaggagagcgacgccagccaggagggcgacgacctgcccaagagcagcgccaacaccagccaccccaagcaggacgacagccccaagagcagcgaggagaccatccagcccaaggagggcgacatccccaaggcccccgaggagaccatccagagcaagaaggaggacctgcccaagagcagcgagaaggccatccagcccaaggagagcaacatccccaagagcagcgccaagcccatccagcccaagctgggcaacatccccaaggccagcgtgaagcccagccagcccaaggagggcgacatccccaaggcccccgaggagaccatccagagcaagaaggaggacctgcccaagagcagcgaggaggccatccagcccaaggagggcgacatccccaagagcagcgccaagcccatccagcccaagctgggcaacatcgccaagaccagcgtgaagcccagccagcccaaggagagcgacatccccaagagccccgaggagaccatccagcccaaggagggcgacatccccaagagcagcgccaagcccatccagcccaagctgggcaacatccccaaggccagcgtgaagcccagccagcccaaggagggcgacatcagcaagagccccgaggaggccatccagcccaaggagggcgacctgcccaagagcctggaggaggccatccagcccaaggagggcgacatccccaagagccccgaggaggccatccagcccaaggagggcgacatccccaagagcctggaggaggccatccagcccaaggagggcgacatccccaagagccccgaggagaccatccagcccaagaagggcgacatccccaagagccccgaggaggccatccagcccaaggagggcgacatccccaagagccccaagcaggccatccagcccaaggagggcgacatccccaagagcctggaggaggccatcccccccaaggagatcgacatccccaagagccccgaggagaccatccagcccaaggaggacgacagccccaagagcctggaggaggccacccccagcaaggagggcgacatcctgaagcccgaggaggagaccatggagttccccgagggcgacaaggtgaaggtgatcctgagcaaggaggacttcgaggccagcctgaaggaggccggcgagagactggtggccgtggacttcagcgccacctggtgcggcccctgcagaaccatcagacccttcttccacgccctgagcgtgaagcacgaggacgtggtgttcctggaggtggacgccgacaactgcgaggaggtggtgagagagtgcgccatcatgtgcgtgcccaccttccagttctacaagaaggaggagaaggtggacgagctgtgcggcgccctgaaggagaagctggaggccgtgatcgccgagctgaagtag

SEQ ID NO: 9778 - DNA, 2268 bp, synthetic construct
  source 1..2268: mol_type = other DNA; note = Synthetic coding sequence
atggtgagccacggcagcagccccagcctgctggaggccctgagcagcgacttcctggcctgcaagatctgcctggagcagctgagagcccccaagaccctgccctgcctgcacacctactgccaggactgcctggcccagctggccgacggcggcagagtgagatgccccgagtgcagagagaccgtgcccgtgccccccgagggcgtggccagcttcaagaccaacttcttcgtgaacggcctgctggacctggtgaaggccagagcctgcggcgacctgagagccggcaagcccgcctgcgccctgtgccccctggtgggcggcaccagcaccggcggccccgccaccgccagatgcctggactgcgccgacgacctgtgccaggcctgcgccgacggccacagatgcaccagacagacccacacccacagagtggtggacctggtgggctacagagccggctggtacgacgaggaggccagagagagacaggccgcccagtgcccccagcaccccggcgaggccctgagattcctgtgccagccctgcagccagctgctgtgcagagagtgcagactggacccccacctggaccacccctgcctgcccctggccgaggccgtgagagccagaagacccggcctggagggcctgctggccggcgtggacaacaacctggtggagctggaggccgccagaagagtggagaaggaggccctggccagactgagagagcaggccgccagagtgggcacccaggtggaggaggccgccgagggcgtgctgagagccctgctggcccagaagcaggaggtgctgggccagctgagagcccacgtggaggccgccgaggaggccgccagagagagactggccgagctggagggcagagagcaggtggccagagccgccgccgccttcgccagaagagtgctgagcctgggcagagaggccgagatcctgagcctggagggcgccatcgcccagagactgagacagctgcagggctgcccctgggcccccggccccgccccctgcctgctgccccagctggagctgcaccccggcctgctggacaagaactgccacctgctgagactgagcttcgaggagcagcagccccagaaggacggcggcaaggacggcgccggcacccagggcggcgaggagagccagagcagaagagaggacgagcccaagaccgagagacagggcggcgtgcagccccaggccggcgacggcgcccagacccccaaggaggagaaggcccagaccaccagagaggagggcgcccagaccctggaggaggacagagcccagaccccccacgaggacggcggcccccagccccacagaggcggcagacccaacaagaagaagaagttcaagggcagactgaagagcatcagcagagagcccagccccgccctgggccccaacctggacggcagcggcctgctgcccagacccatcttctactgcagcttccccaccagaatgcccggcgacaagagaagccccagaatcaccggcctgtgccccttcggccccagagagatcctggtggccgacgagcagaacagagccctgaagagattcagcctgaacggcgactacaagggcaccgtgcccgtgcccgagggctgcagcccctgcagcgtggccgccctgcagagcgccgtggccttcagcgccagcgccagactgtacctgatcaaccccaacggcgaggtgcagtggagaagagccctgagcctgagccaggccagccacgccgtggccgccctgcccagcggcgacagagtggccgtgagcgtggccggccacgtggaggtgtacaacatggagggcagcctggccaccagattcatccccggcggcaaggccagcagaggcctgagagccctggtgttcctgaccaccagcccccagggccacttcgtgggcagcgactggcagcagaacagcgtggtgatctgcgacggcctgggccaggtggtgggcgagtacaagggccccggcctgcacggctgccagcccggcagcgtgagcgtggacaagaagggctacatcttcctgaccctgagagaggtgaacaaggtggtgatcctggaccccaagggcagcctgctgggcgacttcctgaccgcctaccacggcctggagaagcccagagtgaccaccatggtggacggcagatacctggtggtgagcctgagcaacggcaccatccacatcttcagagtgagaagccccgacagctag

SEQ ID NO: 9779 - DNA, 1467 bp, synthetic construct
  source 1..1467: mol_type = other DNA; note = Synthetic coding sequence
atggccgccggcagcgaggccaccacccccgtgatcgtggccgccggcgccggcggcgaggagggcgagcacgtgaagcccttcaagcccgagaaggccaaggagatcatcatgagcctgcagcagcccgccatcttctgcaacatggtgttcgactggcccgccagacactggaacgccaagtacctgagccaggtgctgcacggcaagcagatcagattcagaatgggcatgaagagcatgagcaccgtgccccagttcgagaccacctgcaactacgtggaggccaccctggaggagttcctgacctggaactgcgaccagagcagcatcagcggccccttcagagactacgaccacagcaagttctgggcctacgccgactacaagtacttcgtgagcctgttcgaggacaagaccgacctgttccaggacgtgaagtggagcgacttcggcttccccggcagaaacggccaggagagcaccctgtggatcggcagcctgggcgcccacaccccctgccacctggacagctacggctgcaacctggtgttccaggtgcagggcagaaagagatggcacctgttcccccccgaggacacccccttcctgtaccccaccagaatcccctacgaggagagcagcgtgttcagcaagatcaacgtggtgaaccccgacctgaagagattcccccagttcagaaaggcccagagacacgccgtgaccctgagccccggccaggtgctgttcgtgcccagacactggtggcactacgtggagagcatcgaccccgtgaccgtgagcatcaacagctggatcgagctggaggaggaccacctggccagagtggaggaggccatcaccagaatgctggtgtgcgccctgaagaccgccgagaacccccagaacaccagagcctggctgaaccccaccgaggtggaggagaccagccacgccgtgaactgctgctacctgaacgccgccgtgagcgccttcttcgacagatgcagaaccagcgaggtggtggagatccaggccctgagaaccgacggcgagcacatgaagaaggaggagctgaacgtgtgcaaccacatggaggtgggccagaccggcagccagaacctgaccaccggcaccgacaagcccgaggccgccagccccttcggccccgacctggtgcccgtggcccagagaagcgaggagccccccagcgagagaggcggcatcttcggcagcgacggcaaggacttcgtggacaaggacggcgagcacttcggcaagctgcactgcgccaagagacagcagatcatgagcaacagcgagaacgccatcgaggagcagatcgccagcaacaccaccaccaccccccagaccttcatcagcaccgacgacctgctggactgcctggtgaacccccaggtgaccagaatcgtggcccagctgctgatccagggcagaagcctgtag

SEQ ID NO: 9780 - DNA, 579 bp, synthetic construct
  source 1..579: mol_type = other DNA; note = Synthetic coding sequence
atggcccccaagcccggcgccgagtggagcaccgccctgagccacctggtgctgggcgtggtgagcctgcacgccgccgtgagcaccgccgaggccagcagaggcgccgccgccggcttcctgctgcaggtgctggccgccaccaccaccctggcccccggcctgagcacccacgaggactgcctggccggcgcctgggtggccaccgtgatcggcctgcccctgctggccttcgacttccactgggtgaacggcgacagaagcagcgccaacctgctgctgggcggcggcatggtgctggccgtggccggcggccacctgggccccgagggcagaagcgtggccggccaggccatgctgctggtggtggccgtgaccatcctgatcgtggccgtgttcaccgccaacacctacggcatgtggggcggcgccatgctgggcgtggccggcctgctgagcagactggaggaggacagactgctgctgctgcccaaggaggacgtgtgcagatgggccctggccgtgggcagctgggcctactgcagagccctgcacacccagagactgcagtgggagtag

SEQ ID NO: 9781 - DNA, 462 bp, synthetic construct
  source 1..462: mol_type = other DNA; note = Synthetic coding sequence
atgaccagcgagagcaccagcccccccgtggtgccccccctgcacagccccaagagccccgtgtggcccaccttccccttccacagagagggcagcagagtgtgggagagaggcggcgtgccccccagagacctgcccagccccctgcccaccaagagaaccagaacctacagcgccaccgccagagccagcgccggccccgtgttcaagggcgtgtgcaagcagttcagcagaagccagggccacggcttcatcacccccgagaacggcagcgaggacatcttcgtgcacgtgagcgacatcgagggcgagtacgtgcccgtggagggcgacgaggtgacctacaagatgtgccccatcccccccaagaaccagaagttccaggccgtggaggtggtgctgacccagctggccccccacaccccccacgagacctggagcggccaggtggtgggcagctag

SEQ ID NO: 9782 - DNA, 537 bp, synthetic construct
  source 1..537: mol_type = other DNA; note = Synthetic coding sequence
atgagcagcttcagcagagccccccagcagtgggccaccttcgccagaatctggtacctgctggacggcaagatgcagccccccggcaagctggccgccatggccagcatcagactgcagggcctgcacaagcccgtgtaccacgccctgagcgactgcggcgaccacgtggtgatcatgaacaccagacacatcgccttcagcggcaacaagtgggagcagaaggtgtacagcagccacaccggctaccccggcggcttcagacaggtgaccgccgcccagctgcacctgagagaccccgtggccatcgtgaagctggccatctacggcatgctgcccaagaacctgcacagaagaaccatgatggagagactgcacctgttccccgacgagtacatccccgaggacatcctgaagaacctggtggaggagctgccccagcccagaaagatccccaagagactggacgagtacacccaggaggagatcgacgccttccccagactgtggaccccccccgaggactacagactgtag

SEQ ID NO: 9783 - DNA, 8763 bp, synthetic construct
  source 1..8763: mol_type = other DNA; note = Synthetic coding sequence
atgagaggcagaagaggcagaccccccaagcagcccgccgcccccgccgccgagagatgcgcccccgccccccccccccccccccccccccccaccagcggccccatcggcggcctgagaagcagacacagaggcagcagcagaggcagatgggccgccgcccaggccgaggtggcccccaagaccagactgagcagccccagaggcggcagcagcagcagaagaaagccccccccccccccccccgccccccccagcaccagcgcccccggcagaggcggcagaggcggcggcggcggcagaaccggcggcggcggcggcggcggccacctggccagaaccaccgccgccagaagagccgtgaacaaggtggtgtacgacgaccacgagagcgaggaggaggaggaggaggaggacatggtgagcgaggaggaggaggaggaggacggcgacgccgaggagacccaggacagcgaggacgacgaggaggacgagatggaggaggacgacgacgacagcgactaccccgaggagatggaggacgacgacgacgacgccagctactgcaccgagagcagcttcagaagccacagcacctacagcagcacccccggcagaagaaagcccagagtgcacagacccagaagccccatcctggaggagaaggacatcccccccctggagttccccaagagcagcgaggacctgatggtgcccaacgagcacatcatgaacgtgatcgccatctacgaggtgctgagaaacttcggcaccgtgctgagactgagccccttcagattcgaggacttctgcgccgccctggtgagccaggagcagtgcaccctgatggccgagatgcacgtggtgctgctgaaggccgtgctgagagaggaggacaccagcaacaccaccttcggccccgccgacctgaaggacagcgtgaacagcaccctgtacttcatcgacggcatgacctggcccgaggtgctgagagtgtactgcgagagcgacaaggagtaccaccacgtgctgccctaccaggaggccgaggactacccctacggccccgtggagaacaagatcaaggtgctgcagttcctggtggaccagttcctgaccaccaacatcgccagagaggagctgatgagcgagggcgtgatccagtacgacgaccactgcagagtgtgccacaagctgggcgacctgctgtgctgcgagacctgcagcgccgtgtaccacctggagtgcgtgaagccccccctggaggaggtgcccgaggacgagtggcagtgcgaggtgtgcgtggcccacaaggtgcccggcgtgaccgactgcgtggccgagatccagaagaacaagccctacatcagacacgagcccatcggctacgacagaagcagaagaaagtactggttcctgaacagaagactgatcatcgaggaggacaccgagaacgagaacgagaagaagatctggtactacagcaccaaggtgcagctggccgagctgatcgactgcctggacaaggactactgggaggccgagctgtgcaagatcctggaggagatgagagaggagatccacagacacatggacatcaccgaggacctgaccaacaaggccagaggcagcaacaagagcttcctggccgccgccaacgaggagatcctggagagcatcagagccaagaagggcgacatcgacaacgtgaagagccccgaggagaccgagaaggacaagaacgagaccgagaacgacagcaaggacgccgagaagaacagagaggagttcgaggaccagagcctggagaaggacagcgacgacaagacccccgacgacgaccccgagcagggcaagagcgaggtgggcgacttcaagagcgagaagagcaacggcgagctgagcgagagccccggcgccggcaagggcgccagcggcagcaccagaatcatcaccagactgagaaaccccgacagcaagctgagccagctgaagagccagcaggtggccgccgccgcccacgaggccaacaagctgttcaaggagggcaaggaggtgctggtggtgaacagccagggcgagatcagcagactgagcaccaagaaggaggtgatcatgaagggcaacatcaacaactacttcaagctgggccaggagggcaagtacagagtgtaccacaaccagtacagcaccaacagcttcgccctgaacaagcaccagcacagagaggaccacgacaagagaagacacctggcccacaagttctgcctgacccccgccggcgagttcaagtggaacggcagcgtgcacggcagcaaggtgctgaccatcagcaccctgagactgaccatcacccagctggagaacaacatccccagcagcttcctgcaccccaactgggccagccacagagccaactggatcaaggccgtgcagatgtgcagcaagcccagagagttcgccctggccctggccatcctggagtgcgccgtgaagcccgtggtgatgctgcccatctggagagagagcctgggccacaccagactgcacagaatgaccagcatcgagagagaggagaaggagaaggtgaagaagaaggagaagaagcaggaggaggaggagaccatgcagcaggccacctgggtgaagtacaccttccccgtgaagcaccaggtgtggaagcagaagggcgaggagtacagagtgaccggctacggcggctggagctggatcagcaagacccacgtgtacagattcgtgcccaagctgcccggcaacaccaacgtgaactacagaaagagcctggagggcaccaagaacaacatggacgagaacatggacgagagcgacaagagaaagtgcagcagaagccccaagaagatcaagatcgagcccgacagcgagaaggacgaggtgaagggcagcgacgccgccaagggcgccgaccagaacgagatggacatcagcaagatcaccgagaagaaggaccaggacgtgaaggagctgctggacagcgacagcgacaagccctgcaaggaggagcccatggaggtggacgacgacatgaagaccgagagccacgtgaactgccaggagagcagccaggtggacgtggtgaacgtgagcgagggcttccacctgagaaccagctacaagaagaagaccaagagcagcaagctggacggcctgctggagagaagaatcaagcagttcaccctggaggagaagcagagactggagaagatcaagctggagggcggcatcaagggcatcggcaagaccagcaccaacagcagcaagaacctgagcgagagccccgtgatcaccaaggccaaggagggctgccagagcgacagcatgagacaggagcagagccccaacgccaacaacgaccagcccgaggacctgatccagggctgcagcgagagcgacagcagcgtgctgagaatgagcgaccccagccacaccaccaacaagctgtaccccaaggacagagtgctggacgacgtgagcatcagaagccccgagaccaagtgccccaagcagaacagcatcgagaacgacatcgaggagaaggtgagcgacctggccagcagaggccaggagcccagcaagagcaagaccaagggcaacgacttcttcatcgacgacagcaagctggccagcgccgacgacatcggcaccctgatctgcaagaacaagaagcccctgatccaggaggagagcgacaccatcgtgagcagcagcaagagcgccctgcacagcagcgtgcccaagagcaccaacgacagagacgccacccccctgagcagagccatggacttcgagggcaagctgggctgcgacagcgagagcaacagcaccctggagaacagcagcgacaccgtgagcatccaggacagcagcgaggaggacatgatcgtgcagaacagcaacgagagcatcagcgagcagttcagaaccagagagcaggacgtggaggtgctggagcccctgaagtgcgagctggtgagcggcgagagcaccggcaactgcgaggacagactgcccgtgaagggcaccgaggccaacggcaagaagcccagccagcagaagaagctggaggagagacccgtgaacaagtgcagcgaccagatcaagctgaagaacaccaccgacaagaagaacaacgagaacagagagagcgagaagaagggccagagaaccagcaccttccagatcaacggcaaggacaacaagcccaagatctacctgaagggcgagtgcctgaaggagatcagcgagagcagagtggtgagcggcaacgtggagcccaaggtgaacaacatcaacaagatcatccccgagaacgacatcaagagcctgaccgtgaaggagagcgccatcagacccttcatcaacggcgacgtgatcatggaggacttcaacgagagaaacagcagcgagaccaagagccacctgctgagcagcagcgacgccgagggcaactacagagacagcctggagaccctgcccagcaccaaggagagcgacagcacccagaccaccacccccagcgccagctgccccgagagcaacagcgtgaaccaggtggaggacatggagatcgagaccagcgaggtgaagaaggtgaccagcagccccatcaccagcgaggaggagagcaacctgagcaacgacttcatcgacgagaacggcctgcccatcaacaagaacgagaacgtgaacggcgagagcaagagaaagaccgtgatcaccgaggtgaccaccatgaccagcaccgtggccaccgagagcaagaccgtgatcaaggtggagaagggcgacaagcagaccgtggtgagcagcaccgagaactgcgccaagagcaccgtgaccaccaccaccaccaccgtgaccaagctgagcacccccagcaccggcggcagcgtggacatcatcagcgtgaaggagcagagcaagaccgtggtgaccaccaccgtgaccgacagcctgaccaccaccggcggcaccctggtgaccagcatgaccgtgagcaaggagtacagcaccagagacaaggtgaagctgatgaagttcagcagacccaagaagaccagaagcggcaccgccctgcccagctacagaaagttcgtgaccaagagcagcaagaagagcatcttcgtgctgcccaacgacgacctgaagaagctggccagaaagggcggcatcagagaggtgccctacttcaactacaacgccaagcccgccctggacatctggccctaccccagccccagacccaccttcggcatcacctggagatacagactgcagaccgtgaagagcctggccggcgtgagcctgatgctgagactgctgtgggccagcctgagatgggacgacatggccgccaaggccccccccggcggcggcaccaccagaaccgagaccagcgagaccgagatcaccaccaccgagatcatcaagagaagagacgtgggcccctacggcatcagaagcgagtactgcatcagaaagatcatctgccccatcggcgtgcccgagacccccaaggagacccccaccccccagagaaagggcctgagaagcagcgccctgagacccaagagacccgagacccccaagcagaccggccccgtgatcatcgagacctgggtggccgaggaggagctggagctgtgggagatcagagccttcgccgagagagtggagaaggagaaggcccaggccgtggagcagcaggccaagaagagactggagcagcagaagcccaccgtgatcgccaccagcaccaccagccccaccagcagcaccaccagcaccatcagccccgcccagaaggtgatggtggcccccatcagcggcagcgtgaccaccggcaccaagatggtgctgaccaccaaggtgggcagccccgccaccgtgaccttccagcagaacaagaacttccaccagaccttcgccacctgggtgaagcagggccagagcaacagcggcgtggtgcaggtgcagcagaaggtgctgggcatcatccccagcagcaccggcaccagccagcagaccttcaccagcttccagcccagaaccgccaccgtgaccatcagacccaacaccagcggcagcggcggcaccaccagcaacagccaggtgatcaccggcccccagatcagacccggcatgaccgtgatcagaacccccctgcagcagagcaccctgggcaaggccatcatcagaacccccgtgatggtgcagcccggcgccccccagcaggtgatgacccagatcatcagaggccagcccgtgagcaccgccgtgagcgcccccaacaccgtgagcagcacccccggccagaagagcctgaccagcgccaccagcaccagcaacatccagagcagcgccagccagccccccagaccccagcagggccaggtgaagctgaccatggcccagctgacccagctgacccagggccacggcggcaaccagggcctgaccgtggtgatccagggccagggccagaccaccggccagctgcagctgatcccccagggcgtgaccgtgctgcccggccccggccagcagctgatgcaggccgccatgcccaacggcaccgtgcagagattcctgttcacccccctggccaccaccgccaccaccgccagcaccaccaccaccaccgtgagcaccaccgccgccggcaccggcgagcagagacagagcaagctgagcccccagatgcaggtgcaccaggacaagaccctgccccccgcccagagcagcagcgtgggccccgccgaggcccagccccagaccgcccagcccagcgcccagccccagccccagacccagccccagagccccgcccagcccgaggtgcagacccagcccgaggtgcagacccagaccaccgtgagcagccacgtgcccagcgaggcccagcccacccacgcccagagcagcaagccccaggtggccgcccagagccagccccagagcaacgtgcagggccagagccccgtgagagtgcagagccccagccagaccagaatcagacccagcacccccagccagctgagccccggccagcagagccaggtgcagaccaccaccagccagcccatccccatccagccccacaccagcctgcagatccccagccagggccagccccagagccagccccaggtgcagagcagcacccagaccctgagcagcggccagaccctgaaccaggtgaccgtgagcagccccagcagaccccagctgcagatccagcagccccagccccaggtgatcgccgtgccccagctgcagcagcaggtgcaggtgctgagccagatccagagccaggtggtggcccagatccaggcccagcagagcggcgtgccccagcagatcaagctgcagctgcccatccagatccagcagagcagcgccgtgcagacccaccagatccagaacgtggtgaccgtgcaggccgccagcgtgcaggagcagctgcagagagtgcagcagctgagagaccagcagcagaagaagaagcagcagcagatcgagatcaagagagagcacaccctgcaggccagcaaccagagcgagatcatccagaagcaggtggtgatgaagcacaacgccgtgatcgagcacctgaagcagaagaagagcatgacccccgccgagagagaggagaaccagagaatgatcgtgtgcaaccaggtgatgaagtacatcctggacaagatcgacaaggaggagaagcaggccgccaagaagagaaagagagaggagagcgtggagcagaagagaagcaagcagaacgccaccaagctgagcgccctgctgttcaagcacaaggagcagctgagagccgagatcctgaagaagagagccctgctggacaaggacctgcagatcgaggtgcaggaggagctgaagagagacctgaagatcaagaaggagaaggacctgatgcagctggcccaggccaccgccgtggccgccccctgcccccccgtgacccccgccccccccgccccccccgcccccccccccagccccccccccccccccgccgtgcagcacaccggcctgctgagcacccccaccctgcccgccgccagccagaagagaaagagagaggaggagaaggacagcagcagcaagagcaagaagaagaagatgatcagcaccaccagcaaggagaccaagaaggacaccaagctgtactgcatctgcaagaccccctacgacgagagcaagttctacatcggctgcgacagatgccagaactggtaccacggcagatgcgtgggcatcctgcagagcgaggccgagctgatcgacgagtacgtgtgcccccagtgccagagcaccgaggacgccatgaccgtgctgacccccctgaccgagaaggactacgagggcctgaagagagtgctgagaagcctgcaggcccacaagatggcctggcccttcctggagcccgtggaccccaacgacgcccccgactactacggcgtgatcaaggagcccatggacctggccaccatggaggagagagtgcagagaagatactacgagaagctgaccgagttcgtggccgacatgaccaagatcttcgacaactgcagatactacaaccccagcgacagccccttctaccagtgcgccgaggtgctggagagcttcttcgtgcagaagctgaagggcttcaaggccagcagaagccacaacaacaagctgcagagcaccgccagctag

SEQ ID NO: 9784 - DNA, 390 bp, synthetic construct
  source 1..390: mol_type = other DNA; note = Synthetic coding sequence
atggccgaccccagagtgagacagatcaagatcaagaccggcgtggtgaagagactggtgaaggagaaggtgatgtacgagaaggaggccaagcagcaggaggagaagatcgagaagatgagagccgaggacggcgagaactacgacatcaagaagcaggccgagatcctgcaggagagcagaatgatgatccccgactgccagagaagactggaggccgcctacctggacctgcagagaatcctggtgagcaaggacttctgcgtgatgttcaagttcttcttcagcatccagtacatggagagccagaagttcaagtacctgaccctgagaaccagctggcagtacttcctgttcacctgccccctgtacagatacatcctgaagtag

SEQ ID NO: 9785 - DNA, 582 bp, synthetic construct
  source 1..582: mol_type = other DNA; note = Synthetic coding sequence
atgagcgacgacgacagcagagccagcaccagcagcagcagcagcagcagcagcaaccagcagaccgagaaggagaccaacacccccaagaagaaggagagcaaggtgagcatgagcaagaacagcaagctgctgagcaccagcgccaagagaatccagaaggagctggccgacatcaccctggaccccccccccaactgcagcgccggccccaagggcgacaacatctacgagtggagaagcaccatcctgggcccccccggcagcgtgtacgagggcggcgtgttcttcctggacatcaccttcacccccgagtaccccttcaagccccccaaggtgaccttcagaaccagaatctaccactgcaacatcaacagccagggcgtgatctgcctggacatcctgaaggacaactggagccccgccctgaccatcagcaaggtgctgctgagcatctgcagcctgctgaccgactgcaaccccgccgaccccctggtgggcagcatcgccacccagtacatgaccaacagagccgagcacgacagaatggccagacagtggaccaagagatacgccacctag

SEQ ID NO: 9786 - DNA, 1395 bp, synthetic construct
  source 1..1395: mol_type = other DNA; note = Synthetic coding sequence
atgagcctgcagttcagcaacggcagcagacacgtgtgcctgagaagcggcgccggcagcgtgagacccctgaacggcggcgccggcttcgccggcagcagcgcctgcggcggcagcgtggccggcagcgagttcagctgcgccctgggcggcggcctgggcagcgtgcccggcggcagccacgccggcggcgccctgggcaacgccgcctgcatcggcttcgccggcagcgagggcggcctgctgagcggcaacgagaaggtgaccatgcagaacctgaacgacagactggccagctacctggacaacgtgagagccctggaggaggccaacgccgagctggagagaaagatcaagggctggtacgagaagtacggccccggcagctgcagaggcctggaccacgactacagcagataccacctgaccatcgaggacctgaagaacaagatcatcagcagcaccaccaccaacgccaacgtgatcctgcagatcgacaacgccagactggccgccgacgacttcagactgaagtacgagaacgagctgaccctgcaccagaacgtggaggccgacatcaacggcctgagaagagtgctggacgagctgaccctgtgcagaaccgaccaggagctgcagtacgagagcctgagcgaggagatgacctacctgaagaagaaccacgaggaggagatgaaggccctgcagtgcgccgccggcggcaacgtgaacgtggagatgaacgccgcccccggcgtggacctggccgtgctgctgaacaacatgagagccgagtacgaggccctggccgagcagaacagaaaggacgccgaggcctggttcaacgagaagagcgccagcctgcagcagcagatcagccacgacagcggcgccgccaccttcgccagaagccagctgaccgagatgagaagaaccctgcagaccctggagatccagctgcagagcctgatggccaccaagcacagcctggagtgcagcctgaccgagaccgagagcaactactgcacccagctggcccagatccaggcccagatcggcgccctggaggagcagctgcaccaggtgagaaccgagaccgagggccagaagctggagtacgagcacctgctggacgtgaaggtgcacctggagaaggagatcgagacctactgcagactgatcgacggcgacggcaacagctgcagcaagagcaagggcttcggcagcggcagccccggcaacagcagcaaggacctgagcaagaccaccctggtgaagaccgtggtggaggagctggaccagagaggcaaggtgctgagcagcagaatccacagcatcgaggagaagaccagcaagatgaccaacggcaagaccgagcagagagtgcccttctag

SEQ ID NO: 9787 - DNA, 2013 bp, synthetic construct
  source 1..2013: mol_type = other DNA; note = Synthetic coding sequence
atggaggagttcagaagaagctacagcagactgtgcagagagagcggcgccgagccccaggaggccgtgctgcagcagctgcaccagctgcccagaggcagactggacctggccacccagagcctgaccgtggagacctgcagagccctgggcaagctgctgcccagagagaccctgtgcaccgagctggtgctgagcgactgcatgctgagcgaggagggcgccaccctgctgctgagaggcctgtgcgccaacaccgtgctgagattcctggacctgaagggcaacaacctgagagccgccggcgccgaggccctgggcaagctgctgcagcagaacaagagcatccagagcctgaccctggagtggaacagcctgggcacctgggacgacgccttcgccaccttctgcggcggcctggccgccaacggcgccctgcagagactggacctgagaaacaaccagatcagccacaagggcgccgaggagctggccctggccctgaagggcaacaccaccctgcagcagctggacctgagatggaacaacgtgggcctgctgggcggcagagccctgatgaactgcctgcccagcaacagaaccctgtggagactggacctggccggcaacaacatccccggcgacgtgctgagagccgtggagcaggccatgggccacagccaggacagactgaccaccttccaggagaaccaggccagaacccacgtgctgagcaaggaggtgcagcacctgagagaggagaagagcaagcagttcctggacctgatggagaccatcgacaagcagagagaggagatggccaagagcagcagagccagcgccgccagagtgggccagctgcaggaggccctgaacgagagacacagcatcatcaacgccctgaaggccaagctgcagatgaccgaggccgccctggccctgagcgagcagaaggcccaggacctgggcgagctgctggccaccgccgagcaggagcagctgagcctgagccagagacaggccaaggagctgaagctggagcagcaggaggccgccgagagagagagcaagctgctgagagacctgagcgccgccaacgagaagaacctgctgctgcagaaccaggtggacgagctggagagaaagttcagatgccagcaggagcagctgttccagaccagacaggagatgaccagcatgagcgccgagctgaagatgagagccatccaggccgaggagagactggacatggagaagagaagatgcagacagagcctggaggacagcgagagcctgagaatcaaggaggtggagcacatgaccagacacctggaggagagcgagaaggccatgcaggagagagtgcagagactggaggccgccagactgagcctggaggaggagctgagcagagtgaaggccgccgccctgagcgagagaggccaggccgaggaggagctgatcaaggccaagagccaggccagactggaggagcagcagagactggcccacctggaggacaagctgagactgctggcccaggccagagacgaggcccagggcgcctgcctgcagcagaagcaggtggtggccgaggcccagaccagagtgagccagctgggcctgcaggtggagggcctgagaagaagactggaggagctgcagcaggagctgagcctgaaggaccaggagagagtggccgaggtgagcagagtgagagtggagctgcaggagcagaacggcagactgcaggccgagctggccgcccaggaggccctgagagagaaggccgccgccctggagagacagctgaaggtgatggccagcgaccacagagaggccctgctggacagagagagcgagaacgccagcctgagagagaagctgagactgagagaggccgagatcgccagaatcagagacgaggaggcccagagagccagcttcctgcagaacgccgtgctggcctacgtgcaggccagccccgtgagaaccctgagcccccccaagtag

SEQ ID NO: 9788 - DNA, 1782 bp, synthetic construct
  source 1..1782: mol_type = other DNA; note = Synthetic coding sequence
atggagcccgccaccgcccccagacccgacatggcccccgagctgacccccgaggaggagcaggccaccaagcagttcctggaggagatcaacaagtggaccgtgcagtacaacgtgagccccctgagctggaacgtggccgtgaagttcctgatggccagaaagttcgacgtgctgagagccatcgagctgttccacagctacagagagaccagaagaaaggagggcatcgtgaagctgaagccccacgaggagcccctgagaagcgagatcctgagcggcaagttcaccatcctgaacgtgagagaccccaccggcgccagcatcgccctgttcaccgccagactgcaccacccccacaagagcgtgcagcacgtggtgctgcaggccctgttctacctgctggacagagccgtggacagcttcgagacccagagaaacggcctggtgttcatctacgacatgtgcggcagcaactacgccaacttcgagctggacctgggcaagaaggtgctgaacctgctgaagggcgccttccccgccagactgaagaaggtgctgatcgtgggcgcccccatctggttcagagtgccctacagcatcatcagcctgctgctgaaggacaaggtgagagagagaatccagatcctgaagaccagcgaggtgacccagcacctgcccagagagtgcctgcccgagaacctgggcggctacgtgaagatcgacctggccacctggaacttccagttcctgccccaggtgaacggccaccccgaccccttcgacgagatcatcctgttcagcctgccccccgccctggactgggacagcgtgcacgtgcccggcccccacgccatgaccatccaggagctggtggactacgtgaacgccagacagaagcagggcatctacgaggagtacgaggacatcagaagagagaaccccgtgggcaccttccactgcagcatgagccccggcaacctggagaagaacagatacggcgacgtgccctgcctggaccagaccagagtgaagctgaccaagagaagcggccacacccagaccgactacatcaacgccagcttcatggacggctacaagcagaagaacgcctacatcggcacccagggccccctggagaacacctacagagacttctggctgatggtgtgggagcagaaggtgctggtgatcgtgatgaccaccagattcgaggagggcggcagaagaaagtgcggccagtactggcccctggagaaggacagcagaatcagattcggcttcctgaccgtgaccaacctgggcgtggagaacatgaaccactacaagaagaccaccctggagatccacaacaccgaggagagacagaagagacaggtgacccacttccagttcctgagctggcccgactacggcgtgcccagcagcgccgccagcctgatcgacttcctgagagtggtgagaaaccagcagagcctggccgtgagcaacatgggcgccagaagcaagggccagtgccccgagccccccatcgtggtgcactgcagcgccggcatcggcagaaccggcaccttctgcagcctggacatctgcctggcccagctggaggagctgggcaccctgaacgtgttccagaccgtgagcagaatgagaacccagagagccttcagcatccagacccccgagcagtactacttctgctacaaggccatcctggagttcgccgagaaggagggcatggtgagcagcggccagaacctgctggccgtggagagccagtag

SEQ ID NO: 9789 - DNA, 1884 bp, synthetic construct
  source 1..1884: mol_type = other DNA; note = Synthetic coding sequence
atggagggcctggccggctacgtgtacaaggccgccagcgagggcaaggtgctgaccctggccgccctgctgctgaacagaagcgagagcgacatcagatacctgctgggctacgtgagccagcagggcggccagagaagcacccccctgatcatcgccgccagaaacggccacgccaaggtggtgagactgctgctggagcactacagagtgcagacccagcagaccggcaccgtgagattcgacggctacgtgatcgacggcgccaccgccctgtggtgcgccgccggcgccggccacttcgaggtggtgaagctgctggtgagccacggcgccaacgtgaaccacaccaccgtgaccaacagcacccccctgagagccgcctgcttcgacggcagactggacatcgtgaagtacctggtggagaacaacgccaacatcagcatcgccaacaagtacgacaacacctgcctgatgatcgccgcctacaagggccacaccgacgtggtgagatacctgctggagcagagagccgaccccaacgccaaggcccactgcggcgccaccgccctgcacttcgccgccgaggccggccacatcgacatcgtgaaggagctgatcaagtggagagccgccatcgtggtgaacggccacggcatgacccccctgaaggtggccgccgagagctgcaaggccgacgtggtggagctgctgctgagccacgccgactgcgacagaagaagcagaatcgaggccctggagctgctgggcgccagcttcgccaacgacagagagaactacgacatcatcaagacctaccactacctgtacctggccatgctggagagattccaggacggcgacaacatcctggagaaggaggtgctgccccccatccacgcctacggcaacagaaccgagtgcagaaacccccaggagctggagagcatcagacaggacagagacgccctgcacatggagggcctgatcgtgagagagagaatcctgggcgccgacaacatcgacgtgagccaccccatcatctacagaggcgccgtgtacgccgacaacatggagttcgagcagtgcatcaagctgtggctgcacgccctgcacctgagacagaagggcaacagaaacacccacaaggacctgctgagattcgcccaggtgttcagccagatgatccacctgaacgagaccgtgaaggcccccgacatcgagtgcgtgctgagatgcagcgtgctggagatcgagcagagcatgaacagagtgaagaacatcagcgacgccgacgtgcacaacgccatggacaactacgagtgcaacctgtacaccttcctgtacctggtgtgcatcagcaccaagacccagtgcagcgaggaggaccagtgcaagatcaacaagcagatctacaacctgatccacctggaccccagaaccagagagggcttcaccctgctgcacctggccgtgaacagcaacacccccgtggacgacttccacaccaacgacgtgtgcagcttccccaacgccctggtgaccaagctgctgctggactgcggcgccgaggtgaacgccgtggacaacgagggcaacagcgccctgcacatcatcgtgcagtacaacagacccatcagcgacttcctgaccctgcacagcatcatcatcagcctggtggaggccggcgcccacaccgacatgaccaacaagcagaacaagacccccctggacaagagcaccaccggcgtgagcgagatcctgctgaagacccagatgaagatgagcctgaagtgcctggccgccagagccgtgagagccaacgacatcaactaccaggaccagatccccagaaccctggaggagttcgtgggcttccactag

SEQ ID NO: 9790 - DNA, 378 bp, synthetic construct
  source 1..378: mol_type = other DNA; note = Synthetic coding sequence
atgcccagcgagaagaccttcaagcagagaagaaccttcgagcagagagtggaggacgtgagactgatcagagagcagcaccccaccaagatccccgtgatcatcgagagatacaagggcgagaagcagctgcccgtgctggacaagaccaagttcctggtgcccgaccacgtgaacatgagcgagctgatcaagatcatcagaagaagactgcagctgaacgccaaccaggccttcttcctgctggtgaacggccacagcatggtgagcgtgagcacccccatcagcgaggtgtacgagagcgagaaggacgaggacggcttcctgtacatggtgtgcgccagccaggagaccttcggcatgaagctgagcgtgtag

SEQ ID NO: 9791 - DNA, 3786 bp, synthetic construct
  source 1..3786: mol_type = other DNA; note = Synthetic coding sequence
atgggcaccggcgacttcatctgcatcagcatgaccggcggcgccccctggggcttcagactgcagggcggcaaggagcagaagcagcccctgcaggtggccaagatcagaaaccagagcaaggccagcggcagcggcctgtgcgagggcgacgaggtggtgagcatcaacggcaacccctgcgccgacctgacctaccccgaggtgatcaagctgatggagagcatcaccgacagcctgcagatgctgatcaagagacccagcagcggcatcagcgaggccctgatcagcgagaacgagaacaagaacctggagcacctgacccacggcggctacgtggagagcaccaccctgcagatcagacccgccaccaagacccagtgcaccgagttcttcctggcccccgtgaagaccgaggtgcccctggccgagaaccagagaagcggccccgactgcgccggcagcctgaaggaggagaccggccccagctaccagagagccccccagatgcccgacagccagagaggcagagtggccgaggagctgatcctgagagagaaggtggaggccgtgcagcccggccccgtggtggagctgcagctgagcctgagccaggagagacacaagggcgccagcggccccctggtggccctgcccggcgccgagaagagcaagagccccgaccccgaccccaacctgagccacgacagaatcgtgcacatcaacagcatccccaccaacgagaaggccgaccccttcctgagaagcagcaagatcatccagatcagcagcggcagagagctgagagtgatccaggagagcgaggccggcgacgccggcctgcccagagtggaggtgatcctggactgcagcgacagacagaagaccgagggctgcagactgcaggccggcaaggagtgcgtggacagccccgtggagggcggccagagcgaggccccccccagcctggtgagcttcgccgtgagcagcgagggcaccgagcagggcgaggaccccagaagcgagaaggaccacagcagaccccacaagcacagagccagacacgccagactgagaagaagcgagagcctgagcgagaagcaggtgaaggaggccaagagcaagtgcaagagcatcgccctgctgctgaccgacgcccccaaccccaacagcaagggcgtgctgatgttcaagaagagaagaagaagagccagaaagtacaccctggtgagctacggcaccggcgagctggagagagaggccgacgaggaggaggagggcgacaaggaggacacctgcgaggtggccttcctgggcgccagcgagagcgaggtggacgaggagctgctgagcgacgtggacgacaacacccaggtggtgaacttcgactgggacagcggcctggtggacatcgagaagaagctgaacagaggcgacaagatggagatgctgcccgacaccaccggcaagggcgccctgatgttcgccaagagaagagagagaatggaccagatcaccgcccagaaggaggaggacaaggtgggcggcacccccagcagagagcaggacgccgcccagaccgacggcctgagaaccaccaccagctaccagagaaaggaggaggagagcgtgagaacccagagcagcgtgagcaagagctacatcgaggtgagccacggcctgggccacgtgccccagcagaacggcttcagcggcaccagcgagaccgccaacatccagagaatggtgcccatgaacagaaccgccaagcccttccccggcagcgtgaaccagcccgccacccccttcagccccaccagaaacatgaccagccccatcgccgacttccccgccccccccccctacagcgccgtgacccccccccccgacgccttcagcagaggcgtgagcagccccatcgccggccccgcccagccccccccctggccccagcccgccccctggagccagcccgccttctacgacagcagcgagagaatcgccagcagagacgagagaatcagcgtgcccgccaagagaaccggcatcctgcaggaggccaagagaagaagcaccaccaagcccatgttcaccttcaaggagcccaaggtgagccccaaccccgagctgctgagcctgctgcagaacagcgagggcaagagaggcaccggcgccggcggcgacagcggccccgaggaggactacctgagcctgggcgccgaggcctgcaacttcatgcagagcagcagcgccaagcagaagacccccccccccgtggcccccaagcccgccgtgaagagcagcagcagccagcccgtgacccccgtgagccccgtgtggagccccggcgtggcccccacccagccccccgccttccccaccagcaaccccagcaagggcaccgtggtgagcagcatcaagatcgcccagcccagctacccccccgccagacccgccagcaccctgaacgtggccggccccttcaagggcccccaggccgccgtggccagccagaactacacccccaagcccaccgtgagcacccccaccgtgaacgccgtgcagcccggcgccgtgggccccagcaacgagctgcccggcatgagcggcagaggcgcccagctgttcgccaagagacagagcagaatggagaagtacgtggtggacagcgacaccgtgcaggcccacgccgccagagcccagagccccacccccagcctgcccgccagctggaagtacagcagcaacgtgagagcccccccccccgtggcctacaaccccatccacagccccagctaccccctggccgccctgaagagccagcccagcgccgcccagcccagcaagatgggcaagaagaagggcaagaagcccctgaacgccctggacgtgatgaagcaccagccctaccagctgaacgccagcctgttcaccttccagccccccgacgccaaggacggcctgccccagaagagcagcgtgaaggtgaacagcgccctggccatgaagcaggccctgccccccagacccgtgaacgccgccagccccaccaacgtgcaggccagcagcgtgtacagcgtgcccgcctacaccagcccccccagcttcttcgccgaggccagcagccccgtgagcgccagccccgtgcccgtgggcatccccaccagccccaagcaggagagcgccagcagcagctacttcgtggcccccagacccaagttcagcgccaagaagagcggcgtgaccatccaggagagcggcagaagcctgagcctgcccggcagaagcgtgcccccccccatcagcaccagcccctgggtgtaccagcccacctacagctacagcagcaagcccaccgacggcctggagaaggccaacaagagacccaccccctgggaggccgccgccaagagccccctgggcctggtggacgacgccttccagcccagaaacatccaggagagcatcgtggccaacgtggtgagcgccgccagaagaaaggtgctgcccggcccccccgaggactggaacgagagactgagctacatcccccagacccagaaggcctacatgggcagctgcggcagacaggagtacaacgtgaccgccaacaacaacatgagcaccaccagccagtacggcagccagctgccctacgcctactacagacaggccagcagaaacgacagcgccatcatgagcatggagaccagaagcgactactgcctgcccgtggccgactacaactacaacccccaccccagaggctggagaagacagacctag

SEQ ID NO: 9792 - DNA, 1146 bp, synthetic construct
  source 1..1146: mol_type = other DNA; note = Synthetic coding sequence
atgagctggaccgtgcccgtggtgagagccagccagagagtgagcagcgtgggcgccaacttcctgtgcctgggcatggccctgtgccccagacaggccaccagaatccccctgaacggcacctggctgttcacccccgtgagcaagatggccaccgtgaagagcgagctgatcgagagattcaccagcgagaagcccgtgcaccacagcaaggtgagcatcatcggcaccggcagcgtgggcatggcctgcgccatcagcatcctgctgaagggcctgagcgacgagctggccctggtggacctggacgaggacaagctgaagggcgagaccatggacctgcagcacggcagccccttcaccaagatgcccaacatcgtgtgcagcaaggactacttcgtgaccgccaacagcaacctggtgatcatcaccgccggcgccagacaggagaagggcgagaccagactgaacctggtgcagagaaacgtggccatcttcaagctgatgatcagcagcatcgtgcagtacagcccccactgcaagctgatcatcgtgagcaaccccgtggacatcctgacctacgtggcctggaagctgagcgccttccccaagaacagaatcatcggcagcggctgcaacctggacaccgccagattcagattcctgatcggccagaagctgggcatccacagcgagagctgccacggctggatcctgggcgagcacggcgacagcagcgtgcccgtgtggagcggcgtgaacatcgccggcgtgcccctgaaggacctgaacagcgacatcggcaccgacaaggaccccgagcagtggaagaacgtgcacaaggaggtgaccgccaccgcctacgagatcatcaagatgaagggctacaccagctgggccatcggcctgagcgtggccgacctgaccgagagcatcctgaagaacctgagaagaatccaccccgtgagcaccatcatcaagggcctgtacggcatcgacgaggaggtgttcctgagcatcccctgcatcctgggcgagaacggcatcaccaacctgatcaagatcaagctgacccccgaggaggaggcccacctgaagaagagcgccaagaccctgtgggagatccagaacaagctgaagctgtag

SEQ ID NO: 9793 - DNA, 861 bp, synthetic construct
  source 1..861: mol_type = other DNA; note = Synthetic coding sequence
atgatggccacccccaaccagaccgcctgcaacgccgagagccccgtggccctggaggaggccaagaccagcggcgcccccggcagcccccagaccccccccgagagacacgacagcggcggcagcctgcccctgacccccagaatggagagccacagcgaggacgaggacctggccggcgccgtgggcggcctgggctggaacagcagaagccccagaacccagagccccggcggctgcagcgccgaggccgtgctggccagaaagaagcacagaagaagacccagcaagagaaagagacactggagaccctacctggagctgagctgggccgagaagcagcagagagacgagagacagagccagagagccagcagagtgagagaggagatgttcgccaagggccagcccgtggccccctacaacaccacccagttcctgatgaacgacagagaccccgaggagcccaacctggacgtgccccacggcatcagccaccccggcagcagcggcgagagcgaggccggcgacagcgacggcagaggcagagcccacggcgagttccagagaaaggacttcagcgagacctacgagagattccacaccgagagcctgcagggcagaagcaagcaggagctggtgagagactacctggagctggagaagagactgagccaggccgaggaggagaccagaagactgcagcagctgcaggcctgcaccggccagcagagctgcagacaggtggaggagctggccgccgaggtgcagagactgagaaccgagaaccagagactgagacaggagaaccagatgtggaacagagagggctgcagatgcgacgaggagcccggcacctag

SEQ ID NO: 9794 - DNA, 1206 bp, synthetic construct; identical to SEQ ID NO: 9763
  source 1..1206: mol_type = other DNA; note = Synthetic coding sequence

SEQ ID NO: 9795 - DNA, 1728 bp, synthetic construct
  source 1..1728: mol_type = other DNA; note = Synthetic coding sequence
atggccatggcccccagccccagcctggtgcaggtgtacaccagccccgccgccgtggccgtgtgggagtggcaggacggcctgggcacctggcacccctacagcgccaccgtgtgcagcttcatcgagcagcagttcgtgcagcagaagggccagagattcggcctgggcagcctggcccacagcatccccctgggccaggccgaccccagcctggccccctacatcatcgacctgcccagctggacccagttcagacaggacaccggcaccatgagagccgtgagaagacacctgttcccccagcacagcgcccccggcagaggcgtggtgtgggagtggctgagcgacgacggcagctggaccgcctacgaggccagcgtgtgcgactacctggagcagcaggtggccagaggcaaccagctggtggacctggcccccctgggctacaactacaccgtgaactacaccacccacacccagaccaacaagaccagcagcttctgcagaagcgtgagaagacaggccggccccccctaccccgtgaccaccatcatcgccccccccggccacaccggcgtggcctgcagctgccaccagtgcctgagcggcagcagaaccggccccgtgagcggcagatacagacacagcatgaccaacctgcccgcctaccccgtgccccagcaccccccccacagaaccgccagcgtgttcggcacccaccaggccttcgccccctacaacaagcccagcctgagcggcgccagaagcgcccccagactgaacaccaccaacgcctggggcgccgccccccccagcctgggcagccagcccctgtacagaagcagcctgagccacctgggcccccagcacctgccccccggcagcagcaccagcggcgccgtgagcgccagcctgcccagcggccccagcagcagccccggcagcgtgcccgccaccgtgcccatgcagatgcccaagcccagcagagtgcagcaggccctggccggcgccacccccaagcccgagcccgagcccgagcaggtgatcaagaactacaccgaggagctgaaggtgccccccgacgaggactgcatcatctgcatggagaagctgagcaccgccagcggctacagcgacgtgaccgacagcaaggccatcggcagcctggccgtgggccacctgaccaagtgcagccacgccttccacctgctgtgcctgctggccatgtactgcaacggcaacaaggacggcagcctgcagtgccccagctgcaagaccatctacggcgagaagaccggcacccagccccagggcaagatggaggtgctgagattccagatgagcctgcccggccacgaggactgcggcaccatcctgatcgtgtacagcatcccccacggcatccagggccccgagcaccccaaccccggcaagcccttcaccgccagaggcttccccagacagtgctacctgcccgacaacgcccagggcagaaaggtgctggagctgctgaaggtggcctggaagagaagactgatcttcaccgtgggcaccagcagcaccaccggcgagaccgacaccgtggtgtggaacgagatccaccacaagaccgagatggacagaaacatcaccggccacggctaccccgaccccaactacctgcagaacgtgctggccgagctggccgcccagggcgtgaccgaggactgcctggagcagcagtag

SEQ ID NO: 9796 - DNA, 1095 bp, synthetic construct
  source 1..1095: mol_type = other DNA; note = Synthetic coding sequence
atggagcacaacggcagcgccagcaacgccgacaagatccaccagaacagactgagcagcgtgaccgaggacgaggaccaggacgccgccctgaccatcgtgaccgtgctggacaaggtggccagcatcgtggacagcgtgcaggccagccagaagagaatcgaggagagacacagagagatggagaacgccatcaagagcgtgcagatcgacctgctgaagctgagccagagccacagcaacaccggccacatcatcaacaagctgttcgagaagaccagaaaggtgagcgcccacatcaaggacgtgaaggccagagtggagaagcagcagatccacgtgaagaaggtggaggtgaagcaggaggagatcatgaagaagaacaagttcagagtggtgatcttccaggagaagttcagatgccccaccagcctgagcgtggtgaaggacagaaacctgaccgagaaccaggaggaggacgacgacgacatcttcgacccccccgtggacctgagcagcgacgaggagtactacgtggaggagagcagaagcgccagactgagaaagagcggcaaggagcacatcgacaacatcaagaaggccttcagcaaggagaacatgcagaagaccagacagaacctggacaagaaggtgaacagaatcagaaccagaatcgtgacccccgagagaagagagagactgagacagagcggcgagagactgagacagagcggcgagagactgagacagagcggcgagagattcaagaagagcatcagcaacgccgcccccagcaaggaggccttcaagatgagaagcctgagaaagggcaaggacagaaccgtggccgagggcgaggagtgcgccagagagatgggcgtggacatcatcgccagaagcgagagcctgggccccatcagcgagctgtacagcgacgagctgagcgagcccgagcacgaggccgccagacccgtgtaccccccccacgagggcagagagatccccacccccgagcccctgaaggtgaccttcaagagccaggtgaaggtggaggacgacgagagcctgctgctggacctgaagcacagcagctag

SEQ ID NO: 9797 - DNA, 1266 bp, synthetic construct
  source 1..1266: mol_type = other DNA; note = Synthetic coding sequence
atgcccaccctgagcgtgttcatggacgtgcccctggcccacaagctggagggcagcctgctgaagacctacaagcaggacgactaccccaacaagatcttcctggcctacagagtgtgcatgaccaacgagggccacccctgggtgagcctggtggtgcagaagaccagactgcagatcagccaggaccccagcctgaactacgagtacctgcccaccatgggcctgaagagcttcatccaggccagcctggccctgctgttcggcaagcacagccaggccatcgtggagaacagagtgggcggcgtgcacaccgtgggcgacagcggcgccttccagctgggcgtgcagttcctgagagcctggcacaaggacgccagaatcgtgtacatcatcagcagccagaaggagctgcacggcctggtgttccaggacatgggcttcaccgtgtacgagtacagcgtgtgggaccccaagaagctgtgcatggaccccgacatcctgctgaacgtggtggagcagatcccccacggctgcgtgctggtgatgggcaacatcatcgactgcaagctgacccccagcggctgggccaagctgatgagcatgatcaagagcaagcagatcttccccttcttcgacatcccctgccagggcctgtacaccagcgacctggaggaggacaccagaatcctgcagtacttcgtgagccagggcttcgagttcttctgcagccagagcctgagcaagaacttcggcatctacgacgagggcgtgggcatgctggtggtggtggccgtgaacaaccagcagctgctgtgcgtgctgagccagctggagggcctggcccaggccctgtggctgaacccccccaacaccggcgccagagtgatcaccagcatcctgtgcaaccccgccctgctgggcgagtggaagcagagcctgaaggaggtggtggagaacatcatgctgaccaaggagaaggtgaaggagaagctgcagctgctgggcacccccggcagctggggccacatcaccgagcagagcggcacccacggctacctgggcctgaacagccagcaggtggagtacctggtgagaaagaagcacatctacatccccaagaacggccagatcaacttcagctgcatcaacgccaacaacatcaactacatcaccgagggcatcaacgaggccgtgctgctgaccgagagcagcgagatgtgcctgcccaaggagaagaagaccctgatcggcatcaagctgtag

SEQ ID NO: 9798 - DNA, 576 bp, synthetic construct
  source 1..576: mol_type = other DNA; note = Synthetic coding sequence
atgggcaagagctgcaaggtggtggtgtgcggccaggccagcgtgggcaagaccagcatcctggagcagctgctgtacggcaaccacgtggtgggcagcgagatgatcgagacccaggaggacatctacgtgggcagcatcgagaccgacagaggcgtgagagagcaggtgagattctacgacaccagaggcctgagagacggcgccgagctgcccagacactgcttcagctgcaccgacggctacgtgctggtgtacagcaccgacagcagagagagcttccagagagtggagctgctgaagaaggagatcgacaagagcaaggacaagaaggaggtgaccatcgtggtgctgggcaacaagtgcgacctgcaggagcagagaagagtggaccccgacgtggcccagcactgggccaagagcgagaaggtgaagctgtgggaggtgagcgtggccgacagaagaagcctgctggagcccttcgtgtacctggccagcaagatgacccagccccagagcaagagcgccttccccctgagcagaaagaacaagggcagcggcagcctggacggctag

SEQ ID NO: 9799 - DNA, 3207 bp, synthetic construct
  source 1..3207: mol_type = other DNA; note = Synthetic coding sequence
atggtgagcagcgacagacccgtgagcctggaggacgaggtgagccacagcatgaaggagatgatcggcggctgctgcgtgtgcagcgacgagagaggctgggccgagaaccccctggtgtactgcgacggccacggctgcagcgtggccgtgcaccaggcctgctacggcatcgtgcaggtgcccaccggcccctggttctgcagaaagtgcgagagccaggagagagccgccagagtgagatgcgagctgtgcccccacaaggacggcgccctgaagagaaccgacaacggcggctgggcccacgtggtgtgcgccctgtacatccccgaggtgcagttcgccaacgtgagcaccatggagcccatcgtgctgcagagcgtgccccacgacagatacaacaagacctgctacatctgcgacgagcagggcagagagagcaaggccgccaccggcgcctgcatgacctgcaacaagcacggctgcagacaggccttccacgtgacctgcgcccagttcgccggcctgctgtgcgaggaggagggcaacggcgccgacaacgtgcagtactgcggctactgcaagtaccacttcagcaagctgaagaagagcaagagaggcagcaacagaagctacgaccagagcctgagcgacagcagcagccacagccaggacaagcaccacgagaaggagaagaagaagtacaaggagaaggacaagcacaagcagaagcacaagaagcagcccgagcccagccccgccctggtgcccagcctgaccgtgaccaccgagaagacctacaccagcaccagcaacaacagcatcagcggcagcctgaagagactggaggacaccaccgccagattcaccaacgccaacttccaggaggtgagcgcccacaccagcagcggcaaggacgtgagcgagaccagaggcagcgagggcaagggcaagaagagcagcgcccacagcagcggccagagaggcagaaagcccggcggcggcagaaaccccggcaccaccgtgagcgccgccagccccttcccccagggcagcttcagcggcacccccggcagcgtgaagagcagcagcggcagcagcgtgcagagcccccaggacttcctgagcttcaccgacagcgacctgagaaacgacagctacagccacagccagcagagcagcgccaccaaggacgtgcacaagggcgagagcggcagccaggagggcggcgtgaacagcttcagcaccctgatcggcctgcccagcaccagcgccgtgaccagccagcccaagagcttcgagaacagccccggcgacctgggcaacagcagcctgcccaccgccggctacaagagagcccagaccagcggcatcgaggaggagaccgtgaaggagaagaagagaaagggcaacaagcagagcaagcacggccccggcagacccaagggcaacaagaaccaggagaacgtgagccacctgagcgtgagcagcgccagccccaccagcagcgtggccagcgccgccggcagcatcaccagcagcagcctgcagaagagccccaccctgctgagaaacggcagcctgcagagcctgagcgtgggcagcagccccgtgggcagcgagatcagcatgcagtacagacacgacggcgcctgccccaccaccaccttcagcgagctgctgaacgccatccacaacggcatctacaacagcaacgacgtggccgtgagcttccccaacgtggtgagcggcagcggcagcagcacccccgtgagcagcagccacctgccccagcagagcagcggccacctgcagcaggtgggcgccctgagccccagcgccgtgagcagcgccgcccccgccgtggccaccacccaggccaacaccctgagcggcagcagcctgagccaggcccccagccacatgtacggcaacagaagcaacagcagcatggccgccctgatcgcccagagcgagaacaaccagaccgaccaggacctgggcgacaacagcagaaacctggtgggcagaggcagcagccccagaggcagcctgagccccagaagccccgtgagcagcctgcagatcagatacgaccagcccggcaacagcagcctggagaacctgccccccgtggccgccagcatcgagcagctgctggagagacagtggagcgagggccagcagttcctgctggagcagggcacccccagcgacatcctgggcatgctgaagagcctgcaccagctgcaggtggagaacagaagactggaggagcagatcaagaacctgaccgccaagaaggagagactgcagctgctgaacgcccagctgagcgtgcccttccccaccatcaccgccaaccccagccccagccaccagatccacaccttcagcgcccagaccgcccccaccaccgacagcctgaacagcagcaagagcccccacatcggcaacagcttcctgcccgacaacagcctgcccgtgctgaaccaggacctgaccagcagcggccagagcaccagcagcagcagcgccctgagcacccccccccccgccggccagagccccgcccagcagggcagcggcgtgagcggcgtgcagcaggtgaacggcgtgaccgtgggcgccctggccagcggcatgcagcccgtgaccagcaccatccccgccgtgagcgccgtgggcggcatcatcggcgccctgcccggcaaccagctggccatcaacggcatcgtgggcgccctgaacggcgtgatgcagacccccgtgaccatgagccagaaccccacccccctgacccacaccaccgtgccccccaacgccacccaccccatgcccgccaccctgaccaacagcgccagcggcctgggcctgctgagcgaccagcagagacagatcctgatccaccagcagcagttccagcagctgctgaacagccagcagctgacccccgagcagcaccaggccttcctgtaccagctgatgcagcaccaccaccagcagcaccaccagcccgagctgcagcagctgcagatccccggccccacccagatccccatcaacaacctgctggccggcacccaggccccccccctgcacaccgccaccaccaaccccttcctgaccatccacggcgacaacgccagccagaaggtggccagactgagcgacaagaccggccccgtggcccaggagaagagctag

SEQ ID NO: 9800 - DNA, 1353 bp, synthetic construct
  source 1..1353: mol_type = other DNA; note = Synthetic coding sequence
atgagctgcctgatggtggagagatgcggcgagatcctgttcgagaaccccgaccagaacgccaagtgcgtgtgcatgctgggcgacatcagactgagaggccagaccggcgtgagagccgagagaagaggcagctaccccttcatcgacttcagactgctgaacagcaccacctacagcggcgagatcggcaccaagaagaaggtgaagagactgctgagcttccagagatacttccacgccagcagactgctgagaggcatcatcccccaggcccccctgcacctgctggacgaggactacctgggccaggccagacacatgctgagcaaggtgggcatgtgggacttcgacatcttcctgttcgacagactgaccaacggcaacagcctggtgaccctgctgtgccacctgttcaacacccacggcctgatccaccacttcaagctggacatggtgaccctgcacagattcctggtgatggtgcaggaggactaccacagccagaacccctaccacaacgccgtgcacgccgccgacgtgacccaggccatgcactgctacctgaaggagcccaagctggccagcttcctgacccccctggacatcatgctgggcctgctggccgccgccgcccacgacgtggaccaccccggcgtgaaccagcccttcctgatcaagaccaaccaccacctggccaacctgtaccagaacatgagcgtgctggagaaccaccactggagaagcaccatcggcatgctgagagagagcagactgctggcccacctgcccaaggagatgacccaggacatcgagcagcagctgggcagcctgatcctggccaccgacatcaacagacagaacgagttcctgaccagactgaaggcccacctgcacaacaaggacctgagactggaggacgcccaggacagacacttcatgctgcagatcgccctgaagtgcgccgacatctgcaacccctgcagaatctgggagatgagcaagcagtggagcgagagagtgtgcgaggagttctacagacagggcgagctggagcagaagttcgagctggagatcagccccctgtgcaaccagcagaaggacagcatccccagcatccagatcggcttcatgagctacatcgtggagcccctgttcagagagtgggcccacttcaccggcaacagcaccctgagcgagaacatgctgggccacctggcccacaacaaggcccagtggaagagcctgctgcccagacagcacagaagcagaggcagcagcggcagcggccccgaccacgaccacgccggccagggcaccgagagcgaggagcaggagggcgacagcccctag

SEQ ID NO: 9801 - DNA, 2268 bp, synthetic construct
  source 1..2268: mol_type = other DNA; note = Synthetic coding sequence
atggccggctgcatccccgaggagaagacctacagaagattcctggagctgttcctgggcgagttcagaggcccctgcggcggcggcgagcccgagcccgagcccgagcccgagcccgagcccgagcccgagagcgagcccgagcccgagcccgagctggtggaggccgaggccgccgaggccagcgtggaggagcccggcgaggaggccgccaccgtggccgccaccgaggagggcgaccaggagcaggaccccgagcccgaggaggaggccgccgtggagggcgaggaggaggaggagggcgccgccaccgccgccgccgcccccggccacagcgccgtgccccccccccccccccagctgccccccctgccccccctgcccagacccctgagcgagagaatcaccagagaggaggtggagggcgagagcctggacctgtgcctgcagcagctgtacaagtacaactgccccagcttcctggccgccgccctggccagagccaccagcgacgaggtgctgcagagcgacctgagcgcccactacatccccaaggagaccgacggcaccgagggcaccgtggagatcgagaccgtgaagctggccagaagcgtgttcagcaagctgcacgagatctgctgcagctgggtgaaggacttccccctgagaagaagaccccagctgtactacgagaccagcatccacgccatcaagaacatgagaagaaagatggaggacaagcacgtgtgcatccccgacttcaacatgctgttcaacctggaggaccaggaggagcaggcctacttcgccgtgttcgacggccacggcggcgtggacgccgccatctacgccagcatccacctgcacgtgaacctggtgagacaggagatgttcccccacgaccccgccgaggccctgtgcagagccttcagagtgaccgacgagagattcgtgcagaaggccgccagagagagcctgagatgcggcaccaccggcgtggtgaccttcatcagaggcaacatgctgcacgtggcctgggtgggcgacagccaggtgatgctggtgagaaagggccaggccgtggagctgatgaagccccacaagcccgacagagaggacgagaagcagagaatcgaggccctgggcggctgcgtggtgtggttcggcgcctggagagtgaacggcagcctgagcgtgagcagagccatcggcgacgccgagcacaagccctacatctgcggcgacgccgacagcgccagcaccgtgctggacggcaccgaggactacctgatcctggcctgcgacggcttctacgacaccgtgaaccccgacgaggccgtgaaggtggtgagcgaccacctgaaggagaacaacggcgacagcagcatggtggcccacaagctggtggccagcgccagagacgccggcagcagcgacaacatcaccgtgatcgtggtgttcctgagagacatgaacaaggccgtgaacgtgagcgaggagagcgactggaccgagaacagcttccagggcggccaggaggacggcggcgacgacaaggagaaccacggcgagtgcaagagaccctggccccagcaccagtgcagcgcccccgccgacctgggctacgacggcagagtggacagcttcaccgacagaaccagcctgagccccggcagccagatcaacgtgctggaggaccccggctacctggacctgacccagatcgaggccagcaagccccacagcgcccagttcctgctgcccgtggagatgttcggccccggcgcccccaagaaggccaacctgatcaacgagctgatgatggagaagaagagcgtgcagagcagcctgcccgagtggagcggcgccggcgagttccccaccgccttcaacctgggcagcaccggcgagcagatctacagaatgcagagcctgagccccgtgtgcagcggcctggagaacgagcagttcaagagccccggcaacagagtgagcagactgagccacctgagacaccactacagcaagaagtggcacagattcagattcaaccccaagttctacagcttcctgagcgcccaggagcccagccacaagatcggcaccagcctgagcagcctgaccggcagcggcaagagaaacagaatcagaagcagcctgccctggagacagaacagctggaagggctacagcgagaacatgagaaagctgagaaagacccacgacatcccctgccccgacctgccctggagctacaagatcgagtag

SEQ ID NO: 9802 - DNA, 771 bp, synthetic construct
  source 1..771: mol_type = other DNA; note = Synthetic coding sequence
atggccagcagatacgacagagccatcaccgtgttcagccccgacggccacctgttccaggtggagtacgcccaggaggccgtgaagaagggcagcaccgccgtgggcatcagaggcaccaacatcgtggtgctgggcgtggagaagaagagcgtggccaagctgcaggacgagagaaccgtgagaaagatctgcgccctggacgaccacgtgtgcatggccttcgccgtgctgaccatcttcatcggcctgaccgccgacgccagagtggtgatcaacagagccagagtggagtgccagagccacaagctgaccgtggaggaccccgtgaccgtggagtacatcaccagattcatcgccaccctgaagcagaagtacacccagagcaacggcagaagacccttcggcatcagcgccctgatcgtgggcttcgacgacgacggcatcagcagactgtaccagaccgaccccagcggcacctaccacgcctggaaggccaacgccatcggcagaagcgccaagaccgtgagagagttcctggagaagaactacaccgaggacgccatcgccagcgacagcgaggccatcaagctggccatcaaggccctgctggaggtggtgcagagcggcggcaagaacatcgagctggccatcatcagaagaaaccagcccctgaagatgttcagcgccaaggaggtggagctgtacgtgaccgagatcgagaaggagaaggaggaggccgagaagaagaagagcaagaagagcgtgtag

SEQ ID NO: 9803 - DNA, 3108 bp, synthetic construct
  source 1..3108: mol_type = other DNA; note = Synthetic coding sequence
atggcccccagactgcagctggagaaggccgcctggagatgggccgagaccgtgagacccgaggaggtgagccaggagcacatcgagaccgcctacagaatctggctggagccctgcatcagaggcgtgtgcagaagaaactgcaagggcaaccccaactgcctggtgggcatcggcgagcacatctggctgggcgagatcgacgagaacagcttccacaacatcgacgaccccaactgcgagagaagaaagaagaacagcttcgtgggcctgaccaacctgggcgccacctgctacgtgaacaccttcctgcaggtgtggttcctgaacctggagctgagacaggccctgtacctgtgccccagcacctgcagcgactacatgctgggcgacggcatccaggaggagaaggactacgagccccagaccatctgcgagcacctgcagtacctgttcgccctgctgcagaacagcaacagaagatacatcgaccccagcggcttcgtgaaggccctgggcctggacaccggccagcagcaggacgcccaggagttcagcaagctgttcatgagcctgctggaggacaccctgagcaagcagaagaaccccgacgtgagaaacatcgtgcagcagcagttctgcggcgagtacgcctacgtgaccgtgtgcaaccagtgcggcagagagagcaagctgctgagcaagttctacgagctggagctgaacatccagggccacaagcagctgaccgactgcatcagcgagttcctgaaggaggagaagctggagggcgacaacagatacttctgcgagaactgccagagcaagcagaacgccaccagaaagatcagactgctgagcctgccctgcaccctgaacctgcagctgatgagattcgtgttcgacagacagaccggccacaagaagaagctgaacacctacatcggcttcagcgagatcctggacatggagccctacgtggagcacaagggcggcagctacgtgtacgagctgagcgccgtgctgatccacagaggcgtgagcgcctacagcggccactacatcgcccacgtgaaggacccccagagcggcgagtggtacaagttcaacgacgaggacatcgagaagatggagggcaagaagctgcagctgggcatcgaggaggacctggccgagcccagcaagagccagaccagaaagcccaagtgcggcaagggcacccactgcagcagaaacgcctacatgctggtgtacagactgcagacccaggagaagcccaacaccaccgtgcaggtgcccgccttcctgcaggagctggtggacagagacaacagcaagttcgaggagtggtgcatcgagatggccgagatgagaaagcagagcgtggacaagggcaaggccaagcacgaggaggtgaaggagctgtaccagagactgcccgccggcgccgagccctacgagttcgtgagcctggagtggctgcagaagtggctggacgagagcacccccaccaagcccatcgacaaccacgcctgcctgtgcagccacgacaagctgcaccccgacaagatcagcatcatgaagagaatcagcgagtacgccgccgacatcttctacagcagatacggcggcggccccagactgaccgtgaaggccctgtgcaaggagtgcgtggtggagagatgcagaatcctgagactgaagaaccagctgaacgaggactacaagaccgtgaacaacctgctgaaggccgccgtgaagggcagcgacggcttctgggtgggcaagagcagcctgagaagctggagacagctggccctggagcagctggacgagcaggacggcgacgccgagcagagcaacggcaagatgaacggcagcaccctgaacaaggacgagagcaaggaggagagaaaggaggaggaggagctgaacttcaacgaggacatcctgtgcccccacggcgagctgtgcatcagcgagaacgagagaagactggtgagcaaggaggcctggagcaagctgcagcagtacttccccaaggcccccgagttccccagctacaaggagtgctgcagccagtgcaagatcctggagagagagggcgaggagaacgaggccctgcacaagatgatcgccaacgagcagaagaccagcctgcccaacctgttccaggacaagaacagaccctgcctgagcaactggcccgaggacaccgacgtgctgtacatcgtgagccagttcttcgtggaggagtggagaaagttcgtgagaaagcccaccagatgcagccccgtgagcagcgtgggcaacagcgccctgctgtgcccccacggcggcctgatgttcaccttcgccagcatgaccaaggaggacagcaagctgatcgccctgatctggcccagcgagtggcagatgatccagaagctgttcgtggtggaccacgtgatcaagatcaccagaatcgaggtgggcgacgtgaaccccagcgagacccagtacatcagcgagcccaagctgtgccccgagtgcagagagggcctgctgtgccagcagcagagagacctgagagagtacacccaggccaccatctacgtgcacaaggtggtggacaacaagaaggtgatgaaggacagcgcccccgagctgaacgtgagcagcagcgagaccgaggaggacaaggaggaggccaagcccgacggcgagaaggaccccgacttcaaccagagcaacggcggcaccaagagacagaagatcagccaccagaactacatcgcctaccagaagcaggtgatcagaagaagcatgagacacagaaaggtgagaggcgagaaggccctgctggtgagcgccaaccagaccctgaaggagctgaagatccagatcatgcacgccttcagcgtggcccccttcgaccagaacctgagcatcgacggcaagatcctgagcgacgactgcgccaccctgggcaccctgggcgtgatccccgagagcgtgatcctgctgaaggccgacgagcccatcgccgactacgccgccatggacgacgtgatgcaggtgtgcatgcccgaggagggcttcaagggcaccggcctgctgggccactag

SEQ ID NO: 9804 - DNA, 2382 bp, synthetic construct
  source 1..2382: mol_type = other DNA; note = Synthetic coding sequence
atgctgatccagagcgagaagaagacccagctgagcaagaccgagagcgtgaaggagagcgagagcctgatggagttcgcccagcccgagatccagccccaggagttcctgaacagaagatacatgaccgaggtggactacagcaacaagcagggcgaggagcagccctgggaggccgactacgccagaaagcccaacctgcccaagagatgggacatgctgaccgagcccgacggccaggagaagaagcaggagagcttcaagagctgggaggccagcggcaagcaccaggaggtgagcaagcccgccgtgagcctggagcagagaaagcaggacaccagcaagctgagaagcaccctgcccgaggagcagaagaagcaggagatcagcaagagcaagcccagccccagccagtggaagcaggacacccccaagagcaaggccggctacgtgcaggaggagcagaagaagcaggagacccccaagctgtggcccgtgcagctgcagaaggagcaggaccccaagaagcagacccccaagagctggacccccagcatgcagagcgagcagaacaccaccaagagctggaccacccccatgtgcgaggagcaggacagcaagcagcccgagacccccaagagctgggagaacaacgtggagagccagaagcacagcctgaccagccagagccagatcagccccaagagctggggcgtggccaccgccagcctgatccccaacgaccagctgctgcccagaaagctgaacaccgagcccaaggacgtgcccaagcccgtgcaccagcccgtgggcagcagcagcaccctgcccaaggaccccgtgctgagaaaggagaagctgcaggacctgatgacccagatccagggcacctgcaacttcatgcaggagagcgtgctggacttcgacaagcccagcagcgccatccccaccagccagccccccagcgccacccccggcagccccgtggccagcaaggagcagaacctgagcagccagagcgacttcctgcaggagcccctgcaggccaccagcagccccgtgacctgcagcagcaacgcctgcctggtgaccaccgaccaggccagcagcggcagcgagaccgagttcatgaccagcgagacccccgaggccgccatcccccccggcaagcagcccagcagcctggccagccccaacccccccatggccaagggcagcgagcagggcttccagagcccccccgccagcagcagcagcgtgaccatcaacaccgcccccttccaggccatgcagaccgtgttcaacgtgaacgcccccctgccccccagaaaggagcaggagatcaaggagagcccctacagccccggctacaaccagagcttcaccaccgccagcacccagacccccccccagtgccagctgcccagcatccacgtggagcagaccgtgcacagccaggagaccgccaactaccaccccgacggcaccatccaggtgagcaacggcagcctggccttctaccccgcccagaccaacgtgttccccagacccacccagcccttcgtgaacagcagaggcagcgtgagaggctgcaccagaggcggcagactgatcaccaacagctacagaagccccggcggctacaagggcttcgacacctacagaggcctgcccagcatcagcaacggcaactacagccagctgcagttccaggccagagagtacagcggcgccccctacagccagagagacaacttccagcagtgctacaagagaggcggcaccagcggcggccccagagccaacagcagagccggctggagcgacagcagccaggtgagcagccccgagagagacaacgagaccttcaacagcggcgacagcggccagggcgacagcagaagcatgacccccgtggacgtgcccgtgaccaaccccgccgccaccatcctgcccgtgcacgtgtaccccctgccccagcagatgagagtggccttcagcgccgccagaaccagcaacctggcccccggcaccctggaccagcccatcgtgttcgacctgctgctgaacaacctgggcgagaccttcgacctgcagctgggcagattcaactgccccgtgaacggcacctacgtgttcatcttccacatgctgaagctggccgtgaacgtgcccctgtacgtgaacctgatgaagaacgaggaggtgctggtgagcgcctacgccaacgacggcgcccccgaccacgagaccgccagcaaccacgccatcctgcagctgttccagggcgaccagatctggctgagactgcacagaggcgccatctacggcagcagctggaagtacagcaccttcagcggctacctgctgtaccaggactag

SEQ ID NO: 9805 - DNA, 1083 bp, synthetic construct
  source 1..1083: mol_type = other DNA; note = Synthetic coding sequence
atggaggagctgagccaggccctggccagcagcttcagcgtgagccaggacctgaacagcaccgccgccccccaccccagactgagccagtacaagagcaagtacagcagcctggagcagagcgagagaagaagaagactgctggagctgcagaagagcaagagactggactacgtgaaccacgccagaagactggccgaggacgactggaccggcatggagagcgaggaggagaacaagaaggacgacgaggagatggacatcgacaccgtgaagaagctgcccaagcactacgccaaccagctgatgctgagcgagtggctgatcgacgtgcccagcgacctgggccaggagtggatcgtggtggtgtgccccgtgggcaagagagccctgatcgtggccagcagaggcagcaccagcgcctacaccaagagcggctactgcgtgaacagattcagcagcctgctgcccggcggcaacagaagaaacagcaccgccaaggactacaccatcctggactgcatctacaacgaggtgaaccagacctactacgtgctggacgtgatgtgctggagaggccaccccttctacgactgccagaccgacttcagattctactggatgcacagcaagctgcccgaggaggagggcctgggcgagaagaccaagctgaaccccttcaagttcgtgggcctgaagaacttcccctgcacccccgagagcctgtgcgacgtgctgagcatggacttccccttcgaggtggacggcctgctgttctaccacaagcagacccactacagccccggcagcacccccctggtgggctggctgagaccctacatggtgagcgacgtgctgggcgtggccgtgcccgccggccccctgaccaccaagcccgactacgccggccaccagctgcagcagatcatggagcacaagaagagccagaaggagggcatgaaggagaagctgacccacaaggccagcgagaacggccactacgagctggagcacctgagcacccccaagctgaagggcagcagccacagccccgaccaccccggctgcctgatggagaactag

SEQ ID NO: 9806 - DNA, 525 bp, synthetic construct
  source 1..525: mol_type = other DNA; note = Synthetic coding sequence
ctgatccacaagcccctgaagagagccatcaccaccctgatggccggcatcctgagactggtggtgcagtggccccccggcagactgcagaccgtgaccaagggcgtggagagcctgatctgcaccgactggatcagacacaagttcaccagaagcagaatccccgagaaggtgttccaggccagccccgaggaccacgagaagtacggcggcgacccccagaacccccacaagctgcacatcgtgaccagaatcaagagcaccagaagaagaccctactgggagaaggacatcatcaagatgctgggcctggagaaggcccacaccccccaggtgcacaagaacatccccagcgtgaacgccaagctgaaggtggtgaagcacctgatcagaatcaagcccctgaagctgccccagggcctgcccgccgaggagaacatgagcaacacctgcctgaagagcaccggcgagctggtggtgcagtggcacctgaagcccgtggagcagaaggcccacgagagctag

SEQ ID NO: 9807 - DNA, 1434 bp, synthetic construct
  source 1..1434: mol_type = other DNA; note = Synthetic coding sequence
atggccacctacacctgcatcacctgcagagtggccttcagagacgccgacatgcagagagcccactacaagaccgactggcacagatacaacctgagaagaaaggtggccagcatggcccccgtgaccgccgagggcttccaggagagagtgagagcccagagagccgtggccgaggaggagagcaagggcagcgccacctactgcaccgtgtgcagcaagaagttcgccagcttcaacgcctacgagaaccacctgaagagcagaagacacgtggagctggagaagaaggccgtgcaggccgtgaacagaaaggtggagatgatgaacgagaagaacctggagaagggcctgggcgtggacagcgtggacaaggacgccatgaacgccgccatccagcaggccatcaaggcccagcccagcatgagccccaagaaggccccccccgcccccgccaaggaggccagaaacgtggtggccgtgggcaccggcggcagaggcacccacgacagagaccccagcgagaagccccccagactgcagtggttcgagcagcaggccaagaagctggccaagcagcaggaggaggacagcgaggaggaggaggaggacctggacggcgacgactgggaggacatcgacagcgacgaggagctggagtgcgaggacaccgaggccatggacgacgtggtggagcaggacgccgaggaggaggaggccgaggagggcccccccctgggcgccatccccatcaccgactgcctgttctgcagccaccacagcagcagcctgatgaagaacgtggcccacatgaccaaggaccacagcttcttcatccccgacatcgagtacctgagcgacatcaagggcctgatcaagtacctgggcgagaaggtgggcgtgggcaagatctgcctgtggtgcaacgagaagggcaagagcttctacagcaccgaggccgtgcaggcccacatgaacgacaagagccactgcaagctgttcaccgacggcgacgccgccctggagttcgccgacttctacgacttcagaagcagctaccccgaccacaaggagggcgaggaccccaacaaggccgaggagctgcccagcgagaagaacctggagtacgacgacgagaccatggagctgatcctgcccagcggcgccagagtgggccacagaagcctgatgagatactacaagcagagattcggcctgagcagagccgtggccgtggccaagaacagaaaggccgtgggcagagtgctgcagcagtacagagccctgggctggaccggcagcaccggcgccgccctgatgagagagagagacatgcagtacgtgcagagaatgaagagcaagtggatgctgaagaccggcatgaagaacaacgccaccaagcagatgcacttcagagtgcaggtgagattctag

SEQ ID NO: 9808 - DNA, 2862 bp, synthetic construct
  source 1..2862: mol_type = other DNA; note = Synthetic coding sequence
atgatcaccagcgccgccggcatcatcagcctgctggacgaggacgagccccagctgaaggagttcgccctgcacaagctgaacgccgtggtgaacgacttctgggccgagatcagcgagagcgtggacaagatcgaggtgctgtacgaggacgagggcttcagaagcagacagttcgccgccctggtggccagcaaggtgttctaccacctgggcgccttcgaggagagcctgaactacgccctgggcgccggcgacctgttcaacgtgaacgacaacagcgagtacgtggagaccatcatcgccaagtgcatcgaccactacaccaagcagtgcgtggagaacgccgacctgcccgagggcgagaagaagcccatcgaccagagactggagggcatcgtgaacaagatgttccagagatgcctggacgaccacaagtacaagcaggccatcggcatcgccctggagaccagaagactggacgtgttcgagaagaccatcctggagagcaacgacgtgcccggcatgctggcctacagcctgaagctgtgcatgagcctgatgcagaacaagcagttcagaaacaaggtgctgagagtgctggtgaagatctacatgaacctggagaagcccgacttcatcaacgtgtgccagtgcctgatcttcctggacgacccccaggccgtgagcgacatcctggagaagctggtgaaggaggacaacctgctgatggcctaccagatctgcttcgacctgtacgagagcgccagccagcagttcctgagcagcgtgatccagaacctgagaaccgtgggcacccccatcgccagcgtgcccggcagcaccaacaccggcaccgtgcccggcagcgagaaggacagcgacagcatggagaccgaggagaagaccagcagcgccttcgtgggcaagacccccgaggccagccccgagcccaaggaccagaccctgaagatgatcaagatcctgagcggcgagatggccatcgagctgcacctgcagttcctgatcagaaacaacaacaccgacctgatgatcctgaagaacaccaaggacgccgtgagaaacagcgtgtgccacaccgccaccgtgatcgccaacagcttcatgcactgcggcaccaccagcgaccagttcctgagagacaacctggagtggctggccagagccaccaactgggccaagttcaccgccaccgccagcctgggcgtgatccacaagggccacgagaaggaggccctgcagctgatggccacctacctgcccaaggacaccagccccggcagcgcctaccaggagggcggcggcctgtacgccctgggcctgatccacgccaaccacggcggcgacatcatcgactacctgctgaaccagctgaagaacgccagcaacgacatcgtgagacacggcggcagcctgggcctgggcctggccgccatgggcaccgccagacaggacgtgtacgacctgctgaagaccaacctgtaccaggacgacgccgtgaccggcgaggccgccggcctggccctgggcctggtgatgctgggcagcaagaacgcccaggccatcgaggacatggtgggctacgcccaggagacccagcacgagaagatcctgagaggcctggccgtgggcatcgccctggtgatgtacggcagaatggaggaggccgacgccctgatcgagagcctgtgcagagacaaggaccccatcctgagaagaagcggcatgtacaccgtggccatggcctactgcggcagcggcaacaacaaggccatcagaagactgctgcacgtggccgtgagcgacgtgaacgacgacgtgagaagagccgccgtggagagcctgggcttcatcctgttcagaacccccgagcagtgccccagcgtggtgagcctgctgagcgagagctacaacccccacgtgagatacggcgccgccatggccctgggcatctgctgcgccggcaccggcaacaaggaggccatcaacctgctggagcccatgaccaacgaccccgtgaactacgtgagacagggcgccctgatcgccagcgccctgatcatgatccagcagaccgagatcacctgccccaaggtgaaccagttcagacagctgtacagcaaggtgatcaacgacaagcacgacgacgtgatggccaagttcggcgccatcctggcccagggcatcctggacgccggcggccacaacgtgaccatcagcctgcagagcagaaccggccacacccacatgcccagcgtggtgggcgtgctggtgttcacccagttctggttctggttccccctgagccacttcctgagcctggcctacacccccacctgcgtgatcggcctgaacaaggacctgaagatgcccaaggtgcagtacaagagcaactgcaagcccagcaccttcgcctaccccgcccccctggaggtgcccaaggagaaggagaaggagaaggtgagcaccgccgtgctgagcatcaccgccaaggccaagaagaaggagaaggagaaggagaagaaggaggaggagaagatggaggtggacgaggccgagaagaaggaggagaaggagaagaagaaggagcccgagcccaacttccagctgctggacaaccccgccagagtgatgcccgcccagctgaaggtgctgaccatgcccgagacctgcagataccagcccttcaagcccctgagcatcggcggcatcatcatcctgaaggacaccagcgaggacatcgaggagctggtggagcccgtggccgcccacggccccaagatcgaggaggaggagcaggagcccgagccccccgagcccttcgagtacatcgacgactag

SEQ ID NO: 9809 - DNA, 984 bp, synthetic construct
  source 1..984: mol_type = other DNA; note = Synthetic coding sequence
atgtgcagcaccagcggctgcgacctggaggagatccccctggacgacgacgacctgaacaccatcgagttcaagatcctggcctactacaccagacaccacgtgttcaagagcacccccgccctgttcagccccaagctgctgagaaccagaagcctgagccagagaggcctgggcaactgcagcgccaacgagagctggaccgaggtgagctggccctgcagaaacagccagagcagcgagaaggccatcaacctgggcaagaagaagagcagctggaaggccttcttcggcgtggtggagaaggaggacagccagagcacccccgccaaggtgagcgcccagggccagagaaccctggagtaccaggacagccacagccagcagtggagcagatgcctgagcaacgtggagcagtgcctggagcacgaggccgtggaccccaaggtgatcagcatcgccaacagagtggccgagatcgtgtacagctggccccccccccaggccacccaggccggcggcttcaagagcaaggagatcttcgtgaccgagggcctgagcttccagctgcagggccacgtgcccgtggccagcagcagcaagaaggacgaggaggagcagatcctggccaagatcgtggagctgctgaagtacagcggcgaccagctggagagaaagctgaagaaggacaaggccctgatgggccacttccaggacggcctgagctacagcgtgttcaagaccatcaccgaccaggtgctgatgggcgtggaccccagaggcgagagcgaggtgaaggcccagggcttcaaggccgccctggtgatcgacgtgaccgccaagctgaccgccatcgacaaccaccccatgaacagagtgctgggcttcggcaccaagtacctgaaggagaacttcagcccctggatccagcagcacggcggctgggagaagatcctgggcatcagccacgaggaggtggactag

SEQ ID NO: 9810 - DNA, 1086 bp, synthetic construct
  source 1..1086: mol_type = other DNA; note = Synthetic coding sequence
atgggcggcgccgtgagcgccggcgaggacaacgacgagctgatcgacaacctgaaggaggcccagtacatcagaaccgagctggtggagcaggccttcagagccatcgacagagccgactactacctggaggagttcaaggagaacgcctacaaggacctggcctggaagcacggcaacatccacctgagcgccccctgcatctacagcgaggtgatggaggccctggacctgcagcccggcctgagcttcctgaacctgggcagcggcaccggctacctgagcagcatggtgggcctgatcctgggccccttcggcgtgaaccacggcgtggagctgcacagcgacgtgatcgagtacgccaagcagaagctggacttcttcatcagaaccagcgacagcttcgacaagttcgacttctgcgagcccagcttcgtgaccggcaactgcctggagatcagccccgactgcagccagtacgacagagtgtactgcggcgccggcgtgcagaaggagcacgaggagtacatgaagaacctgctgaaggtgggcggcatcctggtgatgcccctggaggagaagctgaccaagatcaccagaaccggccccagcgcctgggagaccaagaagatcctggccgtgagcttcgcccccctgatccagccctgccacagcgagagcggcaagagcagactggtgcagctgccccccgtggccgtgagaagcctgcaggacctggccagaatcgccatcagaggcaccatcaagaagatcatccaccaggagaccgtgagcaagaacggcaacggcctgaagaacacccccagattcaagagaagaagagtgagaagaagaagaatggagaccatcgtgttcctggacaaggaggtgttcgccagcagaatcagcaaccccagcgacgacaacagctgcgaggacctggaggaggagagaagagaggaggaggagaagaccccccccgagaccaagcccgacccccccgtgaacttcctgagacagaaggtgctgagcctgcccctgcccgaccccctgaagtactacctgctgtactacagagagaagtag

SEQ ID NO: 9811 - DNA, 780 bp, synthetic construct
  source 1..780: mol_type = other DNA; note = Synthetic coding sequence
atgaaggacgtggacaacctgaagagcatcaaggaggagtgggtgtgcgagaccggcagcgacaaccagcccctgggcaacaaccagcagagcaactgcgagtacttcgtggacagcctgttcgaggaggcccagaaggtgagcagcaagtgcgtgagccccgccgagcagaagaagcaggtggacgtgaacatcaagctgtggaagaacggcttcaccgtgaacgacgacttcagaagctacagcgacggcgccagccagcagttcctgaacagcatcaagaagggcgagctgcccagcgagctgcagggcatcttcgacaaggaggaggtggacgtgaaggtggaggacaagaagaacgagatctgcctgagcaccaagcccgtgttccagcccttcagcggccagggccacagactgggcagcgccacccccaagatcgtgagcaaggccaagaacatcgaggtggagaacaagaacaacctgagcgccgtgcccctgaacaacctggagcccatcaccaacatccagatctggctggccaacggcaagagaatcgtgcagaagttcaacatcacccacagagtgagccacatcaaggacttcatcgagaagtaccagggcagccagagaagcccccccttcagcctggccaccgccctgcccgtgctgagactgctggacgagaccctgaccctggaggaggccgacctgcagaacgccgtgatcatccagagactgcagaagaccgccagcttcagagagctgagcgagcactag

SEQ ID NO: 9812 - DNA, 990 bp, synthetic construct
  source 1..990: mol_type = other DNA; note = Synthetic coding sequence
atggtgagaaccaagacctggaccctgaagaagcacttcgtgggctaccccaccaacagcgacttcgagctgaagaccgccgagctgccccccctgaagaacggcgaggtgctgctggaggccctgttcctgaccgtggacccctacatgagagtggccgccaagagactgaaggagggcgacaccatgatgggccagcaggtggccaaggtggtggagagcaagaacgtggccctgcccaagggcaccatcgtgctggccagccccggctggaccacccacagcatcagcgacggcaaggacctggagaagctgctgaccgagtggcccgacaccatccccctgagcctggccctgggcaccgtgggcatgcccggcctgaccgcctacttcggcctgctggagatctgcggcgtgaagggcggcgagaccgtgatggtgaacgccgccgccggcgccgtgggcagcgtggtgggccagatcgccaagctgaagggctgcaaggtggtgggcgccgtgggcagcgacgagaaggtggcctacctgcagaagctgggcttcgacgtggtgttcaactacaagaccgtggagagcctggaggagaccctgaagaaggccagccccgacggctacgactgctacttcgacaacgtgggcggcgagttcagcaacaccgtgatcggccagatgaagaagttcggcagaatcgccatctgcggcgccatcagcacctacaacagaaccggccccctgccccccggccccccccccgagatcgtgatctaccaggagctgagaatggaggccttcgtggtgtacagatggcagggcgacgccagacagaaggccctgaaggacctgctgaagtgggtgctggagggcaagatccagtacaaggagtacatcatcgagggcttcgagaacatgcccgccgccttcatgggcatgctgaagggcgacaacctgggcaagaccatcgtgaaggcctag

SEQ ID NO: 9813 - DNA, 3006 bp, synthetic construct
  source 1..3006: mol_type = other DNA; note = Synthetic coding sequence
atgcagagcaccgacctgggcaacaaggagagcggcaagatctggcacagaaagcccagccccgccaccagagacggcatcatcgtgaacatcatccacaacaccagcgactaccaccccaaggtgctgagattcctgaacgtggccttcgacggcaccggcgactgcctgatcgccggcgaccaccagggcaacatctacgtgttcgacctgcacggcaacagattcaacctggtgcagagaaccgcccaggcctgcaccgccctggccttcaacctgagaagaaagagcgagttcctggtggccctggccgactacagcatcaagtgcttcgacaccgtgaccaaggagctggtgagctggatgagaggccacgagagcagcgtgttcagcatcagcgtgcacgccagcggcaagtacgccatcaccaccagcagcgacaccgcccagctgtgggacctggacaccttccagagaaagagaaagctgaacatcagacagagcgtgggcatccagaaggtgttcttcctgcccctgagcaacaccatcctgagctgcttcaaggacaacagcatcttcgcctgggagtgcgacaccctgttctgcaagtaccagctgcccgccccccccgagagcagcagcatcctgtacaaggtgttcgccgtgaccagagacggcagaatcctggccgccggcggcaagagcaaccacctgcacctgtggtgcctggaggccagacagctgttcagaatcatccagatgcccaccaaggtgagagccatcagacacctggagttcctgcccgacagcttcgacgccggcagcaaccaggtgctgggcgtgctgagccaggacggcatcatgagattcatcaacatgcagacctgcaagctgctgttcgagatcggcagcctggacgagggcatcagcagcagcgccatcagcccccacggcagatacatcgccagcatcatggagaacggcagcctgaacatctacagcgtgcaggccctgacccaggagatcaacaagccccccccccccctggtgaaggtgatcgaggacctgcccaagaacaagctgagcagcagcgacctgaagatgaaggtgaccagcggcagagtgcagcagcccgccaagagcagagagagcaagatgcagaccagaatcctgaagcaggacctgaccggcgacttcgagagcaagaagaacgagctgcccgacggcctgaacaagaagagactgcagatcctgctgaagggctacggcgagtaccccaccaagtacagaatgttcatctggagaagcctgctgcagctgcccgagaaccacaccgccttcagcaccctgatcgacaagggcacccacgtggccttcctgaacctgcagaagaagtaccccatcaagagcagaaagctgctgagagtgctgcagagaaccctgagcgccctggcccactggagcgtgatcttcagcgacaccccctacctgcccctgctggccttccccttcgtgaagctgttccagaacaaccagctgatctgcttcgaggtgatcgccaccctgatcatcaactggtgccagcactggttcgagtacttccccaacccccccatcaacatcctgagcatgatcgagaacgtgctggccttccacgacaaggagctgctgcagcacttcatcgaccacgacatcaccagccagctgtacgcctggcccctgctggagaccgtgttcagcgaggtgctgaccagagaggagtggctgaagctgttcgacaacatcttcagcaaccaccccagcttcctgctgatgaccgtggtggcctacaacatctgcagcagaacccccctgctgagctgcaacctgaaggacgacttcgagttcttcttccaccacagaaacaacctggacatcaacgtggtgatcagacaggtgtaccacctgatggagaccacccccaccgacatccaccccgacagcatgctgaacgtgttcgtggccctgaccaagggccagtaccccgtgttcaaccagtaccccaagttcatcgtggactaccagacccaggagagagagagaatcagaaacgacgagctggactacctgagagagagacagaccgtggaggacatgcaggccaaggtggaccagcagagagtggaggacgaggcctggtaccagaagcaggagctgctgagaaaggccgaggagaccagaagagagatgctgctgcaggaggaggagaagatgatccagcagagacagagactggccgccgtgaagagagagctgaaggtgaaggagatgcacctgcaggacgccgccagaagaagattcctgaagctgcagcaggaccagcaggagatggagctgagaagactggacgacgagatcggcagaaaggtgtacatgagagacagagagatcgccgccaccgccagagacctggagatgagacagctggagctggagagccagaagagactgtacgagaagaacctgaccgagaaccaggaggccctggccaaggagatgagagccgacgccgacgcctacagaagaaaggtggacctggaggagcacatgttccacaagctgatcgaggccggcgagacccagagccagaagacccagaagtggaaggaggccgagggcaaggagttcagactgagaagcgccaagaaggccagcgccctgagcgacgccagcagaaagtggttcctgaagcaggagatcaacgccgccgtggagcacgccgagaacccctgccacaaggaggagcccagattccagaacgagcaggacagcagctgcctgcccagaaccagccagctgaacgacagcagcgagatggaccccagcacccagatcagcctgaacagaagagccgtggagtgggacaccaccggccagaacctgatcaagaaggtgagaaacctgagacagagactgaccgccagagccagacacagatgccagaccccccacctgctggccgcctag

SEQ ID NO: 9814 - DNA, 651 bp, synthetic construct
  source 1..651: mol_type = other DNA; note = Synthetic coding sequence
atgagcttcctgttcggcagcagaagcagcaagaccttcaagcccaagaagaacatccccgagggcagccaccagtacgagctgctgaagcacgccgaggccaccctgggcagcggcaacctgagaatggccgtgatgctgcccgagggcgaggacctgaacgagtgggtggccgtgaacaccgtggacttcttcaaccagatcaacatgctgtacggcaccatcaccgacttctgcaccgaggagagctgccccgtgatgagcgccggccccaagtacgagtaccactgggccgacggcaccaacatcaagaagcccatcaagtgcagcgcccccaagtacatcgactacctgatgacctgggtgcaggaccagctggacgacgagaccctgttccccagcaagatcggcgtgcccttccccaagaacttcatgagcgtggccaagaccatcctgaagagactgttcagagtgtacgcccacatctaccaccagcacttcgaccccgtgatccagctgcaggaggaggcccacctgaacaccagcttcaagcacttcatcttcttcgtgcaggagttcaacctgatcgacagaagagagctggcccccctgcaggagctgatcgagaagctgaccagcaaggacagatag

SEQ ID NO: 9815 - DNA, 477 bp, synthetic construct
  source 1..477: mol_type = other DNA; note = Synthetic coding sequence
atggccgcccagggcgtgggccccggccccggcagcgccgccccccccggcctggaggccgccagacagaagctggccctgagaagaaagaaggtgctgagcaccgaggagatggagctgtacgagctggcccaggccgccggcggcggcatcgaccccgacgtgttcaagatcctggtggacctgctgaagctgaacgtggcccccctggccgtgttccagatgctgaagagcatgtgcgccggccagagactggccagcgagccccaggaccccgccgccgtgagcctgcccaccagcagcgtgcccgagaccagaggcagagacaagggcagcgccgccctgggcggcgtgctggccctggccgagagaagcaaccacgagggcagcagccagagaatgcccagacagcccagcgccaccagactgcccaagggcggcggccccggcaagagccccacccagggcagcacctag

SEQ ID NO: 9816 - DNA, 1425 bp, synthetic construct
  source 1..1425: mol_type = other DNA; note = Synthetic coding sequence
atgaacagcgtgagccccgccgccgcccagtacagaagcagcagccccgaggacgccagaagaagacccgaggccagaagacccagaggccccagaggccccgaccccaacggcctgggccccagcggcgccagcggccccgccctgggcagccccggcgccggccccagcgagcccgacgaggtggacaagttcaaggccaagttcctgaccgcctggaacaacgtgaagtacggctgggtggtgaagagcagaaccagcttcagcaagatcagcagcatccacctgtgcggcagaagatacagattcgagggcgagggcgacatccagagattccagagagacttcgtgagcagactgtggctgacctacagaagagacttcccccccctgcccggcggctgcctgaccagcgactgcggctggggctgcatgctgagaagcggccagatgatgctggcccagggcctgctgctgcacttcctgcccagagactggacctgggccgagggcatgggcctgggcccccccgagctgagcggcagcgccagccccagcagataccacggccccgccagatggatgccccccagatgggcccagggcgcccccgagctggagcaggagagaagacacagacagatcgtgagctggttcgccgaccaccccagagcccccttcggcctgcacagactggtggagctgggccagagcagcggcaagaaggccggcgactggtacggccccagcctggtggcccacatcctgagaaaggccgtggagagctgcagcgacgtgaccagactggtggtgtacgtgagccaggactgcaccgtgtacaaggccgacgtggccagactggtggccagacccgaccccaccgccgagtggaagagcgtggtgatcctggtgcccgtgagactgggcggcgagaccctgaaccccgtgtacgtgccctgcgtgaaggagctgctgagatgcgagctgtgcctgggcatcatgggcggcaagcccagacacagcctgtacttcatcggctaccaggacgacttcctgctgtacctggacccccactactgccagcccaccgtggacgtgagccaggccgacttccccctggagagcttccactgcaccagccccagaaagatggccttcgccaagatggaccccagctgcaccgtgggcttctacgccggcgacagaaaggagttcgagaccctgtgcagcgagctgaccagagtgctgagcagcagcagcgccaccgagagataccccatgttcaccctggccgagggccacgcccaggaccacagcctggacgacctgtgcagccagctggcccagcccaccctgagactgcccagaaccggcagactgctgagagccaagagacccagcagcgaggacttcgtgttcctgtag

SEQ ID NO: 9817 - DNA, 945 bp, synthetic construct
  source 1..945: mol_type = other DNA; note = Synthetic coding sequence
atggccttcgtgaccagacagttcatgagaagcgtgagcagcagcagcaccgccagcgccagcgccaagaagatcatcgtgaagcacgtgaccgtgatcggcggcggcctgatgggcgccggcatcgcccaggtggccgccgccaccggccacaccgtggtgctggtggaccagaccgaggacatcctggccaagagcaagaagggcatcgaggagagcctgagaaaggtggccaagaagaagttcgccgagaacctgaaggccggcgacgagttcgtggagaagaccctgagcaccatcgccaccagcaccgacgccgccagcgtggtgcacagcaccgacctggtggtggaggccatcgtggagaacctgaaggtgaagaacgagctgttcaagagactggacaagttcgccgccgagcacaccatcttcgccagcaacaccagcagcctgcagatcaccagcatcgccaacgccaccaccagacaggacagattcgccggcctgcacttcttcaaccccgtgcccgtgatgaagctggtggaggtgatcaagacccccatgaccagccagaagaccttcgagagcctggtggacttcagcaaggccctgggcaagcaccccgtgagctgcaaggacacccccggcttcatcgtgaacagactgctggtgccctacctgatggaggccatcagactgtacgagagaggcgacgccagcaaggaggacatcgacaccgccatgaagctgggcgccggctaccccatgggccccttcgagctgctggactacgtgggcctggacaccaccaagttcatcgtggacggctggcacgagatggacgccgagaaccccctgcaccagcccagccccagcctgaacaagctggtggccgagaacaagttcggcaagaagaccggcgagggcttctacaagtacaagtag

SEQ ID NO: 9818 - DNA, 810 bp, synthetic construct
  source 1..810: mol_type = other DNA; note = Synthetic coding sequence
atgggcaactgctgctggacccagtgcttcggcctgctgagaaaggaggccggcagactgcagagagtgggcggcggcggcggcagcaagtacttcagaacctgcagcagaggcgagcacctgaccatcgagttcgagaacctggtggagagcgacgagggcgagagccccggcagcagccacagacccctgaccgaggaggagatcgtggacctgagagagagacactacgacagcatcgccgagaagcagaaggacctggacaagaagatccagaaggagcaggagagacagagaatcgtgcagcagtaccaccccagcaacaacggcgagtaccagagcagcggccccgaggacgacttcgagagctgcctgagaaacatgaagagccagtacgaggtgttcagaagcagcagactgagcagcgacgccaccgtgctgacccccaacaccgagagcagctgcgacctgatgaccaagaccaagagcaccagcggcaacgacgacagcaccagcctggacctggagtgggaggacgaggagggcatgaacagaatgctgcccatgagagagagaagcaagaccgaggaggacatcctgagagccgccctgaagtacagcaacaagaagaccggcagcaaccccaccagcgccagcgacgacagcaacggcctggagtgggagaacgacttcgtgagcgccgagatggacgacaacggcaacagcgagtacagcggcttcgtgaaccccgtgctggagctgagcgacagcggcatcagacacagcgacaccgaccagcagaccagatag

SEQ ID NO: 9819 - DNA, 1371 bp, synthetic construct
  source 1..1371: mol_type = other DNA; note = Synthetic coding sequence
atgaagtgcgagcactgcaccagaaaggagtgcagcaagaagaccaagaccgacgaccaggagaacgtgagcgccgacgcccccagccccgcccaggagaacggcgagaagggcgagttccacaagctggccgacgccaagatcttcctgagcgactgcctggcctgcgacagctgcatgaccgccgaggagggcgtgcagctgagccagcagaacgccaaggacttcttcagagtgctgaacctgaacaagaagtgcgacaccagcaagcacaaggtgctggtggtgagcgtgtgcccccagagcctgccctacttcgccgccaagttcaacctgagcgtgaccgacgccagcagaagactgtgcggcttcctgaagagcctgggcgtgcactacgtgttcgacaccaccatcgccgccgacttcagcatcctggagagccagaaggagttcgtgagaagatacagacagcacagcgaggaggagagaaccctgcccatgctgaccagcgcctgccccggctgggtgagatacgccgagagagtgctgggcagacccatcaccgcccacctgtgcaccgccaagagcccccagcaggtgatgggcagcctggtgaaggactacttcgccagacagcagaacctgagccccgagaagatcttccacgtgatcgtggccccctgctacgacaagaagctggaggccctgcaggagagcctgccccccgccctgcacggcagcagaggcgccgactgcgtgctgaccagcggcgagatcgcccagatcatggagcagggcgacctgagcgtgagagacgccgccgtggacaccctgttcggcgacctgaaggaggacaaggtgaccagacacgacggcgccagcagcgacggccacctggcccacatcttcagacacgccgccaaggagctgttcaacgaggacgtggaggaggtgacctacagagccctgagaaacaaggacttccaggaggtgaccctggagaagaacggcgaggtggtgctgagattcgccgccgcctacggcttcagaaacatccagaacatgatcctgaagctgaagaagggcaagttccccttccacttcgtggaggtgctggcctgcgccggcggctgcctgaacggcagaggccaggcccagacccccgacggccacgccgacaaggccctgctgagacagatggagggcatctacgccgacatccccgtgagaagacccgagagcagcgcccacgtgcaggagctgtaccaggagtggctggagggcatcaacagccccaaggccagagaggtgctgcacaccacctaccagagccaggagagaggcacccacagcctggacatcaagtggtag

SEQ ID NO: 9820 - DNA, 612 bp, synthetic construct
  source 1..612: mol_type = other DNA; note = Synthetic coding sequence
atggcccacgtgagcagcgagacccaggacgtgagccccaaggacgagctgaccgccagcgaggccagcaccagaagccccctgtgcgagcacaccttccccggcgacagcgacctgagaagcatgatcgaggagcacgccttccaggtgctgagccagggcagcctgctggagagccccagctacaccgtgtgcgtgagcgagcccgacaaggacgacgacttcctgagcctgaacttccccagaaagctgtggaagatcgtggagagcgaccagttcaagagcatcagctgggacgagaacggcacctgcatcgtgatcaacgaggagctgttcaagaaggagatcctggagaccaaggccccctacagaatcttccagaccgacgccatcaagagcttcgtgagacagctgaacctgtacggcttcagcaagatccagcagaacttccagagaagcgccttcctggccaccttcctgagcgaggagaaggagagcagcgtgctgagcaagatcagattcaccaagatgaagctgagcagaagcagcacctacgagaacagatacctgtgctgcaacctgcacctgaaggacgagagcaactacagctag

SEQ ID NO: 9821 - DNA, 2052 bp, synthetic construct
  source 1..2052: mol_type = other DNA; note = Synthetic coding sequence
atgaacaccagcatcccctaccagcagaacccctacaaccccagaggcagcagcaacgtgatccagtgctacagatgcggcgacacctgcaagggcgaggtggtgagagtgcacaacaaccacttccacatcagatgcttcacctgccaggtgtgcggctgcggcctggcccagagcggcttcttcttcaagaaccaggagtacatctgcacccaggactaccagcagctgtacggcaccagatgcgacagctgcagagacttcatcaccggcgaggtgatcagcgccctgggcagaacctaccaccccaagtgcttcgtgtgcagcctgtgcagaaagcccttccccatcggcgacaaggtgaccttcagcggcaaggagtgcgtgtgccagacctgcagccagagcatggccagcagcaagcccatcaagatcagaggccccagccactgcgccggctgcaaggaggagatcaagcacggccagagcctgctggccctggacaagcagtggcacgtgagctgcttcaagtgccagacctgcagcgtgatcctgaccggcgagtacatcagcaaggacggcgtgccctactgcgagagcgactaccacgcccagttcggcatcaagtgcgagacctgcgacagatacatcagcggcagagtgctggaggccggcggcaagcactaccaccccacctgcgccagatgcgtgagatgccaccagatgttcaccgagggcgaggagatgtacctgaccggcagcgaggtgtggcaccccatctgcaagcaggccgccagagccgagaagaagctgaagcacagaagaaccagcgagaccagcatcagcccccccggcagcagcatcggcagccccaacagagtgatctgcgccaaggtggacaacgagatcctgaactacaaggacctggccgccctgcccaaggtgaagagcatctacgaggtgcagagacccgacctgatcagctacgagccccacagcagatacatgagcgacgagatgctggagagatgcggctacggcgagagcctgggcaccctgagcccctacagccaggacatctacgagaacctggacctgagacagagaagagccagcagccccggctacatcgacagccccacctacagcagacagggcatgagccccaccttcagcagaagcccccaccactactacagaagcggccccgagagcggcagaagcagcccctaccacagccagctggacgtgagaagcagcacccccaccagctaccaggcccccaagcacttccacatccccgccggcgacagcaacatctacagaaagccccccatctacaagagacacggcgacctgagcaccgccaccaagagcaagaccagcgaggacatcagccagaccagcaagtacagccccatctacagccccgacccctactacgccagcgagagcgagtactggacctaccacggcagccccaaggtgcccagagccagaagattcagcagcggcggcgaggaggacgacttcgacagaagcatgcacaagctgcagagcggcatcggcagactgatcctgaaggaggagatgaaggccagaagcagcagctacgccgacccctggaccccccccagaagcagcaccagcagcagagaggccctgcacaccgccggctacgagatgagcctgaacggcagccccagaagccactacctggccgacagcgaccccctgatcagcaagagcgccagcctgcccgcctacagaagaaacggcctgcacagaacccccagcgccgacctgttccactacgacagcatgaacgccgtgaactggggcatgagagagtacaagatctacccctacgagctgctgctggtgaccaccagaggcagaaacagactgcccaaggacgtggacagaaccagactggagagacacctgagccaggaggagttctaccaggtgttcggcatgaccatcagcgagttcgacagactggccctgtggaagagaaacgagctgaagaagcaggccagactgttctag

SEQ ID NO: 9822 - DNA, 2541 bp, synthetic construct
  source 1..2541: mol_type = other DNA; note = Synthetic coding sequence
atgctgttcaccgtgagctgcagcaagatgagcagcatcgtggacagagacgacagcagcatcttcgacggcctggtggaggaggacgacaaggacaaggccaagagagtgagcagaaacaagagcgagaagaagagaagagaccagttcaacgtgctgatcaaggagctgggcagcatgctgcccggcaacgccagaaagatggacaagagcaccgtgctgcagaagagcatcgacttcctgagaaagcacaaggagatcaccgcccagagcgacgccagcgagatcagacaggactggaagcccaccttcctgagcaacgaggagttcacccagctgatgctggaggccctggacggcttcttcctggccatcatgaccgacggcagcatcatctacgtgagcgagagcgtgaccagcctgctggagcacctgcccagcgacctggtggaccagagcatcttcaacttcatccccgagggcgagcacagcgaggtgtacaagatcctgagcacccacctgctggagagcgacagcctgacccccgagtacctgaagagcaagaaccagctggagttctgctgccacatgctgagaggcaccatcgaccccaaggagcccagcacctacgagtacgtgaagttcatcggcaacttcaagagcctgaacagcgtgagcagcagcgcccacaacggcttcgagggcaccatccagagaacccacagacccagctacgaggacagagtgtgcttcgtggccaccgtgagactggccaccccccagttcatcaaggagatgtgcaccgtggaggagcccaacgaggagttcaccagcagacacagcctggagtggaagttcctgttcctggaccacagagccccccccatcatcggctacctgcccttcgaggtgctgggcaccagcggctacgactactaccacgtggacgacctggagaacctggccaagtgccacgagcacctgatgcagtacggcaagggcaagagctgctactacagattcctgaccaagggccagcagtggatctggctgcagacccactactacatcacctaccaccagtggaacagcagacccgagttcatcgtgtgcacccacaccgtggtgagctacgccgaggtgagagccgagagaagaagagagctgggcatcgaggagagcctgcccgagaccgccgccgacaagagccaggacagcggcagcgacaacagaatcaacaccgtgagcctgaaggaggccctggagagattcgaccacagccccacccccagcgccagcagcagaagcagcagaaagagcagccacaccgccgtgagcgaccccagcagcacccccaccaagatccccaccgacaccagcaccccccccagacagcacctgcccgcccacgagaagatggtgcagagaagaagcagcttcagcagccagagcatcaacagccagagcgtgggcagcagcctgacccagcccgtgatgagccaggccaccaacctgcccatcccccagggcatgagccagttccagttcagcgcccagctgggcgccatgcagcacctgaaggaccagctggagcagagaaccagaatgatcgaggccaacatccacagacagcaggaggagctgagaaagatccaggagcagctgcagatggtgcacggccagggcctgcagatgttcctgcagcagagcaaccccggcctgaacttcggcagcgtgcagctgagcagcggcaacagcagcaacatccagcagctggcccccatcaacatgcagggccaggtggtgcccaccaaccagatccagagcggcatgaacaccggccacatcggcaccacccagcacatgatccagcagcagaccctgcagagcaccagcacccagagccagcagaacgtgctgagcggccacagccagcagaccagcctgcccagccagacccagagcaccctgaccgcccccctgtacaacaccatggtgatcagccagcccgccgccggcagcatggtgcagatccccagcagcatgccccagaacagcacccagagcgccgccgtgaccaccttcacccaggacagacagatcagattcagccagggccagcagctggtgaccaagctggtgaccgcccccgtggcctgcggcgccgtgatggtgcccagcaccatgctgatgggccaggtggtgaccgcctaccccaccttcgccacccagcagcagcagagccagaccctgagcgtgacccagcagcagcagcagcagagcagccaggagcagcagctgaccagcgtgcagcagcccagccaggcccagctgacccagcccccccagcagttcctgcagaccagcagactgctgcacggcaaccccagcacccagctgatcctgagcgccgccttccccctgcagcagagcaccttcccccagagccaccaccagcagcaccagagccagcagcagcagcagctgagcagacacagaaccgacagcctgcccgaccccagcaaggtgcagccccagtag

SEQ ID NO: 9823 - DNA, 1656 bp, synthetic construct
  source 1..1656: mol_type = other DNA; note = Synthetic coding sequence
atgggcagaaaggccatcgtgctggccatcgccaacaccagcctggccttccccctgtgccagcacctggtgaccttctgcctgggcgaggacgacggcgtgcacaccgtggaggacgccagcagaaagctggccgtgatggacagccagggcagagtgtgggcccaggagatgctgctgagagtgagccccgaccacgtgaccctgctggaccccgccagcaaggaggagctggagagctaccccctgggcgccatcgtgagatgcgacgccgtgatgccccccggcagaagcagaagcctgctgctgctggtgtgccaggagcccgagagagcccagcccgacgtgcacttcttccagggcctgagactgggcgccgagctgatcagagaggacatccagggcgccctgcacaactacagaagcggcagaggcgagagaagagccgccgccctgagagccacccaggaggagctgcagagagacagaagccccgccgccgagaccccccccctgcagagaagacccagcgtgagagccgtgatcagcaccgtggagagaggcgccggcagaggcagaccccaggccaagcccatccccgaggccgaggaggcccagagacccgagcccgtgggcaccagcagcaacgccgacagcgccagccccgacctgggccccagaggccccgacctggccgtgctgcaggccgagagagaggtggacatcctgaaccacgtgttcgacgacgtggagagcttcgtgagcagactgcagaagagcgccgaggccgccagagtgctggagcacagagagagaggcagaagaagcagaagaagagccgccggcgagggcctgctgaccctgagagccaagccccccagcgaggccgagtacaccgacgtgctgcagaagatcaagtacgccttcagcctgctggccagactgagaggcaacatcgccgaccccagcagccccgagctgctgcacttcctgttcggccccctgcagatgatcgtgaacaccagcggcggccccgagttcgccagcagcgtgagaagaccccacctgaccagcgacgccgtggccctgctgagagacaacgtgacccccagagagaacgagctgtggaccagcctgggcgacagctggaccagacccggcctggagctgagccccgaggagggccccccctacagacccgagttcttcagcggctgggagccccccgtgaccgacccccagagcagagcctgggaggaccccgtggagaagcagctgcagcacgagagaagaagaagacaggtgacccaggccacccagcagggcagaggctgggaggtgagaggcagaggcagaagcgcctggcccagactgaccagactgagctacttcctgcagcagagcgccccccaggtggccgtgaacggccacagagacctggagcccgagagcgagccccagctggagagcgagaccgccggcaagtgggtgctgtgcaactacgacttccaggccagaaacagcagcgagctgagcgtgaagcagagagacgtgctggaggccctgcaggacaaggagaaggtgagcgagctggaggccgtgatggagaagcagaagaagaaggtggagggcgaggtggagatggaggtgatctag

SEQ ID NO: 9824 - DNA, 1689 bp, synthetic construct
  source 1..1689: mol_type = other DNA; note = Synthetic coding sequence
atggccgccagcgccaagagaaagcaggaggagaagcacctgaagatgctgagagacatgaccggcctgccccacaacagaaagtgcttcgactgcgaccagagaggccccacctacgtgaacatgaccgtgggcagcttcgtgtgcaccagctgcagcggcagcctgagaggcctgaaccccccccacagagtgaagagcatcagcatgaccaccttcacccagcaggagatcgagttcctgcagaagcacggcaacgaggtgtgcaagcagatctggctgggcctgttcgacgacagaagcagcgccatccccgacttcagagacccccagaaggtgaaggagttcctgcaggagaagtacgagaagaagagatggtacgtgccccccgagcaggccaaggtggtggccagcgtgcacgccagcatcagcggcagcagcgccagcagcaccagcagcacccccgaggtgaagcccctgaagagcctgctgggcgacagcgcccccaccctgcacctgaacaagggcacccccagccagagccccgtggtgggcagaagccagggccagcagcaggagaagaagcagttcgacctgctgagcgacctgggcagcgacatcttcgccgcccccgccccccagagcaccgccaccgccaacttcgccaacttcgcccacttcaacagccacgccgcccagaacagcgccaacgccgacttcgccaacttcgacgccttcggccagagcagcggcagcagcaacttcggcggcttccccaccgccagccacagccccttccagccccagaccaccggcggcagcgccgccagcgtgaacgccaacttcgcccacttcgacaacttccccaagagcagcagcgccgacttcggcaccttcaacaccagccagagccaccagaccgccagcgccgtgagcaaggtgagcaccaacaaggccggcctgcagaccgccgacaagtacgccgccctggccaacctggacaacatcttcagcgccggccagggcggcgaccagggcagcggcttcggcaccaccggcaaggcccccgtgggcagcgtggtgagcgtgcccagccagagcagcgccagcagcgacaagtacgccgccctggccgagctggacagcgtgttcagcagcgccgccaccagcagcaacgcctacaccagcaccagcaacgccagcagcaacgtgttcggcaccgtgcccgtggtggccagcgcccagacccagcccgccagcagcagcgtgcccgcccccttcggcgccacccccagcaccaaccccttcgtggccgccgccggccccagcgtggccagcagcaccaaccccttccagaccaacgccagaggcgccaccgccgccaccttcggcaccgccagcatgagcatgcccaccggcttcggcacccccgccccctacagcctgcccaccagcttcagcggcagcttccagcagcccgccttccccgcccaggccgccttcccccagcagaccgccttcagccagcagcccaacggcgccggcttcgccgccttcggccagaccaagcccgtggtgacccccttcggccaggtggccgccgccggcgtgagcagcaaccccttcatgaccggcgcccccaccggccagttccccaccggcagcagcagcaccaaccccttcctgtag

SEQ ID NO: 9825 - DNA, 2052 bp, synthetic construct
  source 1..2052: mol_type = other DNA; note = Synthetic coding sequence
atggccgccgccgtggccgcccccctggccgccggcggcgaggaggccgccgccaccaccagcgtgcccggcagccccggcctgcccggcagaagaagcgccgagagagccctggaggaggccgtggccaccggcaccctgaacctgagcaacagaagactgaagcacttccccagaggcgccgccagaagctacgacctgagcgacatcacccaggccgacctgagcagaaacagattccccgaggtgcccgaggccgcctgccagctggtgagcctggagggcctgagcctgtaccacaactgcctgagatgcctgaaccccgccctgggcaacctgaccgccctgacctacctgaacctgagcagaaaccagctgagcctgctgcccccctacatctgccagctgcccctgagagtgctgatcgtgagcaacaacaagctgggcgccctgccccccgacatcggcaccctgggcagcctgagacagctggacgtgagcagcaacgagctgcagagcctgcccagcgagctgtgcggcctgagcagcctgagagacctgaacgtgagaagaaaccagctgagcaccctgcccgaggagctgggcgacctgcccctggtgagactggacttcagctgcaacagagtgagcagaatccccgtgagcttctgcagactgagacacctgcaggtgatcctgctggacagcaaccccctgcagagcccccccgcccaggtgtgcctgaagggcaagctgcacatcttcaagtacctgagcaccgaggccggccagagaggcagcgccctgggcgacctggcccccagcagaccccccagcttcagcccctgccccgccgaggacctgttccccggccacagatacgacggcggcctggacagcggcttccacagcgtggacagcggcagcaagagatggagcggcaacgagagcaccgacgagttcagcgagctgagcttcagaatcagcgagctggccagagagcccagaggccccagagagagaaaggaggacggcagcgccgacggcgaccccgtgcagatcgacttcatcgacagccacgtgcccggcgaggacgaggagagaggcaccgtggaggagcagagaccccccgagctgagccccggcgccggcgacagagagagagcccccagcagcagaagagaggagcccgccggcgaggagagaagaagacccgacaccctgcagctgtggcaggagagagagagaagacagcagcagcagagcggcgcctggggcgcccccagaaaggacagcctgctgaagcccggcctgagagccgtggtgggcggcgccgccgccgtgagcacccaggccatgcacaacggcagccccaagagcagcgccagccaggccggcgccgccgccggccagggcgcccccgcccccgcccccgccagccaggagcccctgcccatcgccggccccgccaccgcccccgcccccagacccctgggcagcatccagagacccaacagcttcctgttcagaagcagcagccagagcggcagcggccccagcagccccgacagcgtgctgagacccagaagatacccccaggtgcccgacgagaaggacctgatgacccagctgagacaggtgctggagagcagactgcagagacccctgcccgaggacctggccgaggccctggccagcggcgtgatcctgtgccagctggccaaccagctgagacccagaagcgtgcccttcatccacgtgcccagccccgccgtgcccaagctgagcgccctgaaggccagaaagaacgtggagagcttcctggaggcctgcagaaagatgggcgtgcccgaggccgacctgtgcagccccagcgacctgctgcagggcaccgccagaggcctgagaaccgccctggaggccgtgaagagagtgggcggcaaggccctgccccccctgtggccccccagcggcctgggcggcttcgtggtgttctacgtggtgctgatgctgctgctgtacgtgacctacaccagactgctgggcagctag

SEQ ID NO: 9826 - DNA, 303 bp, synthetic construct
  source 1..303: mol_type = other DNA; note = Synthetic coding sequence
atgagcaccagcaccagctgccccatccccggcggcagagaccagctgcccgactgctacagcaccacccccggcggcaccctgtacgccaccacccccggcggcaccagaatcatctacgacagaaagttcctgctggagtgcaagaacagccccatcgccagaacccccccctgctgcctgccccagatccccggcgtgaccaccccccccaccgcccccctgagcaagctggaggagctgaaggagcaggagaccgaggaggagatccccgacgacgcccagttcgagatggacatctag

SEQ ID NO: 9827 - DNA, 2382 bp, synthetic construct
  source 1..2382: mol_type = other DNA; note = Synthetic coding sequence
atgcccatggagagcgccagcagcgacaacaagaagcagatccccaacgaggccagcgccagaagcgagagagacaccagcgacctggagcagaactggagcctgcaggaccactacagaatgtacagccccatcatctaccaggccctgtgcgagcacgtgcagacccagatgagcctgatgaacgacctgaccagcaagaacatccccaacggcatccccgccgtgccctgccacgcccccagccacagcgagagccaggccaccccccacagcagctacggcctgtgcaccagcacccccgtgtggagcctgcagagacccccctgcccccccaaggtgcacagcgaggtgcagaccgacggcaacagccagttcgccagccagggcaagaccgtgagcgccacctgcaccgacgtgctgagaaacagcttcaacaccagccccggcgtgccctgcagcctgcccaagaccgacatcagcgccatccccaccctgcagcagctgggcctggtgaacggcatcctgccccagcagggcatccacaaggagaccgacctgctgaagtgcatccagacctacctgagcctgttcagaagccacggcaaggagacccacctggacagccagacccacagaagccccacccagagccagcccgccttcctggccaccaacgaggagaagtgcgccagagagcagatcagagaggccaccagcgagagaaaggacctgaacatccacgtgagagacaccaagaccgtgaaggacgtgcagaaggccaagaacgtgaacaagaccgccgagaaggtgagaatcatcaagtacctgctgggcgagctgaaggccctggtggccgagcaggaggacagcgagatccagagactgatcaccgagatggaggcctgcatcagcgtgctgcccaccgtgagcggcaacaccgacatccaggtggagatcgccctggccatgcagcccctgagaagcgagaacgcccagctgagaagacagctgagaatcctgaaccagcagctgagagagcagcagaagacccagaagcccagcggcgccgtggactgcaacctggagctgttcagcctgcagagcctgaacatgagcctgcagaaccagctggaggagagcctgaagagccaggagctgctgcagagcaagaacgaggagctgctgaaggtgatcgagaaccagaaggacgagaacaagaagttcagcagcatcttcaaggacaaggaccagaccatcctggagaacaagcagcagtacgacatcgagatcaccagaatcaagatcgagctggaggaggccctggtgaacgtgaagagcagccagttcaagctggagaccgccgagaaggagaaccagatcctgggcatcaccctgagacagagagacgccgaggtgaccagactgagagagctgaccagaaccctgcagaccagcatggccaagctgctgagcgacctgagcgtggacagcgccagatgcaagcccggcaacaacctgaccaagagcctgctgaacatccacgacaagcagctgcagcacgaccccgcccccgcccacaccagcatcatgagctacctgaacaagctggagaccaactacagcttcacccacagcgagcccctgagcaccatcaagaacgaggagaccatcgagcccgacaagacctacgagaacgtgctgagcagcagaggcccccagaacagcaacaccagaggcatggaggaggccagcgcccccggcatcatcagcgccctgagcaagcaggacagcgacgagggcagcgagaccatggccctgatcgaggacgagcacaacctggacaacaccatctacatccccttcgccagaagcacccccgagaagaagagccccctgagcaagagactgagcccccagccccagatcagagccgccaccacccagctggtgagcaacagcggcctggccgtgagcggcaaggagaacaagctgtgcacccccgtgatctgcagcagcagcaccaaggaggccgaggacgcccccgagaagctgagcagagccagcgacatgaaggacacccagctgctgaagaagatcaaggaggccatcggcaagatccccgccgccaccaaggagcccgaggagcagaccgcctgccacggccccagcggctgcctgagcaacagcctgcaggtgaagggcaacaccgtgtgcgacggcagcgtgttcaccagcgacctgatgagcgactggagcatcagcagcttcagcaccttcaccagcagagacgagcaggacttcagaaacggcctggccgccctggacgccaacatcgccagactgcagaagagcctgagaaccggcctgctggagaagtag

SEQ ID NO: 9828 - DNA, 1119 bp, synthetic construct; identical to SEQ ID NO: 9746
  source 1..1119: mol_type = other DNA; note = Synthetic coding sequence

SEQ ID NO: 9829 - DNA, 336 bp, synthetic construct
  source 1..336: mol_type = other DNA; note = Synthetic coding sequence
atgaccaccctgagagccttcacctgcgacgacctgttcagattcaacaacatcaacctggaccccctgaccgagacctacggcatccccttctacctgcagtacctggcccactggcccgagtacttcatcgtggccgaggcccccggcggcgagctgatgggctacatcatgggcaaggccgagggcagcgtggccagagaggagtggcacggccacgtgaccgccctgagcgtggcccccgagttcagaagactgggcctggccgccaagctgatggagctgctggaggagatcagcgagagatacgaggagagcaccttccagggctactag

SEQ ID NO: 9830 - DNA, 1449 bp, synthetic construct
  source 1..1449: mol_type = other DNA; note = Synthetic coding sequence
atgaacggcaccctggaccaccccgaccagcccgacctggacgccatcaagatgttcgtgggccaggtgcccagaacctggagcgagaaggacctgagagagctgttcgagcagtacggcgccgtgtacgagatcaacgtgctgagagacagaagccagaaccccccccagagcaagggctgctgcttcgtgaccttctacaccagaaaggccgccctggaggcccagaacgccctgcacaacatgaaggtgctgcccggcatgcaccaccccatccagatgaagcccgccgacagcgagaagaacaacgccgtggaggacagaaagctgttcatcggcatgatcagcaagaagtgcaccgagaacgacatcagagtgatgttcagcagcttcggccagatcgaggagtgcagaatcctgagaggccccgacggcctgagcagaggctgcgccttcgtgaccttcaccaccagagccatggcccagaccgccatcaaggccatgcaccaggcccagaccatggagggctgcagcagccccatggtggtgaagttcgccgacacccagaaggacaaggagcagaagagaatggcccagcagctgcagcagcagatgcagcagatcagcgccgccagcgtgtggggcaacctggccggcctgaacaccctgggcccccagtacctggccctgctgcagcagaccgccagcagcggcaacctgaacaccctgagcagcctgcaccccatgggcggcctgaacgccatgcagctgcagaacctggccgccctggccgccgccgccagcgccgcccagaacacccccagcggcaccaacgccctgaccaccagcagcagccccctgagcgtgctgaccagcagcggcagcagccccagcagcagcagcagcaacagcgtgaaccccatcgccagcctgggcgccctgcagaccctggccggcgccaccgccggcctgaacgtgggcagcctggccggcatggccgccctgaacggcggcctgggcagcagcggcctgagcaacggcaccggcagcaccatggaggccctgacccaggcctacagcggcatccagcagtacgccgccgccgccctgcccaccctgtacaaccagaacctgctgacccagcagagcatcggcgccgccggcagccagaaggagggccccgagggcgccaacctgttcatctaccacctgccccaggagttcggcgaccaggacctgctgcagatgttcatgcccttcggcaacgtggtgagcgccaaggtgttcatcgacaagcagaccaacctgagcaagtgcttcggcttcgtgagctacgacaaccccgtgagcgcccaggccgccatccagagcatgaacggcttccagatcggcatgaagagactgaaggtgcagctgaagagaagcaagaacgacagcaagccctactag

SEQ ID NO: 9831 - DNA, 1347 bp, synthetic construct
  source 1..1347: mol_type = other DNA; note = Synthetic coding sequence
atgagccccctggagtgcagcgagtgcttcggcgaccagctgctgcacagaacctacacctggcagctgaccctgcacagcagacccaactacaccagaaagagagacaccagaagcgagagcctggagatccccatcagcgtggtgctgccccagagaggcaccgccgagcccttccccagactgcacaacctgtacagcacccccagatgcgcccagcaggccgccctgcccagactgagcagaagaatggccagccagcacagctaccccctgaacagattcagcagcgtgcccctggaccccatggagagacccatgagccaggccgacctggagctggactacaacccccccagagtgcagctgagcgacgagatgttcgtgttccaggacggcagatgggtgaacgagaactgcagactgcagagcccctacttcagccccagcgccagcttccaccacaagctgcaccacaagagactggccaaggagtgcatgctgcaggaggagaacaagagcctgagagaggagaacaaggccctgagagaggagaacagaatgctgagcaaggagaacaagatcctgcaggtgttctgggaggagcacaaggccagcctgggcagagaggagagcagagcccccagccccctgctgcacaaggacagcgccagcctggaggtggtgaagaaggaccacgtggccctgcaggtgcccagaggcaaggaggacagcaccctgcagctgctgagagaggagaacagagccctgcagcagctgctggagcagaagcaggcctactgggcccaggccgaggacaccgccgcccccgccgaggagagcaagcccgcccccagcccccacgaggagccctgcagccccggcctgctgcaggaccagggcagcggcctgagcagcagattcgaggagcccaagggcccccccgccagacaggaggacagcaaggagctgagagccctgagaaagatggtgagcaacatgagcggccccagcggcgaggaggaggccaaggtgggccccggcctgcccgacggctgccagcccctgcagctgctgagagagatgagacaggccctgcaggccctgctgaaggagaacagactgctgcaggaggagaacagaaccctgcaggtgctgagagccgagcacagaggcttccaggaggagaacaaggccctgtgggagaacaacaagctgaagctgcagcagaagctggtgatcgacaccgtgaccgaggtgaccgccagaatggagatgctgatcgaggagctgtacgccttcatgcccgccagaagccaggaccccaagaagcccagcagagtgtag

SEQ ID NO: 9832 - DNA, 1002 bp, synthetic construct
  source 1..1002: mol_type = other DNA; note = Synthetic coding sequence
atggccgccgccgccgccggcaccgccaccagccagagattcttccagagcttcagcgacgccctgatcgacgaggacccccaggccgccctggaggagctgaccaaggccctggagcagaagcccgacgacgcccagtactactgccagagagcctactgccacatcctgctgggcaactactgcgtggccgtggccgacgccaagaagagcctggagctgaaccccaacaacagcaccgccatgctgagaaagggcatctgcgagtaccacgagaagaactacgccgccgccctggagaccttcaccgagggccagaagctggacagcgccgacgccaacttcagcgtgtggatcaagagatgccaggaggcccagaacggcagcgagagcgaggtgtggacccaccagagcaagatcaagtacgactggtaccagaccgagagccaggtggtgatcaccctgatgatcaagaacgtgcagaagaacgacgtgaacgtggagttcagcgagaaggagctgagcgccctggtgaagctgcccagcggcgaggactacaacctgaagctggagctgctgcaccccatcatccccgagcagagcaccttcaaggtgctgagcaccaagatcgagatcaagctgaagaagcccgaggccgtgagatgggagaagctggagggccagggcgacgtgcccacccccaagcagttcgtggccgacgtgaagaacctgtaccccagcagcagcccctacaccagaaactgggacaagctggtgggcgagatcaaggaggaggagaagaacgagaagctggagggcgacgccgccctgaacagactgttccagcagatctacagcgacggcagcgacgaggtgaagagagccatgaacaagagcttcatggagagcggcggcaccgtgctgagcaccaactggagcgacgtgggcaagagaaaggtggagatcaacccccccgacgacatggagtggaagaagtactag

SEQ ID NO: 9833 - DNA, 1029 bp, synthetic construct
  source 1..1029: mol_type = other DNA; note = Synthetic coding sequence
atgagcctgcacggcaagagaaaggagatctacaagtacgaggccccctggaccgtgtacgccatgaactggagcgtgagacccgacaagagattcagactggccctgggcagcttcgtggaggagtacaacaacaaggtgcagctggtgggcctggacgaggagagcagcgagttcatctgcagaaacaccttcgaccacccctaccccaccaccaagctgatgtggatccccgacaccaagggcgtgtaccccgacctgctggccaccagcggcgactacctgagagtgtggagagtgggcgagaccgagaccagactggagtgcctgctgaacaacaacaagaacagcgacttctgcgcccccctgaccagcttcgactggaacgaggtggacccctacctgctgggcaccagcagcatcgacaccacctgcaccatctggggcctggagaccggccaggtgctgggcagagtgaacctggtgagcggccacgtgaagacccagctgatcgcccacgacaaggaggtgtacgacatcgccttcagcagagccggcggcggcagagacatgttcgccagcgtgggcgccgacggcagcgtgagaatgttcgacctgagacacctggagcacagcaccatcatctacgaggacccccagcaccaccccctgctgagactgtgctggaacaagcaggaccccaactacctggccaccatggccatggacggcatggaggtggtgatcctggacgtgagagtgccctgcacccccgtggccagactgaacaaccacagagcctgcgtgaacggcatcgcctgggccccccacagcagctgccacatctgcaccgccgccgacgaccaccaggccctgatctgggacatccagcagatgcccagagccatcgaggaccccatcctggcctacaccgccgagggcgagatcaacaacgtgcagtgggccagcacccagcccgactggatcgccatctgctacaacaactgcctggagatcctgagagtgtag

SEQ ID NO: 9834 - DNA, 507 bp, synthetic construct
  source 1..507: mol_type = other DNA; note = Synthetic coding sequence
atggccgagggcagcagaatcccccaggccagagccctgctgcagcagtgcctgcacgccagactgcagatcagacccgccgacggcgacgtggccgcccagtgggtggaggtgcagagaggcctggtgatctacgtgtgcttcttcaagggcgccgacaaggagctgctgcccaagatggtgaacaccctgctgaacgtgaagctgagcgagaccgagaacggcaagcacgtgagcatcctggacctgcccggcaacatcctgatcatcccccaggccaccctgggcggcagactgaagggcagaaacatgcagtaccacagcaacagcggcaaggaggagggcttcgagctgtacagccagttcgtgaccctgtgcgagaaggaggtggccgccaacagcaagtgcgccgaggccagagtggtggtggagcacggcacctacggcaacagacaggtgctgaagctggacaccaacggccccttcacccacctgatcgagttctag

SEQ ID NO: 9835 - DNA, 3069 bp, synthetic construct
  source 1..3069: mol_type = other DNA; note = Synthetic coding sequence
atggagggcgccctgaccgccagagacaaggtgggcgtgcaggacttcgtgctgctggacgcctacaccagcgagagcgccttcgtggacaacctgagaaagagattcagcgagaacctgatctacacctacatcggcaccctgctggtgagcgtgaacccctaccaggagctgggcatctacaccgtgagccagatggagctgtaccagggcgtgaacttcttcgagctgcccccccacgtgtacgccatcgccgacaacgcctacagaatgatgtgcgccgagctgaacaaccacttcatcctgatcagcggcgagagcggcgccggcaagaccgaggccagcaagaagatcctggagtacttcgccgtgacctgccccatgacccagagcctgcagatcgccagagacagactgctgttcagcaaccccgtgctggaggccttcggcaacgccagaaccctgagaaacgacaacagcagcagattcggcaagtacatggacatccagttcgacttccagggcatccccgtgggcggccacatcatcagctacctgatcgagaagagcagagtggtgtaccagaacgagggcgagagaaacttccacatcttctaccagctgctggccggcggcgaggaggagagactgagctacctgggcctggagagagacccccagctgtacaagtacctgagccagggccactgcgccaaggagagcagcatcagcgacaagaacgactggaagaccgtgagcaacgccttcagcgtgatcgacttcaccgaggccgacctggagaacctgttcggcatcatcgccagcgtgctgcacctgggcaacatcggcttcgaggaggacgaccagggctgcgccaccatccccgacacccacgagatcaagtggatcgccaagctgctgggcgtgcaccccagcgtgctgctggaggccctgacccacagaaagatcgaggccaagaccgaggaggtgatctgccccctgaccctggagctgagcgtgtacgccagagacgccatggccaaggccgtgtacggcagaaccttcacctggctggtgaacaagatcaacagcagcctggtgaacaaggacttcaccagaaagaccgtgatcggcctgctggacatctacggcttcgaggtgttcgacaagaacggcttcgagcagttctgcatcaactactgcaacgagaagctgcagcagctgctgatcgagagaaccctgaaggccgagcaggccgagtacgagatggagggcatcgagtgggagcccatcaagtacttcaacaacaagatcatctgcgacctggtggaggagagacacaagggcatcatcagcatcctggacgaggagtgcatcagacccggccccgccaccgacctgagcttcctggagaagctggaggagaaggtgggcaagcacgcccacttcgagaccagaaagctggccggccccaagggcagaaagagaatcggctggatggagttcagactgctgcactacgccggcgaggtgacctactgcaccaagggcttcctggagaagaacaacgacctgctgtacagacacctgaaggaggtgctgtgcaagagcaagaacatcatcctgagagagtgcttcctgctggccgagctggagaacagaagaagaccccccaccgtgggcacccagttcaagaacagcctgagcagcctgctggagaccctgatcagcaaggagcccagctacatcagatgcatcaagcccaacgacagaaaggagcccagcaagttcgacgacttcctgatcagacaccagatcaagtacctgggcctgatggagcacctgagagtgagaagagccggcttcgcctacagaagaaagtacgagcacttcctgcagagatacaagagcctgtgccccgacacctggccccactggcacggcccccccgccgagggcgtggagagactgatcaagtacatcggctacaagcccgaggagtacaagctgggcaagaccaagatcttcatcagattccccagaaccctgttcgccaccgaggacgccttcgagttcagcaagcaccagctggtggccagaatccaggccacctacaagagatgcctgggcagaagagagtacgtgaagaagagacaggccgccatcaagctggaggcccactggagaggcgccctggccagaaaggccatccagagaagaaagtgggccgtgagaatcatcagaaagttcatcaagggcttcatcagcagaaacaagcccctgtgccccgacaacgaggagttcatcgtgttcgtgagaaagaactacatcctgaacctgagataccacctgcccaagaccgtgctggacaagagctggctgagaccccccggcatcctggagaacgccagcgacctgctgagaaagatgtgcgtgagaaacctggtgcagaagtactgcagaggcatcaccgccgagagaaaggccatgatgcagcagaaggtggtgaccagcgagatcttcagaggcagaaaggacggctacaccgagagcctgaaccagcccttcgtgaacagcagaatcgacgagggcgacatcaaccccaaggtgctgcagctgatcagccacgagaagatccagtacggcgtgcccgtgatcaagtacgacagaaagggcttcaaggccagacagagacagctgatcctgacccagaaggccgcctacgtggtggagctggccaagatcaagcagaagatcgagtacagcgccctgaagggcgtgagcaccagcaacctgagcgacggcatcctggtgatccacgtgagccccgaggacagcaagcagaagggcgacgccgtgctgcagtgcggccacgtgttcgaggccgtgaccaagctggtgatgctggtgaagaaggagaacatcgtgaacgtggtgcagggcagcctgcagttcttcatcagccccggcaaggagggcaccatcgtgttcgacaccggcctggaggagcaggtgtacaagaacaagaacggccagctgaccgtggtgagcgtgagaagaaagagctag

SEQ ID NO: 9836 - DNA, 1044 bp, synthetic construct
  source 1..1044: mol_type = other DNA; note = Synthetic coding sequence
atgaacaccctgatggacgtgctgagacacagacccggctgggtggaggtgaaggacgagggcgagtgggacttctactggtgcgacgtgagctggctgagagagaacttcgaccacacctacatggacgagcacgtgagaatcagccacttcagaaaccactacgagctgaccagaaagaactacatggtgaagaacctgaagagattcagaaagcagctggagagagaggccggcaagctggaggccgccaagtgcgacttcttccccaagaccttcgagatgccctgcgagtaccacctgttcgtggaggagttcagaaagaaccccggcatcacctggatcatgaagcccgtggccagaagccagggcaagggcatcttcctgttcagaagactgaaggacatcgtggactggagaaaggacaccagaagcagcgacgaccagaaggacgacatccccgtggagaactacgtggcccagagatacatcgagaacccctacctgatcggcggcagaaagttcgacctgagagtgtacgtgctggtgatgagctacatccccctgagagcctggctgtacagagacggcttcgccagattcagcaacaccagattcaccctgaacagcatcgacgaccagtacgtgcacctgaccaacgtggccgtgcagaagaccagccccgactaccaccccaagaagggctgcaagtggaccctgcagagattcagacagtacctggccagcaagcacggccccgaggccgtggagaccctgttcagagacatcgacaacatcttcgtgaagagcctgcagagcgtgcagaaggtgatcatcagcgacaagcactgcttcgagctgtacggctacgacatcctgatcgaccaggacctgaagccctggctgctggaggtgaacgccagccccagcctgaccgccagcagccaggaggactacgagctgaagacctgcctgctggaggacaccctgcacgtggtggacatggaggccagaagcctgagagccgacagcccctgctggtag

SEQ ID NO: 9837 - DNA, 444 bp, synthetic construct
  source 1..444: mol_type = other DNA; note = Synthetic coding sequence
atgagcagcgagccccccccccccccccagccccccacccaccaggccagcgtgggcctgctggacacccccagaagcagagagagaagccccagccccctgagaggcaacgtggtgcccagccccctgcccaccagaagaaccagaaccttcagcgccaccgtgagagccagccagggccccgtgtacaagggcgtgtgcaagtgcttctgcagaagcaagggccacggcttcatcacccccgccgacggcggccccgacatcttcctgcacatcagcgacgtggagggcgagtacgtgcccgtggagggcgacgaggtgacctacaagatgtgcagcatcccccccaagaacgagaagctgcaggccgtggaggtggtgatcacccacctggcccccggcaccaagcacgagacctggagcggccacgtgatcagcagctag

SEQ ID NO: 9838 - DNA, 558 bp, synthetic construct
  source 1..558: mol_type = other DNA; note = Synthetic coding sequence
atggccgacggcggcggcggcggcggcaccggcgccgtgggcggcggcggcaccagccaggccagcgccggcgccgccaccggcgccaccggcgccagcggcggcggcggccccatcaaccccgccagcctgccccccggcgacccccagctgatcgccctgatcgtggagcagctgaagagcagaggcctgttcgacagcttcagaagagactgcctggccgacgtggacaccaagcccgcctaccagaacctgagacagaaggtggacaacttcgtgagcacccacctggacaagcaggagtggaaccccaccatgaacaagaaccagctgagaaacggcctgagacagagcgtggtgcagagcggcatgctggaggccggcgtggacagaatcatcagccaggtggtggaccccaagctgaaccacatcttcagaccccagatcgagagagccatccacgagttcctggccgcccagaagaaggccgccgtgcccgcccccccccccgagcccgagggccaggacccccccgcccccagccaggacaccagctag

SEQ ID NO: 9839 - DNA, 6351 bp, synthetic construct
  source 1..6351: mol_type = other DNA; note = Synthetic coding sequence
atggacgaggtggagcaggaccagcacgaggccagactgaaggagctgttcgacagcttcgacaccaccggcaccggcagcctgggccaggaggagctgaccgacctgtgccacatgctgagcctggaggaggtggcccccgtgctgcagcagaccctgctgcaggacaacctgctgggcagagtgcacttcgaccagttcaaggaggccctgatcctgatcctgagcagaaccctgagcaacgaggagcacttccaggagcccgactgcagcctggaggcccagcccaagtacgtgagaggcggcaagagatacggcagaagaagcctgcccgagttccaggagagcgtggaggagttccccgaggtgaccgtgatcgagcccctggacgaggaggccagacccagccacatccccgccggcgactgcagcgagcactggaagacccagagaagcgaggagtacgaggccgagggccagctgagattctggaaccccgacgacctgaacgccagccagagcggcagcagccccccccaggactggatcgaggagaagctgcaggaggtgtgcgaggacctgggcatcaccagagacggccacctgaacagaaagaagctggtgagcatctgcgagcagtacggcctgcagaacgtggacggcgagatgctggaggaggtgttccacaacctggaccccgacggcaccatgagcgtggaggacttcttctacggcctgttcaagaacggcaagagcctgacccccagcgccagcaccccctacagacagctgaagagacacctgagcatgcagagcttcgacgagagcggcagaagaaccaccaccagcagcgccatgaccagcaccatcggcttcagagtgttcagctgcctggacgacggcatgggccacgccagcgtggagagaatcctggacacctggcaggaggagggcatcgagaacagccaggagatcctgaaggccctggacttcagcctggacggcaacatcaacctgaccgagctgaccctggccctggagaacgagctgctggtgaccaagaacagcatccaccaggccgccctggccagcttcaaggccgagatcagacacctgctggagagagtggaccaggtggtgagagagaaggagaagctgagaagcgacctggacaaggccgagaagctgaagagcctgatggccagcgaggtggacgaccaccacgccgccatcgagagaagaaacgagtacaacctgagaaagctggacgaggagtacaaggagagaatcgccgccctgaagaacgagctgagaaaggagagagagcagatcctgcagcaggccggcaagcagagactggagctggagcaggagatcgagaaggccaagaccgaggagaactacatcagagacagactggccctgagcctgaaggagaacagcagactggagaacgagctgctggagaacgccgagaacgtgctggccgagaagttcggcgacctggaccccagcagcgccgagttcttcctgcaggaggagagactgacccagatgagaaacgagtacgagagacagtgcagagtgctgcaggaccaggtggacgagctgcagagcgagctggaggagtacagagcccagggcagagtgctgagactgcccctgaagaacagccccagcgaggaggtggaggccaacagcggcggcatcgagcccgagcacggcctgggcagcgaggagtgcaaccccctgaacatgagcatcgaggccgagctggtgatcgagcagatgaaggagcagcaccacagagacatctgctgcctgagactggagctggaggacaaggtgagacactacgagaagcagctggacgagaccgtggtgagctgcaagaaggcccaggagaacatgaagcagagacacgagaacgagacccacaccctggagaagcagatcagcgacctgaagaacgagatcgccgagctgcagggccaggccgccgtgctgaaggaggcccaccacgaggccacctgcagacacgaggaggagaagaagcagctgcaggtgaagctggaggaggagaagacccacctgcaggagaagctgagactgcagcacgagatggagctgaaggccagactgacccaggcccaggccagcttcgagagagagagagagggcctgcagagcagcgcctggaccgaggagaaggtgagaggcctgacccaggagctggagcagttccaccaggagcagctgaccagcctggtggagaagcacaccctggagaaggaggagctgagaaaggagctgctggagaagcaccagagagagctgcaggagggcagagagaagatggagaccgagtgcaacagaagaaccagccagatcgaggcccagttccagagcgactgccagaaggtgaccgagagatgcgagagcgccctgcagagcctggagggcagatacagacaggagctgaaggacctgcaggagcagcagagagaggagaagagccagtgggagttcgagaaggacgagctgacccaggagtgcgccgaggcccaggagctgctgaaggagaccctgaagagagagaagaccaccagcctggtgctgacccaggagagagagatgctggagaagacctacaaggagcacctgaacagcatggtggtggagagacagcagctgctgcaggacctggaggacctgagaaacgtgagcgagacccagcagagcctgctgagcgaccagatcctggagctgaagagcagccacaagagagagctgagagagagagaggaggtgctgtgccaggccggcgccagcgagcagctggccagccagagactggagagactggagatggagcacgaccaggagagacaggagatgatgagcaagctgctggccatggagaacatccacaaggccacctgcgagaccgccgacagagagagagccgagatgagcaccgagatcagcagactgcagagcaagatcaaggagatgcagcaggccaccagccccctgagcatgctgcagagcggctgccaggtgatcggcgaggaggaggtggagggcgacggcgccctgagcctgctgcagcagggcgagcagctgctggaggagaacggcgacgtgctgctgagcctgcagagagcccacgagcaggccgtgaaggagaacgtgaagatggccaccgagatcagcagactgcagcagagactgcagaagctggagcccggcctggtgatgagcagctgcctggacgagcccgccaccgagttcttcggcaacaccgccgagcagaccgagcagttcctgcagcagaacagaaccaagcaggtggagggcgtgaccagaagacacgtgctgagcgacctggaggacgacgaggtgagagacctgggcagcaccggcaccagcagcgtgcagagacaggaggtgaagatcgaggagagcgaggccagcgtggagggcttcagcgagctggagaacagcgaggagaccagaaccgagagctgggagctgaagaaccagatcagccagctgcaggagcagctgatgatgctgtgcgccgactgcgacagagccagcgagaagaagcaggacctgctgttcgacgtgagcgtgctgaagaagaagctgaagatgctggagagaatccccgaggccagccccaagtacaagctgctgtacgaggacgtgagcagagagaacgactgcctgcaggaggagctgagaatgatggagaccagatacgacgaggccctggagaacaacaaggagctgaccgccgaggtgttcagactgcaggacgagctgaagaagatggaggaggtgaccgagaccttcctgagcctggagaagagctacgacgaggtgaagatcgagaacgagggcctgaacgtgctggtgctgagactgcagggcaagatcgagaagctgcaggagagcgtggtgcagagatgcgactgctgcctgtgggaggccagcctggagaacctggagatcgagcccgacggcaacatcctgcagctgaaccagaccctggaggagtgcgtgcccagagtgagaagcgtgcaccacgtgatcgaggagtgcaagcaggagaaccagtacctggagggcaacacccagctgctggagaaggtgaaggcccacgagatcgcctggctgcacggcaccatccagacccaccaggagagacccagagtgcagaaccaggtgatcctggaggagaacaccaccctgctgggcttccaggacaagcacttccagcaccaggccaccatcgccgagctggagctggagaagaccaagctgcaggagctgaccagaaagctgaaggagagagtgaccatcctggtgaagcagaaggacgtgctgagccacggcgagaaggaggaggagctgaaggccatgatgcacgacctgcagatcacctgcagcgagatgcagcagaaggtggagctgctgagatacgagagcgagaagctgcagcaggagaacagcatcctgagaaacgagatcaccaccctgaacgaggaggacagcatcagcaacctgaagctgggcaccctgaacggcagccaggaggagatgtggcagaagaccgagaccgtgaagcaggagaacgccgccgtgcagaagatggtggagaacctgaagaagcagatcagcgagctgaagatcaagaaccagcagctggacctggagaacaccgagctgagccagaagaacagccagaaccaggagaagctgcaggagctgaaccagagactgaccgagatgctgtgccagaaggagaaggagcccggcaacagcgccctggaggagagagagcaggagaagttcaacctgaaggaggagctggagagatgcaaggtgcagagcagcaccctggtgagcagcctggaggccgagctgagcgaggtgaagatccagacccacatcgtgcagcaggagaaccacctgctgaaggacgagctggagaagatgaagcagctgcacagatgccccgacctgagcgacttccagcagaagatcagcagcgtgctgagctacaacgagaagctgctgaaggagaaggaggccctgagcgaggagctgaacagctgcgtggacaagctggccaagagcagcctgctggagcacagaatcgccaccatgaagcaggagcagaagagctgggagcaccagagcgccagcctgaagagccagctggtggccagccaggagaaggtgcagaacctggaggacaccgtgcagaacgtgaacctgcagatgagcagaatgaagagcgacctgagagtgacccagcaggagaaggaggccctgaagcaggaggtgatgagcctgcacaagcagctgcagaacgccggcggcaagagctgggcccccgagatcgccacccaccccagcggcctgcacaaccagcagaagagactgagctgggacaagctggaccacctgatgaacgaggagcagcagctgctgtggcaggagaacgagagactgcagaccatggtgcagaacaccaaggccgagctgacccacagcagagagaaggtgagacagctggagagcaacctgctgcccaagcaccagaagcacctgaaccccagcggcaccatgaaccccaccgagcaggagaagctgagcctgaagagagagtgcgaccagttccagaaggagcagagccccgccaacagaaaggtgagccagatgaacagcctggagcaggagctggagaccatccacctggagaacgagggcctgaagaagaagcaggtgaagctggacgagcagctgatggagatgcagcacctgagaagcaccgccacccccagccccagcccccacgcctgggacctgcagctgctgcagcagcaggcctgccccatggtgcccagagagcagttcctgcagctgcagagacagctgctgcaggccgagagaatcaaccagcacctgcaggaggagctggagaacagaaccagcgagaccaacaccccccagggcaaccaggagcagctggtgaccgtgatggaggagagaatgatcgaggtggagcagaagctgaagctggtgaagagactgctgcaggagaaggtgaaccagctgaaggagcagctgtgcaagaacaccaaggccgacgccatggtgaaggacctgtacgtggagaacgcccagctgctgaaggccctggaggtgaccgagcagagacagaagaccgccgagaagaagaactacctgctggaggagaagatcgccagcctgagcaacatcgtgagaaacctgacccccgcccccctgaccagcaccccccccctgagaagctag

SEQ ID NO: 9840 - DNA, 2664 bp, synthetic construct
  source 1..2664: mol_type = other DNA; note = Synthetic coding sequence
atgcccatcctgctgttcctgatcgacaccagcgccagcatgaaccagagaagccacctgggcaccacctacctggacaccgccaagggcgccgtggagaccttcatgaagctgagagccagagaccccgccagcagaggcgacagatacatgctggtgaccttcgaggagcccccctacgccatcaaggccggctggaaggagaaccacgccaccttcatgaacgagctgaagaacctgcaggccgagggcctgaccaccctgggccagagcctgagaaccgccttcgacctgctgaacctgaacagactggtgaccggcatcgacaactacggccagggcagaaaccccttcttcctggagcccgccatcatcatcaccatcaccgacggcagcaagctgaccaccaccagcggcgtgcaggacgagctgcacctgcccctgaacagccccctgcccggcagcgagctgaccaaggagcccttcagatgggaccagagactgttcgccctggtgctgagactgcccggcaccatgagcgtggagagcgagcagctgaccggcgtgcccctggacgacagcgccatcacccccatgtgcgaggtgaccggcggcagaagctacagcgtgtgcagccccagaatgctgaaccagtgcctggagagcctggtgcagaaggtgcagagcggcgtggtgatcaacttcgagaaggccggccccgaccccagccccgtggaggacggccagcccgacatcagcagacccttcggcagccagccctggcacagctgccacaagctgatctacgtgagacccaaccccaagaccggcgtgcccatcggccactggcccgtgcccgagagcttctggcccgaccagaacagccccaccctgccccccagaaccagccaccccgtggtgaagttcagctgcaccgactgcgagcccatggtgatcgacaagctgcccttcgacaagtacgagctggagcccagccccctgacccagttcatcctggagagaaagagcccccagacctgctggcaggtgtacgtgagcaacagcgccaagtacagcgagctgggccaccccttcggctacctgaaggccagcaccgccctgaactgcgtgaacctgttcgtgatgccctacaactaccccgtgctgctgcccctgctggacgacctgttcaaggtgcacaaggccaagcccaccctgaagtggagacagagcttcgagagctacctgaagaccatgcccccctactacctgggccccctgaagaaggccgtgagaatgatgggcgcccccaacctgatcgccgacagcatggagtacggcctgagctacagcgtgatcagctacctgaagaagctgagccagcaggccaagatcgagagcgacagagtgatcggcagcgtgggcaagaaggtggtgcaggagaccggcatcaaggtgagaagcagaagccacggcctgagcatggcctacagaaaggacttccagcagctgctgcagggcatcagcgaggacgtgccccacagactgctggacctgaacatgaaggagtacaccggcttccaggtggccctgctgaacaaggacctgaagccccagaccttcagaaacgcctacgacatccccagaagaaacctgctggaccacctgaccagaatgagaagcaacctgctgaagagcaccagaagattcctgaagggccaggacgaggaccaggtgcacagcgtgcccatcgcccagatgggcaactaccaggagtacctgaagcaggtgcccagccccctgagagagctggaccccgaccagcccagaagactgcacaccttcggcaaccccttcaagctggacaagaagggcatgatgatcgacgaggccgacgagttcgtggccggcccccagaacaagcacaagagacccggcgagcccaacatgcagggcatccccaagagaagaagatgcatgagccccctgctgagaggcagacagcagaaccccgtggtgaacaaccacatcggcggcaagggcccccccgcccccaccacccaggcccagcccgacctgatcaagcccctgcccctgcacaagatcagcgagaccaccaacgacagcatcatccacgacgtggtggagaaccacgtggccgaccagctgagcagcgacatcacccccaacgccatggacaccgagttcagcgccagcagccccgccagcctgctggagagacccaccaaccacatggaggccctgggccacgaccacctgggcaccaacgacctgaccgtgggcggcttcctggagaaccacgaggagcccagagacaaggagcagtgcgccgaggagaacatccccgccagcagcctgaacaagggcaagaagctgatgcactgcagaagccacgaggaggtgaacaccgagctgaaggcccagatcatgaaggagatcagaaagcccggcagaaagtacgagagaatcttcaccctgctgaagcacgtgcagggcagcctgcagaccagactgatcttcctgcagaacgtgatcaaggaggccagcagattcaagaagagaatgctgatcgagcagctggagaacttcctggacgagatccacagaagagccaaccagatcaaccacatcaacagcaactag

SEQ ID NO: 9841 - DNA, 1944 bp, synthetic construct
  source 1..1944: mol_type = other DNA; note = Synthetic coding sequence
atgagcgacgaggtgttcagcaccaccctggcctacaccaagagccccaaggtgaccaagagaaccaccttccaggacgagctgatcagagccatcaccgccagaagcgccagacagagaagcagcgagtacagcgacgacttcgacagcgacgagatcgtgagcctgggcgacttcagcgacaccagcgccgacgagaacagcgtgaacaagaagatgaacgacttccacatcagcgacgacgaggagaagaaccccagcaagctgctgttcctgaagaccaacaagagcaacggcaacatcaccaaggacgagcccgtgtgcgccatcaagaacgaggaggagatggcccccgacggctgcgaggacatcgtggtgaagagcttcagcgagagccagaacaaggacgaggagttcgagaaggacaagatcaagatgaagcccaagcccagaatcctgagcatcaagagcaccagcagcgccgagaacaacagcctggacaccgacgaccacttcaagcccagccccagacccagaagcatgctgaagaagaagagccacatggaggagaaggacggcctggaggacaaggagaccgccctgagcgaggagctggagctgcacagcgcccccagcagcctgcccacccccaacggcatccagctggaggccgagaagaaggccttcagcgagaacctggaccccgaggacagctgcctgaccagcctggccagcagcagcctgaagcagatcctgggcgacagcttcagccccggcagcgagggcaacgccagcggcaaggaccccaacgaggagatcaccgagaaccacaacagcctgaagagcgacgagaacaaggagaacagcttcagcgccgaccacgtgaccaccgccgtggagaagagcaaggagagccaggtgaccgccgacgacctggaggaggagaaggccaaggccgagctgatcatggacgacgacagaaccgtggaccccctgctgagcaagagccagagcatcctgatcagcaccagcgccaccgccagcagcaagaagaccatcgaggacagaaacatcaagaacaagaagagcaccaacaacagagccagcagcgccagcgccagactgatgaccagcgagttcctgaagaagagcagcagcaagagaagaacccccagcaccaccaccagcagccactacctgggcaccctgaaggtgctggaccagaagcccagccagaagcagagcatcgagcccgacagagccgacaacatcagagccgccgtgtaccaggagtggctggagaagaagaacgtgtacctgcacgagatgcacagaatcaagagaatcgagagcgagaacctgagaatccagaacgagcagaagaaggccgccaagagagaggaggccctggccagcttcgaggcctggaaggccatgaaggagaaggaggccaagaagatcgccgccaagaagagactggaggagaagaacaagaagaagaccgaggaggagaacgccgccagaaagggcgaggccctgcaggccttcgagaagtggaaggagaagaagatggagtacctgaaggagaagaacagaaaggagagagagtacgagagagccaagaagcagaaggaggaggagaccgtggccgagaagaagaaggacaacctgaccgccgtggagaagtggaacgagaagaaggaggccttcttcaagcagaaggagaaggagaagatcaacgagaagagaaaggaggagctgaagagagccgagaagaaggacaaggacaagcaggccatcaacgagtacgagaagtggctggagaacaaggagaagcaggagagaatcgagagaaagcagaagaagagacacagcttcctggagagcgaggccctgcccccctggagcccccccagcagaaccgtgttcgccaaggtgttctag

SEQ ID NO: 9842 - DNA, 1074 bp, synthetic construct
  source 1..1074: mol_type = other DNA; note = Synthetic coding sequence
atgcagaccttcctgaagggcaagagagtgggctactggctgagcgagaagaagatcaagaagctgaacttccaggccttcgccgagctgtgcagaaagagaggcatggaggtggtgcagctgaacctgagcagacccatcgaggagcagggccccctggacgtgatcatccacaagctgaccgacgtgatcctggaggccgaccagaacgacagccagagcctggagctggtgcacagattccaggagtacatcgacgcccaccccgagaccatcgtgctggaccccctgcccgccatcagaaccctgctggacagaagcaagagctacgagctgatcagaaagatcgaggcctacatggaggacgacagaatctgcagcccccccttcatggagctgaccagcctgtgcggcgacgacaccatgagactgctggagaagaacggcctgaccttccccttcatctgcaagaccagagtggcccacggcaccaacagccacgagatggccatcgtgttcaaccaggagggcctgaacgccatccagcccccctgcgtggtgcagaacttcatcaaccacaacgccgtgctgtacaaggtgttcgtggtgggcgagagctacaccgtggtgcagagacccagcctgaagaacttcagcgccggcaccagcgacagagagagcatcttcttcaacagccacaacgtgagcaagcccgagagcagcagcgtgctgaccgagctggacaagatcgagggcgtgttcgagagacccagcgacgaggtgatcagagagctgagcagagccctgagacaggccctgggcgtgagcctgttcggcatcgacatcatcatcaacaaccagaccggccagcacgccgtgatcgacatcaacgccttccccggctacgagggcgtgagcgagttcttcaccgacctgctgaaccacatcgccaccgtgctgcagggccagagcaccgccatggccgcccccagcggcgagttcagagccggcgacctgtgctgcgacctgggcaagagcttccaggtgttcggccccccccccccctgcctgtag

SEQ ID NO: 9843 - DNA, 852 bp, synthetic construct
  source 1..852: mol_type = other DNA; note = Synthetic coding sequence
atgctgagatgcggccagatgatcttcgcccaggccctggtgtgcagacacctgggcagagactggagatggacccagagaaagagacagcccgacagctacttcagcgtgctgaacgccttcatcgacagaaaggacagctactacagcatccaccagatcgcccagatgggcgtgggcgagggcaagagcatcggccagtggtacggccccaacaccgtggcccaggtgctgaagaagctggccgtgttcgacacctggagcagcctggccgtgcacatcgccatggacaacaccgtggtgatggaggagatcagaagactgtgcagaaccagcgtgccctgcgccggcgccaccgccttccccgccgacagcgacagacactgcaacggcttccccgccggcgccgaggtgaccaacagacccagcccctggagacccctggtgctgctgatccccctgagactgggcctgaccgacatcaacgaggcctacgtggagaccctgaagcactgcttcatgatgccccagagcctgggcgtgatcggcggcaagcccaacagcgcccactacttcatcggctacgtgggcgaggagctgatctacctggacccccacaccacccagcccgccgtggagcccaccgacggctgcttcatccccgacgagagcttccactgccagcaccccccctgcagaatgagcatcgccgagctggaccccagcatcgccgtggtgctgggcgtgggcaagcagggcagactggtgagaagcatcccctgggcccccagacccagcagctggtgcgccgccgtgctgggcgccgccgtggtgatgtgcggcaccccctag

SEQ ID NO: 9844 - DNA, 2160 bp, synthetic construct
  source 1..2160: mol_type = other DNA; note = Synthetic coding sequence
atgggcttcagcaacatggaggacgacggccccgaggaggaggagagagtggccgagccccaggccaacttcaacaccccccaggccctgagattcgaggagctgctggccaacctgctgaacgagcagcaccagatcgccaaggagctgttcgagcagctgaagatgaagaagcccagcgccaagcagcagaaggaggtggagaaggtgaagccccagtgcaaggaggtgcaccagaccctgatcctggaccccgcccagagaaagagactgcagcagcagatgcagcagcacgtgcagctgctgacccagatccacctgctggccacctgcaaccccaacctgaaccccgaggccagcagcaccagaatctgcctgaaggagctgggcaccttcgcccagagcagcatcgccctgcaccaccagtacaaccccaagttccagaccctgttccagccctgcaacctgatgggcgccatgcagctgatcgaggacttcagcacccacgtgagcatcgactgcagcccccacaagaccgtgaagaagaccgccaacgagttcccctgcctgcccaagcaggtggcctggatcctggccaccagcaaggtgttcatgtaccccgagctgctgcccgtgtgcagcctgaaggccaagaacccccaggacaagatcctgttcaccaaggccgaggacaacaagtacctgctgacctgcaagaccgccagacagctgaccgtgagaatcaagaacctgaacatgaacagagcccccgacaacatcatcaagttctacaagaagaccaagcagctgcccgtgctgggcaagtgctgcgaggagatccagccccaccagtggaagccccccatcgagagagaggagcacagactgcccttctggctgaaggccagcctgcccagcatccaggaggagctgagacacatggccgacggcgccagagaggtgggcaacatgaccggcaccaccgagatcaacagcgaccagggcctggagaaggacaacagcgagctgggcagcgagaccagataccccctgctgctgcccaagggcgtggtgctgaagctgaagcccgtggccgacagattccccaagaaggcctggagacagaagagaagcagcgtgctgaagcccctgctgatccagcccagccccagcctgcagcccagcttcaaccccggcaagacccccgcccagagcacccacagcgaggccccccccagcaagatggtgctgagaatcccccaccccatccagcccgccaccgtgctgcagaccgtgcccggcgtgccccccctgggcgtgagcggcggcgagagcttcgagagccccgccgccctgcccgccatgccccccgaggccagaaccagcttccccctgagcgagagccagaccctgctgagcagcgcccccgtgcccaaggtgatgatgcccagccccgccagcagcatgttcagaaagccctacgtgagaagaagacccagcaagagaagaggcgccagagccttcagatgcatcaagcccgcccccgtgatccaccccgccagcgtgatcttcaccgtgcccgccaccaccgtgaagatcgtgagcctgggcggcggctgcaacatgatccagcccgtgaacgccgccgtggcccagagcccccagaccatccccatcgccaccctgctggtgaaccccaccagcttcccctgccccctgaaccagcccctggtggccagcagcgtgagccccctgatcgtgagcggcaacagcgtgaacctgcccatccccagcacccccgaggacaaggcccacatgaacgtggacatcgcctgcgccgtggccgacggcgagaacgccttccagggcctggagcccaagctggagccccaggagctgagccccctgagcgccaccgtgttccccaaggtggagcacagccccggccccccccccgtggacaagcagtgccaggagggcctgagcgagaacagcgcctacagatggaccgtggtgaagaccgaggagggcagacaggccctggagcccctgccccagggcatccaggagagcctgaacaacagcagccccggcgacctggaggaggtggtgaagatggagcccgaggacgccaccgaggagatcagcggcttcctgtag

SEQ ID NO: 9845 - DNA, 1134 bp, synthetic construct
  source 1..1134: mol_type = other DNA; note = Synthetic coding sequence
atggaggccgccgccgtgaccgtgaccagaagcgccaccagaagaagaagaagacagctgcagggcctggccgcccccgaggccggcacccaggaggagcaggaggaccaggagcccagacccagaagaagaagacccggcagaagcatcaaggacgaggaggaggagaccgtgttcagagaggtggtgagcttcagccccgaccccctgcccgtgagatactacgacaaggacaccaccaagcccatcagcttctacctgagcagcctggaggagctgctggcctggaagcccagactggaggacggcttcaacgtggccctggagcccctggcctgcagacagccccccctgagcagccagagacccagaaccctgctgtgccacgacatgatgggcggctacctggacgacagattcatccagggcagcgtggtgcagaccccctacgccttctaccactggcagtgcatcgacgtgttcgtgtacttcagccaccacaccgtgaccatcccccccgtgggctggaccaacaccgcccacagacacggcgtgtgcgtgctgggcaccttcatcaccgagtggaacgagggcggcagactgtgcgaggccttcctggccggcgacgagagaagctaccaggccgtggccgacagactggtgcagatcacccagttcttcagattcgacggctggctgatcaacatcgagaacagcctgagcctggccgccgtgggcaacatgccccccttcctgagatacctgaccacccagctgcacagacaggtgcccggcggcctggtgctgtggtacgacagcgtggtgcagagcggccagctgaagtggcaggacgagctgaaccagcacaacagagtgttcttcgacagctgcgacggcttcttcaccaactacaactggagagaggagcacctggagagaatgctgggccaggccggcgagagaagagccgacgtgtacgtgggcgtggacgtgttcgccagaggcaacgtggtgggcggcagattcgacaccgacaagagcctggagctgatcagaaagcacggcttcagcgtggccctgttcgcccccggctgcagcgtgttccccggcgtgggcaacctgctgtgctgctag

SEQ ID NO: 9846 - DNA, 927 bp, synthetic construct
  source 1..927: mol_type = other DNA; note = Synthetic coding sequence
atgagaggcaagagaagaccccagaccagagccgccagaagactggccgcccaggagagcagcgaggccgaggacatgagcgtgcccagaggccccatcgcccagtgggccgacggcgccatcagccccaacggccacagaccccagctgagagccgccagcggcgaggacagcaccgaggaggccctggccgccgccgccgccccctgggagggcggccccgtgcccggcgtggacaccagccccttcgccaagagcctgggccacagcagaggcgaggccgacctgttcgacagcggcgacatcttcagcaccggcaccggcagccagagcgtggagagaaccaagcccaaggccaagatcgccgagaaccccgccaacccccccgtgggcggcaaggccaagagccccatgttccccgccctgggcgaggccagcagcgacgacgacctgttccagagcgccaagcccaagcccgccaagaagaccaaccccttccccctgctggaggacgaggacgacctgttcaccgaccagaaggtgaagaagaacgagaccaagagcagcagccagcaggacgtgatcctgaccacccaggacatcttcgaggacgacatcttcgccaccgaggccatcaagcccagccagaagaccagagagaaggagaagaccctggagagcaacctgttcgacgacaacatcgacatcttcgccgacctgaccgtgaagcccaaggagaagagcaagaagaaggtggaggccaagagcatcttcgacgacgacatggacgacatcttcagcaccggcatccaggccaagaccaccaagcccaagagcagaagcgcccaggccgcccccgagcccagattcgagcacaaggtgagcaacatcttcgacgaccccctgaacgccttcggcggccagtag

SEQ ID NO: 9847 - DNA, 933 bp, synthetic construct
  source 1..933: mol_type = other DNA; note = Synthetic coding sequence
atgctgaagaacaagggccacagcagcaagaaggacaacctggccgtgaacgccgtggccctgcaggaccacatcctgcacgacctgcagctgagaaacctgagcgtggccgaccacagcaagacccaggtgcagaagaaggagaacaagagcctgaagagagacaccaaggccatcatcgacaccggcctgaagaagaccacccagtgccccaagctggaggacagcgagaaggagtacgtgctggaccccaagcccccccccctgaccctggcccagaagctgggcctgatcggccccccccccccccccctgagcagcgacgagtgggagaaggtgaagcagagaagcctgctgcagggcgacagcgtgcagccctgccccatctgcaaggaggagttcgagctgagaccccaggtgctgctgagctgcagccacgtgttccacaaggcctgcctgcaggccttcgagaagttcaccaacaagaagacctgccccctgtgcagaaagaaccagtaccagaccagagtgatccacgacggcgccagactgttcagaatcaagtgcgtgaccagaatccaggcctactggagaggctgcgtggtgagaaagtggtacagaaacctgagaaagaccgtgccccccaccgacgccaagctgagaaagaagttcttcgagaagaagttcaccgagatcagccacagaatcctgtgcagctacaacaccaacatcgaggagctgttcgccgagatcgaccagtgcctggccatcaacagaagcgtgctgcagcagctggaggagaagtgcggccacgagatcaccgaggaggagtgggagaagatccaggtgcagaacgagaccagcgcctgcttcgaggacccctgcctgggcgcccacggcagccacttcagcctgagcaacttcctgctgtag

SEQ ID NO: 9848 - DNA, 1119 bp, synthetic construct
  source 1..1119: mol_type = other DNA; note = Synthetic coding sequence
atgagagtgggccccgtgagaagcgccatgagcggcgccagccagcccagaggccccgccctgctgttccccgccaccagaggcgtgcccgccaagagactgctggacgccgacgacgccgccgccgtggccgccaagtgccccagactgagcgagtgcagcagcccccccgactacctgagcccccccggcagcccctgcagcccccagcccccccccgccgcccccggcgccggcggcggcagcggcagcgcccccggccccagcagaatcgccgactacctgctgctgcccctggccgagagagagcacgtgagcagagccctgtgcatccacaccggcagagagctgagatgcaaggtgttccccatcaagcactaccaggacaagatcagaccctacatccagctgcccagccacagcaacatcaccggcatcgtggaggtgatcctgggcgagaccaaggcctacgtgttcttcgagaaggacttcggcgacatgcacagctacgtgagaagcagaaagagactgagagaggaggaggccgccagactgttcaagcagatcgtgagcgccgtggcccactgccaccagagcgccatcgtgctgggcgacctgaagctgagaaagttcgtgttcagcaccgaggagagaacccagctgagactggagagcctggaggacacccacatcatgaagggcgaggacgacgccctgagcgacaagcacggctgccccgcctacgtgagccccgagatcctgaacaccaccggcacctacagcggcaaggccgccgacgtgtggagcctgggcgtgatgctgtacaccctgctggtgggcagataccccttccacgacagcgaccccagcgccctgttcagcaagatcagaagaggccagttctgcatccccgagcacatcagccccaaggccagatgcctgatcagaagcctgctgagaagagagcccagcgagagactgaccgcccccgagatcctgctgcacccctggttcgagagcgtgctggagcccggctacatcgacagcgagatcggcaccagcgaccagatcgtgcccgagtaccaggaggacagcgacatcagcagcttcttctgctag

SEQ ID NO: 9849 - DNA, 1554 bp, synthetic construct
  source 1..1554: mol_type = other DNA; note = Synthetic coding sequence
atggagaccgacctgaacagccaggacagaaaggacctggacaagttcatcaagttcttcgccctgaagaccgtgcaggtgatcgtgcaggccagactgggcgagaagatctgcaccagaagcagcagcagccccaccggcagcgactggttcaacctggccatcaaggacatccccgaggtgacccacgaggccaagaaggccctggccggccagctgcccgccgtgggcagaagcatgtgcgtggagatcagcctgaagaccagcgagggcgacagcatggagctggagatctggtgcctggagatgaacgagaagtgcgacaaggagatcaaggtgagctacaccgtgtacaacagactgagcctgctgctgaagagcctgctggccatcaccagagtgacccccgcctacagactgagcagaaagcagggccacgagtacgtgatcctgtacagaatctacttcggcgaggtgcagctgagcggcctgggcgagggcttccagaccgtgagagtgggcaccgtgggcacccccgtgggcaccatcaccctgagctgcgcctacagaatcaacctggccttcatgagcaccagacagttcgagagaaccccccccatcatgggcatcatcatcgaccacttcgtggacagaccctaccccagcagcagccccatgcacccctgcaactacagaaccgccggcgaggacaccggcgtgatctaccccagcgtggaggacagccaggaggtgtgcaccaccagcttcagcaccagcccccccagccagctgagcagcagcagactgagctaccagcccgccgccctgggcgtgggcagcgccgacctggcctaccccgtggtgttcgccgccggcctgaacgccacccacccccaccagctgatggtgcccggcaaggagggcggcgtgcccctggcccccaaccagcccgtgcacggcacccaggccgaccaggagagactggccacctgcacccccagcgacagaacccactgcgccgccacccccagcagcagcgaggacaccgagaccgtgagcaacagcagcgagggcagagccagcccccacgacgtgctggagaccatcttcgtgagaaaggtgggcgccttcgtgaacaagcccatcaaccaggtgaccctgaccagcctggacatccccttcgccatgttcgcccccaagaacctggagctggaggacaccgaccccatggtgaacccccccgacagccccgagaccgagagccccctgcagggcagcctgcacagcgacggcagcagcggcggcagcagcggcaacacccacgacgacttcgtgatgatcgacttcaagcccgccttcagcaaggacgacatcctgcccatggacctgggcaccttctacagagagttccagaaccccccccagctgagcagcctgagcatcgacatcggcgcccagagcatggccgaggacctggacagcctgcccgagaagctggccgtgcacgagaagaacgtgagagagttcgacgccttcgtggagaccctgcagtag

SEQ ID NO: 9850 - DNA, 1488 bp, synthetic construct
  source 1..1488: mol_type = other DNA; note = Synthetic coding sequence
atgtggagaggctgcgccagaagcagaaagagaaagaaggtggacaacgactacaacgccctgagagagagactgagcaccctgcccgacaagctgagctacaacatcatggtgcccttcggccccttcgccttcatgcccggcaagctggtgcacaccaacgaggtgaccgtgctgctgggcgacaactggttcgccaagtgcagcgccaagcaggccgtgggcctggtggagcacagaaaggagcacgtgagaaagaccatcgacgacctgaagaaggtgatgaagaacttcgagagcagagtggagttcaccgaggacctgcagaagatgagcgacgccgccggcgacatcgtggacatcagagaggagatcaagtgcgacttcgagttcaaggccaagcacagaatcgcccacaagccccacagcaagcccaagaccagcgacatcttcgaggccgacatcgccaacgacgtgaagagcaaggacctgctggccgacaaggagctgtgggccagactggaggagctggagagacaggaggagctgctgggcgagctggacagcaagcccgacaccgtgatcgccaacggcgaggacaccaccagcagcgaggaggagaaggaggacagaaacaccaacgtgaacgccatgcaccaggtgaccgacagccacaccccctgccacaaggacgtggccagcagcgagcccttcagcggccaggtgaacagccagctgaactgcagcgtgaacggcagcagcagctaccacagcgacgacgacgacgacgacgacgacgacgacgacgacgacaacatcgacgacgacgacggcgacaacgaccacgaggccctgggcgtgggcgacaacagcatccccaccatctacttcagccacaccgtggagcccaagagagtgagaatcaacaccggcaagaacaccaccctgaagttcagcgagaagaaggaggaggccaagagaaagagaaagaacagcaccggcagcggccacagcgcccaggagctgcccaccatcagaacccccgccgacatctacagagccttcgtggacgtggtgaacggcgagtacgtgcccagaaagagcatcctgaagagcagaagcagagagaacagcgtgtgcagcgacaccagcgagagcagcgccgccgagttcgacgacagaagaggcgtgctgagaagcatcagctgcgaggaggccacctgcagcgacaccagcgagagcatcctggaggaggagccccaggagaaccagaagaagctgctgcccctgagcgtgacccccgaggccttcagcggcaccgtgatcgagaaggagttcgtgagccccagcctgacccccccccccgccatcgcccaccccgccctgcccaccatccccgagagaaaggaggtgctgctggaggccagcgaggagaccggcaagagagtgagcaagttcaaggccgccagactgcagcagaaggactag

SEQ ID NO: 9851 - DNA, 1458 bp, synthetic construct
  source 1..1458: mol_type = other DNA; note = Synthetic coding sequence
atgtgccaggtgggcgaggactacggcgagcccgcccccgaggagcccccccccgcccccagacccagcagagagcagaagtgcgtgaagtgcaaggaggcccagcccgtggtggtgatcagagccggcgacgccttctgcagagactgcttcaaggccttctacgtgcacaagttcagagccatgctgggcaagaacagactgatcttccccggcgagaaggtgctgctggcctggagcggcggccccagcagcagcagcatggtgtggcaggtgctggagggcctgagccaggacagcgccaagagactgagattcgtggccggcgtgatcttcgtggacgagggcgccgcctgcggccagagcctggaggagagaagcaagaccctggccgaggtgaagcccatcctgcaggccaccggcttcccctggcacgtggtggccctggaggaggtgttcagcctgccccccagcgtgctgtggtgcagcgcccaggagctggtgggcagcgagggcgcctacaaggccgccgtggacagcttcctgcagcagcagcacgtgctgggcgccggcggcggccccggccccacccagggcgaggagcagcccccccagccccccctggacccccagaacctggccagaccccccgcccccgcccagaccgaggccctgagccagctgttctgcagcgtgagaaccctgaccgccaaggaggagctgctgcagaccctgagaacccacctgatcctgcacatggccagagcccacggctacagcaaggtgatgaccggcgacagctgcaccagactggccatcaagctgatgaccaacctggccctgggcagaggcgccttcctggcctgggacaccggcttcagcgacgagagacacggcgacgtggtggtggtgagacccatgagagaccacaccctgaaggaggtggccttctacaacagactgttcagcgtgcccagcgtgttcacccccgccgtggacaccaaggcccccgagaaggccagcatccacagactgatggaggccttcatcctgagactgcagacccagttccccagcaccgtgagcaccgtgtacagaaccagcgagaagctggtgaagggccccagagacggccccgccgccggcgacagcggccccagatgcctgctgtgcatgtgcgccctggacgtggacgccgccgacagcgccaccgccttcggcgcccagaccagcagcagactgagccagatgcagagccccatccccctgaccgagaccagaaccccccccggcccctgctgcagccccggcgtgggctgggcccagagatgcggccagggcgcctgcagaagagaggacccccaggcctgcatcgaggagcagctgtgctacagctgcagagtgaacatgaaggacctgggcctgggcctggccggcgaccccggcctgagcgactag

SEQ ID NO: 9852 - DNA, 1353 bp, synthetic construct
  source 1..1353: mol_type = other DNA; note = Synthetic coding sequence
atgagcctgagactgagcagcgccagcagaagaagctgccccagacccaccaccggcagcctgagactgtacggcggcggcaccagcttcggcaccggcaacagctgcggcatcagcggcatcggcagcggcttcagcagcgccttcggcggcagcagcagcggcggcaacaccggcggcggcaacccctgcgccggcttcaccgtgaacgagagaggcctgctgagcggcaacgagaaggtgaccatgcagaacctgaacgacagactggccagctacctggacagcgtgcacgccctggaggaggccaacgccgacctggagcagaagatcaagggctggtacgagaagttcggccccggcagctgcagaggcctggaccacgactacagcagatacttccccatcatcgacgacctgaagaaccagatcatcgccagcaccaccagcaacgccaacgccgtgctgcagatcgacaacgccagactgaccgccgacgacttcagactgaagtacgagaacgagctggccctgcaccagagcgtggaggccgacgtgaacggcctgagaagagtgctggacgagatcaccctgtgcagaaccgacctggagatccagtacgagaccctgagcgaggagatgacctacctgaagaagaaccacaaggaggagatgcaggtgctgcagtgcgccgccggcggcaacgtgaacgtggagatgaacgccgcccccggcgtggacctgaccgtgctgctgaacaacatgagagccgagtacgaggccctggccgagcagaacagaagagacgccgaggcctggttcaacgagaagagcgccagcctgcagcagcagatcagcgaggacgtgggcgccaccaccagcgccagaaacgagctgaccgagatgaagagaaccctgcagaccctggagatcgagctgcagagcctgctggccaccaagcacagcctggagtgcagcctgaccgagaccgagagcaactactgcgcccagctggcccagatccaggcccagatcggcgccctggaggagcagctgcaccaggtgagaaccgagaccgagggccagaagctggagtacgagcagctgctggacatcaagctgcacctggagaaggagatcgagacctactgcctgctgatcggcggcgacgacggcgcctgcaagagcggcggctacaagagcaaggactacggcagcggcaacgtgggcagccaggtgaaggaccccgccaaggccatcgtggtgaagaaggtgctggaggaggtggaccagagaagcaagatcctgaccaccagactgcacagcctggaggagaagagccagagcaactag

SEQ ID NO: 9853 - DNA, 2679 bp, synthetic construct
  source 1..2679: mol_type = other DNA; note = Synthetic coding sequence
atggaccagcccgaggccccctgcagcagcaccggccccagactggccgtggccagagagctgctgctggccgccctggaggagctgagccaggagcagctgaagagattcagacacaagctgagagacgtgggccccgacggcagaagcatcccctggggcagactggagagagccgacgccgtggacctggccgagcagctggcccagttctacggccccgagcccgccctggaggtggccagaaagaccctgaagagagccgacgccagagacgtggccgcccagctgcaggagagaagactgcagagactgggcctgggcagcggcaccctgctgagcgtgagcgagtacaagaagaagtacagagagcacgtgctgcagctgcacgccagagtgaaggagagaaacgccagaagcgtgaagatcaccaagagattcaccaagctgctgatcgcccccgagagcgccgcccccgaggaggccatgggccccgccgaggagcccgagcccggcagagccagaagaagcgacacccacaccttcaacagactgttcagaagagacgaggagggcagaagacccctgaccgtggtgctgcagggccccgccggcatcggcaagaccatggccgccaagaagatcctgtacgactgggccgccggcaagctgtaccagggccaggtggacttcgccttcttcatgccctgcggcgagctgctggagagacccggcaccagaagcctggccgacctgatcctggaccagtgccccgacagaggcgcccccgtgccccagatgctggcccagccccagagactgctgttcatcctggacggcgccgacgagctgcccgccctgggcggccccgaggccgccccctgcaccgaccccttcgaggccgccagcggcgccagagtgctgggcggcctgctgagcaaggccctgctgcccaccgccctgctgctggtgaccaccagagccgccgcccccggcagactgcagggcagactgtgcagcccccagtgcgccgaggtgagaggcttcagcgacaaggacaagaagaagtacttctacaagtacttcagagacgagagaagagccgagagagcctacagattcgtgaaggagaacgagaccctgttcgccctgtgcttcgtgcccttcgtgtgctggatcgtgtgcaccgtgctgagacagcagctggagctgggcagagacctgagcagaaccagcaagaccaccaccagcgtgtacctgctgttcatcaccagcgtgctgagcagcgcccccgtggccgacggccccagactgcagggcgacctgagaaacctgtgcagactggccagagagggcgtgctgggcagaagagcccagttcgccgagaaggagctggagcagctggagctgagaggcagcaaggtgcagaccctgttcctgagcaagaaggagctgcccggcgtgctggagaccgaggtgacctaccagttcatcgaccagagcttccaggagttcctggccgccctgagctacctgctggaggacggcggcgtgcccagaaccgccgccggcggcgtgggcaccctgctgagaggcgacgcccagccccacagccacctggtgctgaccaccagattcctgttcggcctgctgagcgccgagagaatgagagacatcgagagacacttcggctgcatggtgagcgagagagtgaagcaggaggccctgagatgggtgcagggccagggccagggctgccccggcgtggcccccgaggtgaccgagggcgccaagggcctggaggacaccgaggagcccgaggaggaggaggagggcgaggagcccaactaccccctggagctgctgtactgcctgtacgagacccaggaggacgccttcgtgagacaggccctgtgcagattccccgagctggccctgcagagagtgagattctgcagaatggacgtggccgtgctgagctactgcgtgagatgctgccccgccggccaggccctgagactgatcagctgcagactggtggccgcccaggagaagaagaagaagagcctgggcaagagactgcaggccagcctgggcggcggcagcagcagccagggcaccaccaagcagctgcccgccagcctgctgcaccccctgttccaggccatgaccgaccccctgtgccacctgagcagcctgaccctgagccactgcaagctgcccgacgccgtgtgcagagacctgagcgaggccctgagagccgcccccgccctgaccgagctgggcctgctgcacaacagactgagcgaggccggcctgagaatgctgagcgagggcctggcctggccccagtgcagagtgcagaccgtgagagtgcagctgcccgacccccagagaggcctgcagtacctggtgggcatgctgagacagagccccgccctgaccaccctggacctgagcggctgccagctgcccgcccccatggtgacctacctgtgcgccgtgctgcagcaccagggctgcggcctgcagaccctgagcctggccagcgtggagctgagcgagcagagcctgcaggagctgcaggccgtgaagagagccaagcccgacctggtgatcacccaccccgccctggacggccacccccagccccccaaggagctgatcagcaccttctag

SEQ ID NO: 9854 - DNA, 1047 bp, synthetic construct
  source 1..1047: mol_type = other DNA; note = Synthetic coding sequence
atgggcaaggactactacaagatcctgggcatccccagcggcgccaacgaggacgagatcaagaaggcctacagaaagatggccctgaagtaccaccccgacaagaacaaggagcccaacgccgaggagaagttcaaggagatcgccgaggcctacgacgtgctgagcgaccccaagaagagaggcctgtacgaccagtacggcgaggagggcctgaagaccggcggcggcaccagcggcggcagcagcggcagcttccactacaccttccacggcgacccccacgccaccttcgccagcttcttcggcggcagcaaccccttcgacatcttcttcgccagcagcagaagcaccagacccttcagcggcttcgaccccgacgacatggacgtggacgaggacgaggaccccttcggcgccttcggcagattcggcttcaacggcctgagcagaggccccagaagagcccccgagcccctgtaccccagaagaaaggtgcaggacccccccgtggtgcacgagctgagagtgagcctggaggagatctaccacggcagcaccaagagaatgaagatcaccagaagaagactgaaccccgacggcagaaccgtgagaaccgaggacaagatcctgcacatcgtgatcaagagaggctggaaggagggcaccaagatcaccttccccaaggagggcgacgccacccccgacaacatccccgccgacatcgtgttcgtgctgaaggacaagccccacgcccacttcagaagagacggcaccaacgtgctgtacagcgccctgatcagcctgaaggaggccctgtgcggctgcaccgtgaacatccccaccatcgacggcagagtgatccccctgccctgcaacgacgtgatcaagcccggcaccgtgaagagactgagaggcgagggcctgcccttccccaaggtgcccacccagagaggcgacctgatcgtggagttcaaggtgagattccccgacagactgaccccccagaccagacagatcctgaagcagcacctgccctgcagctag

SEQ ID NO: 9855 - DNA, 1899 bp, synthetic construct
  source 1..1899: mol_type = other DNA; note = Synthetic coding sequence
atggacaccatgatgctgaacgtgagaaacctgttcgagcagctggtgagaagagtggagatcctgagcgagggcaacgaggtgcagttcatccagctggccaaggacttcgaggacttcagaaagaagtggcagagaaccgaccacgagctgggcaagtacaaggacctgctgatgaaggccgagaccgagagaagcgccctggacgtgaagctgaagcacgccagaaaccaggtggacgtggagatcaagagaagacagagagccgaggccgactgcgagaagctggagagacagatccagctgatcagagagatgctgatgtgcgacaccagcggcagcatccagctgagcgaggagcagaagagcgccctggccttcctgaacagaggccagcccagcagcagcaacgccggcaacaagagactgagcaccatcgacgagagcggcagcatcctgagcgacatcagcttcgacaagaccgacgagagcctggactgggacagcagcctggtgaagaccttcaagctgaagaagagagagaagagaagaagcaccagcagacagttcgtggacggcccccccggccccgtgaagaagaccagaagcatcggcagcgccgtggaccagggcaacgagagcatcgtggccaagaccaccgtgaccgtgcccaacgacggcggccccatcgaggccgtgagcaccatcgagaccgtgccctactggaccagaagcagaagaaagaccggcaccctgcagccctggaacagcgacagcaccctgaacagcagacagctggagcccagaaccgagaccgacagcgtgggcaccccccagagcaacggcggcatgagactgcacgacttcgtgagcaagaccgtgatcaagcccgagagctgcgtgccctgcggcaagagaatcaagttcggcaagctgagcctgaagtgcagagactgcagagtggtgagccaccccgagtgcagagacagatgccccctgccctgcatccccaccctgatcggcacccccgtgaagatcggcgagggcatgctggccgacttcgtgagccagaccagccccatgatccccagcatcgtggtgcactgcgtgaacgagatcgagcagagaggcctgaccgagaccggcctgtacagaatcagcggctgcgacagaaccgtgaaggagctgaaggagaagttcctgagagtgaagaccgtgcccctgctgagcaaggtggacgacatccacgccatctgcagcctgctgaaggacttcctgagaaacctgaaggagcccctgctgaccttcagactgaacagagccttcatggaggccgccgagatcaccgacgaggacaacagcatcgccgccatgtaccaggccgtgggcgagctgccccaggccaacagagacaccctggccttcctgatgatccacctgcagagagtggcccagagcccccacaccaagatggacgtggccaacctggccaaggtgttcggccccaccatcgtggcccacgccgtgcccaaccccgaccccgtgaccatgctgcaggacatcaagagacagcccaaggtggtggagagactgctgagcctgcccctggagtactggagccagttcatgatggtggagcaggagaacatcgaccccctgcacgtgatcgagaacagcaacgccttcagcaccccccagacccccgacatcaaggtgagcctgctgggccccgtgaccacccccgagcaccagctgctgaagacccccagcagcagcagcctgagccagagagtgagaagcaccctgaccaagaacacccccagattcggcagcaagagcaagagcgccaccaacctgggcagacagggcaacttcttcgccagccccatgctgaagtag

SEQ ID NO: 9856 - DNA, 12075 bp, synthetic construct
  source 1..12075: mol_type = other DNA; note = Synthetic coding sequence
atgagcagcgagcaggacaagagcgccagcaaggagaagagcaagaagcccgtgagattcctgccccagctgagcatggagaagctggccagcaaggagaagttcaaggcccccgccagagccctgccccagctgagcatggtgagcaccaagccccactggcagcaggccgcccccagcttccacctgagcgtgaagcaggacgacgagagccccgagcccttcagcgtgaagaacgagcagagccacgccgagtacatggagagattcggcaagaagggcaagctgccccaccaggtggacgacagctacgtgggccccagcaccagcaagagcaagggcaagagcccccacaaggagagagagaacttcagaagcaccctggtgaacgtgatcatgcagcaggacgccgacctggacagcgccgtgcccgacggcagcaccatccccaagcccaccgccagcgccatcgagaaggacatcctgagatactactactacatccaccacggcatcgacaccgaccacgtggcccccatggaggacagctggctggagcacgtgctggacctggtgccccagcacctgaaggtgttcaccgacagcatcgtgaccctgagcgacgagatgagagaggactacctgctgagcgtgagaaagagcatcgtggacttcgtgctgaaggaccccagagagaagggcgacgacaagaagaccgacgagctgcccgcccacagagccgagatggagatcctgcccaagccctggagaaagagcttcctggccgccagcagctacatcagagaccacctgaacgccatgaaccccaccatgctggccgtgctggacctgtggcacaccaacttcaagaagctgagactggtggacatcaaggagttccacaactgccaggacgccctggagctgagcagcttccagaacatcatcatgagacacatggacagcgccaaggagaccctgctgaagatgtggttccccgaggtgcagaacatctactaccagggcaacaagaagaagcagctgcccaccggcgacagcagcgccaagctggagagcttcttcaactgcgccgccgccctgatgaccctgcagctgcaggacctgaccctggtgagcatgcaggacttcaccgacctgatcgcccagccccccgacagcgtgagagccttcgagcaccccggcttcatcatgagactgatcctggacaacgacaccatcaagttcgagcccgagctgagcgactacatcgacatcttcctgaacgtgtacgacgtgatgatcaaggccgtgagcttcgtgcccagagtggagaccaagctgtacagcaagtgggagagcaagagcaagcccaccaccctgaagcccatcatcctgaacgagatcgtggacgcccacaaggagaagatcaaggaggtgatcatgaaggagagcgtggcccccaccgagcacctgagactgtacgacaagtacgacttcctgatcaccagaaaggccgagagagacgtggacaacttcctggccgagaaccacagctacgagaagatcatcgacgagatctgcaagtaccagaagctgatcgaggagatccagtacaccagcatcaagaccatcagactgggcatgttcgagatgcactgcgaggagctgatcagagccctggtgaagagagccgacatcatctgcggcaagctgctggccaagatgttcagagaccaccaggaggtgaacaccagactgtgcgacgagttcgagagaatcgccgagaaggccctgagcaccccccccaacaccgccgagctgatggagatgaaggcctacatccagaaggtggaggtgaccgacatgatcgagctggagcagagactggtggacagcaagaactgcctggccttcctgatcgagtacgtgaacttcagccccgccgacatgagactgaacaacagcgtgttccagtggtacggcagaatgggcgagatcttcgaggagcacagaaagatcatcaaggagaagatcgagcagtaccaggagggcctgaagctgagatgcgagagattcgtggaggagctggagagctacgccaagcagagcgaggagttctacagcttcggcgacctgcaggacgtgcagagatacctgaagaaggcccagatcctgaacggcaagctggacctggccgccgacaagatcgagcagttcaacgccgaggaggaggccttcggctggctgcccagcgtgtacccccagagaaagaagatccaggacggcctgaacccctacctgagactgtacgagaccgccgtggagttcagcagcaactacagagcctggaccgagggcccctaccacaaggtgaaccccgaccaggtggaggccgacatcggcaactactggagaggcctgtacaagctggagaagaccttccacgacagcccctacgccctggccatgaccaagaaggtgagaagcaaggtggaggacttcaagcagcacatccccctgatccaggtgatctgcaaccccggcctgagacccagacactgggaggccatgagcgccatcgtgggctaccccctgcagcccagcgacgacagcaccgtgagcagcttcctggacatgaacctggagccctacatcgacagattcgagggcatcagcgaggccgccagcaaggagtacagcctggagaaggccatggagaagatgatcaccgagtgggacgccgtggagttcgtgatccacagctacagagagaccggcaccttcatcctggccagcgtggacgagatccagatgctgctggacgaccacatcatcaagacccagaccatgagaggcagccccttcatcaagccctacgagaagcagatgagagagtgggagggcaagctgctgctgctgcaggagatcctggacgagtggctgaaggtgcaggccacctggctgtacctggagcccatcttcagcagccccgacatcatgagccagatgcccgaggagggcagaagattcaccgccgtggacaagacctggagagacatcatgagaagcgtgatgcaggacaagcacgtgctgaccgtggtgaccatcgacagaatgctggagagactgaagaagagcaacgagctgctggagctgatcctgaagggcctgaacgagtacctggagaagaagagactgttcttccccagattcttcttcctgagcaacgacgagctgctggagatcctgagcgagaccaaggaccccaccagagtgcagccccacctgaagaagtgcttcgagggcatcgccaaggtggagttcaccgagaccctggacatcacccacatgaagagcagcgagggcgaggtggtggagctgatcgagatcatcagcaccgccaaggccagaggccaggtggagaagtggctggtggagctggagagagtgatgatcaacagcatccacaaggtgaccggcgacgccaccttcgcctacaccaagtacgagagaatcaactgggtgagagactggcccggccagaccgtgctgtgcgtgagccagatcttctggaccaaggaggtgcagaccgccatccccatgggcatcaaggccctggagcagtacctgaagacctgcaacagacagatcgacgacatcgtgaccctggtgagaggcaagctgagcatgcagaacagagtgaccctgggcgccctggtggtgctggacgtgcacgccagagacgtgctgagcagcctggtgaagaagaacatcagcgacgacagcgacttcgagtggctgagccagctgagatactactggcaggagaaccacctggagaccaagatgatcaacgccggcctgagatacggctacgagtacctgggcaacagccccagactggtgatcacccccctgaccgacagatgctacagaaccctgttcggcgccctgcacctgcacctgggcggcgcccccgagggccccgccggcaccggcaagaccgagaccaccaaggacctggccaaggccgtggccaagcagtgcgtggtgttcaactgcagcgacggcctggactacctggccctgggcaagttcttcaagggcctgctgagctgcggcgcctgggcctgcttcgacgagttcaacagaatcgacctggaggtgctgagcgtggtggcccagcagatcctgaccatccagagaggcatcaacgccggcgccgacatcctgatgttcgagggcaccgagctgaagctggaccccacctgcgccgtgttcatcaccatgaaccccggctacgccggcagaagcgagctgcccgacaacctgaaggccctgttcagaaccgtggccatgatggtgcccgactacgccatgatcgccgagatcgtgctgtacagctgcggcttcgtgaccgccagacccctgagcgtgaagatcgtggccacctacagactgtgcagcgagcagctgagcagccagcaccactacgactacggcatgagagccgtgaagagcgtgctgaccgccgccggcaacctgaagctgaagtaccccaacgagaacgaggagatcctgctgctgagaagcatcatcgacgtgaacctgcccaagttcctgagccacgacctgcccctgttcgagggcatcaccagcgacctgttccccggcgtgaagctgcccaagcccgactacaacgacctgctggccgccatcaaggacaactgcgccagcatgaacctgcagatgaccgccttcttcagcgagaagatcctgcaggtgtacgagatgatgatcgtgagacacggcttcatgatcgtgggcgagcccttcggcggcaagaccagcgcctacagagtgctggccggcgccctgaacgacatctgcgagaagggcctgatggaggagaacaaggtgcagatcaccgtgctgaaccccaagagcgtgaccatgggccagctgtacggccagttcgacagcgtgagccacgagtggagcgacggcgtgctggccgtgagcttcagagccttcgccagcagcgtgacccccgacagaaagtggctgatcttcgacggccccgtggacgccgtgtggatcgagaacatgaacaccgtgctggacgacaacaagaagctgtgcctgatgagcggcgagatcatccagatgagcccccagatgaacctgatcttcgagcccatggacctggaggtggccagccccgccaccgtgagcagatgcggcatgatctacatggagccccacatgctgggctggagacccctgatgctgagctgggtgaacctgctgcccgccagcgtgagcgtgatccagaaggagttcatcatgggcctgttcgacagaatggtgcccgtgagcgtggagttcatcagaaagcacaccaaggagctgagccccaccagcgacaccaacctggtgagaagcctgatgaacctgatcgactgcttcatggacgacttcgccgacgaggtgaagctgaaggagagaaacgacagagagacctacagcctgctggagggcatcttcctgttcagcctgatctggagcgtgggcgccagctgcaccgacgacgacagactgaagttcaacaagatcctgagagagctgatggagagccccatcagcgacagaaccagaaacaccttcaagctgcagagcggcaccgagcagaccagcagcaaggccctgaccgtgcccttccccgagaagggcaccatctacgactaccagttcgtgaccgagggcatcggcaagtgggagccctggatcaagaagctgaaggaggccccccccatccccaaggacgtgatgttcaacgagatcatcgtgcccaccctggacaccatcagatacagcgccctgatggagctgctgaccacccaccagaagcccagcatcttcgtgggccccaccggcaccggcaagagcgtgtacatcaccaacttcctgctgaaccagctgaacaaggagatctacaagcccctgctgatcaacttcagcgcccagaccaccgccgcccagacccagaacatcgtgatgagcaagctggacaagagaagaaagggcgtgttcggcccccccctgggcaagagaatggtggtgttcgtggacgacgtgaacatgcccgccagagaggtgtacggcgcccagccccccatcgagctgctgagacagtggctggaccactggaactggtacgacctgaaggactgcagcatgatcaagctggtggacatccagatcatgtgcgccatgggcccccccggcggcggcagaaaccccgtgacccccagatacatgagacacttcaacatcatcaccatcaacgagttcagcgacaagagcatgtacaccatcttcagcagaatcctgacctggcacctggagatctgctacaagttccccgacgagttcctggacctgaccacccagatcgtgaacggcaccatgaccctgtacaaggaggccatgaagaacctgctgcccacccccgccaagagccactacctgttcaacctgagagacttcagcagagtgatccagggcgtgtgcctgagcagacccgagaccaccgagaccaccgaggtgatcaagagactgtgggtgcacgaggtgctgagagtgtactacgacagactgctggacaacaccgacagaagctggctgatcaactacatccaggagatcctgagaaactacatgtacgaggacttccacgagctgttccagagactggacttcgacaacgacggcatggtggaggccgacgacctgagaagcctgatgttctgcgacttccacgaccccaagagagaggacaccaactacagagagatcgccgacgtggacaacctgagaatgatcgtggagatccacctggaggagtacaacaacatcagcaagaagcccatgaacctggtgctgttcagattcgccatcgagcacatcagcagaatcagcagaatcctgaagcagcccagaagccacgccctgctggtgggcgtgggcggcagcggcagacagagcgtgaccagactggccgcccacatggccgactacagcgtgttccaggtggagatcagcaagggctacgacaccaccgagtggcacgaggacctgaaggtgatcctgagaaagtgcgccgagggcgagatgcagggcgtgttcctgttcaccgacacccagatcaaggaggagagcttcctggaggacgtgagcaacctgctgaacgccggcgagatccccaacctgttcgccctggacgagaagcaggagatctgcgacaagatgagacagctggacagacagagagacaagaccaagcagaccgacggcagccccatcgccctgttcaacatgttcatcgaccactgcagaagccagctgcacgtggtgctggccatgagccccatcggcgacgccttcagaaacagactgagaaagttccccgccctggtgaactgctgcaccatcgactggttccagagctggcccgaggacgccctgcaggccgtggccagcagattcctggaggagatcgagatgagcgaggagatcagagacggctgcatcgacatgtgcaagagcttccacaccagcaccatcgacctgagcaagagcttcttcgtggagctgcagagatacaactacgtgacccccaccagctacctggagctgatcagcaccttcaagctgctgctggagaagaagagaagcgaggtgatgaagatgaagaagagatacgaggtgggcctggagaagctggacagcgccagcagccaggtggccaccatgcagatggagctggaggccctgcacccccagctgaaggtggccagcaaggaggtggacgagatgatgatcatgatcgagaaggagagcgtggaggtggccaagaccgagaagatcgtgaaggccgacgagaccatcgccaacgagcaggccatggccagcaaggccatcaaggacgagtgcgacgccgacctggccggcgccctgcccatcctggagagcgccctggccgccctggacaccctgaccgcccaggacatcaccgtggtgaagagcatgaagagcccccccgccggcgtgaagctggtgatggaggccatctgcatcctgaagggcatcaaggccgacaagatccccgaccccaccggcagcggcaagaagatcgaggacttctggggccccgccaagagactgctgggcgacatgagattcctgcagagcctgcacgagtacgacaaggacaacatcccccccgcctacatgaacatcatcagaaagaactacatccccaaccccgacttcgtgcccgagaagatcagaaacgccagcaccgccgccgagggcctgtgcaagtgggtgatcgccatggacagctacgacaaggtggccaagatcgtggcccccaagaagatcaagctggccgccgccgagggcgagctgaagatcgccatggacggcctgagaaagaagcaggccgccctgaaggaggtgcaggacaagctggccagactgcaggacaccctggagctgaacaagcagaagaaggccgacctggagaaccaggtggacctgtgcagcaagaagctggagagagccgagcagctgatcggcggcctgggcggcgagaagaccagatggagccacaccgccctggagctgggccagctgtacatcaacctgaccggcgacatcctgatcagcagcggcgtggtggcctacctgggcgccttcaccagcacctacagacagaaccagaccaaggagtggaccaccctgtgcaagggcagagacatcccctgcagcgacgactgcagcctgatgggcaccctgggcgaggccgtgaccatcagaacctggaacatcgccggcctgcccagcgacagcttcagcatcgacaacggcatcatcatcatgaacgccagaagatggcccctgatgatcgacccccagagccaggccaacaagtggatcaagaacatggagaaggccaacagcctgtacgtgatcaagctgagcgagcccgactacgtgagaaccctggagaactgcatccagttcggcacccccgtgctgctggagaacgtgggcgaggagctggaccccatcctggagcccctgctgctgaagcagaccttcaagcagggcggcagcacctgcatcagactgggcgacagcaccatcgagtacgcccccgacttcagattctacatcaccaccaagctgagaaacccccactacctgcccgagaccagcgtgaaggtgaccctgctgaacttcatgatcacccccgagggcatgcaggaccagctgctgggcatcgtggtggcccaggagagacccgacctggaggaggagaagcaggccctgatcctgcagggcgccgagaacaagagacagctgaaggagatcgaggacaagatcctggaggtgctgagcagcagcgagggcaacatcctggaggacgagaccgccatcaagatcctgagcagcagcaaggccctggccaacgagatcagccagaagcaggaggtggccgaggagaccgagaagaagatcgacaccaccagaatgggctacagacccatcgccatccacagcagcatcctgttcttcagcctggccgacctggccaacatcgagcccatgtaccagtacagcctgacctggttcatcaacctgttcatcctgagcatcgagaacagcgagaagagcgagatcctggccaagagactgcagatcctgaaggaccacttcacctacagcctgtacgtgaacgtgtgcagaagcctgttcgagaaggacaagctgctgttcagcttctgcctgaccatcaacctgctgctgcacgagagagccatcaacaaggccgagtggagattcctgctgaccggcggcatcggcctggacaacccctacgccaacctgtgcacctggctgccccagaagagctgggacgagatctgcagactggacgacctgcccgccttcaagaccatcagaagagagttcatgagactgaaggacggctggaagaaggtgtacgacagcctggagccccaccacgaggtgttccccgaggagtgggaggacaaggccaacgagttccagagaatgctgatcatcagatgcctgagacccgacaaggtgatccccatgctgcaggagttcatcatcaacagactgggcagagccttcatcgagcccccccccttcgacctggccaaggccttcggcgacagcaactgctgcgcccccctgatcttcgtgctgagccccggcgccgaccccatggccgccctgctgaagttcgccgacgaccagggctacggcggcagcaagctgagcagcctgagcctgggccagggccagggccccatcgccatgaagatgctggagaaggccgtgaaggagggcacctgggtggtgctgcagaactgccacctggccaccagctggatgcccaccctggagaaggtgtgcgaggagctgagccccgagagcacccaccccgacttcagaatgtggctgaccagctaccccagccccaacttccccgtgagcgtgctgcagaacggcgtgaagatgaccaacgaggcccccaagggcctgagagccaacatcatcagaagctacctgatggaccccatcagcgaccccgagttcttcggcagctgcaagaagcccgaggagttcaagaagctgctgtacggcctgtgcttcttccacgccctggtgcaggagagaagaaagttcggccccctgggctggaacatcccctacgagttcaacgagaccgacctgagaatcagcgtgcagcagctgcacatgttcctgaaccagtacgaggagctgccctacgaggccctgagatacatgaccggcgagtgcaactacggcggcagagtgaccgacgactgggacagaagaaccctgagaagcatcctgaacaagttcttcaaccccgagctggtggagaacagcgactacaagttcgacagcagcggcatctacttcgtgccccccagcggcgaccacaagagctacatcgagtacaccaagaccctgcccctgacccccgcccccgagatcttcggcatgaacgccaacgccgacatcaccaaggaccagagcgagacccagctgctgttcgacaacatcctgctgacccagagcagaagcgccggcgccggcgccaagagcagcgacgaggtggtgaacgaggtggccagcgacatcctgggcaagctgcccaacaacttcgacatcgaggccgccatgagaagataccccaccacctacacccagagcatgaacaccgtgctggtgcaggagatgggcagattcaacaagctgctgaagaccatcagagacagctgcgtgaacatccagaaggccatcaagggcctggccgtgatgagcaccgacctggaggaggtggtgagcagcatcctgaacgtgaagatccccgagatgtggatgggcaagagctaccccagcctgaagcccctgggcagctacgtgaacgacttcctggccagactgaagttcctgcagcagtggtacgaggtgggccccccccccgtgttctggctgagcggcttcttcttcacccaggccttcctgaccggcgcccagcagaactacgccagaaagtacaccatccccatcgacctgctgggcttcgactacgaggtgatggaggacaaggagtacaagcacccccccgaggacggcgtgttcatccacggcctgttcctggacggcgccagctggaacagaaagatcaagaagctggccgagagccaccccaagatcctgtacgacaccgtgcccgtgatgtggctgaagccctgcaagagagccgacatccccaagagacccagctacgtggcccccctgtacaagaccagcgagagaagaggcgtgctgagcaccaccggccacagcaccaacttcgtgatcgccatgaccctgcccagcgaccagcccaaggagcactggatcggcagaggcgtggccctgctgtgccagctgaacagctag

SEQ ID NO: 9857 - DNA, 1506 bp, synthetic construct
  source 1..1506: mol_type = other DNA; note = Synthetic coding sequence
atgagcagcagacaggacaagagcgccagcaaggagaagagcaagaagcccgtgagattcctgccccagctgagcatggagaagctggccagcaaggagaagttcaaggcccccgccagagccctgccccagctgagcatggtgagcaccaagccccactggcagcaggccgcccccagcttccacctgagcgtgaagcaggacgacgagagccccgagcccttcagcgtgaagaacgagcagagccacgccgagtacatggagagattcggcaagaagggcaagctgccccaccaggtggacgacagctacgtgggccccagcaccagcaagagcaagggcaagagcccccacaaggagagagagaacttcagaagcaccctggtgaacgtgatcatgcagcaggacgccgacctggacagcgccgtgcccgacggcagcaccatccccaagcccaccgccagcgccatcgagaaggacatcctgagatactactactacatccaccacggcatcgacaccgaccacgtggcccccatggaggacagctggctggagcacgtgctggacctggtgccccagcacctgaaggtgttcaccgacagcatcgtgaccctgagcgacgagatgagagaggactacctgctgagcgtgagaaagagcatcgtggacttcgtgctgaaggaccccagagagaagggcgacgacaagaagaccgacgagctgcccgcccacagagccgagatggagatcctgcccaagccctggagaaagagcttcctggccgccagcagctacatcagagaccacctgaacgccatgaaccccaccatgctggccgtgctggacctgtggcacaccaacttcaagaagctgagactggtggacatcaaggagttccacaactgccaggacgccctggagctgagcagcttccagaacatcatcatgagacacatggacagcgccaaggagaccctgctgaagatgtggttccccgaggtgcagaacatctactaccagggcaacaagaagaagcagctgcccaccggcgacagcagcgccaagctggagagcttcttcaactgcgccgccgccctgatgaccctgcagctgcaggacctgaccctggtgagcatgcaggacttcaccgacctgatcgcccagccccccgacagcgtgagagccttcgagcaccccggcttcatcatgagactgatcctggacaacgacaccatcaagttcgagcccgagctgagcgactacatcgacatcttcctgaacgtgtacgacgtgatgatcaaggccgtgagcttcgtgcccagagtggagaccaagctgtacagcaagtggagaaacaaggccaagcccggccacttctacttcagccacatccagagaagcgtgaccttccagcacagcgaggtgagcagcccccagaacagccacttcaagatcgtgagccccttcagcgtgctgggcttcacctggagatgccagctgtag

SEQ ID NO: 9858 - DNA, 840 bp, synthetic construct
  source 1..840: mol_type = other DNA; note = Synthetic coding sequence
atggccgcccccgtgagaagaaccctgctgggcgtggccggcggctggagaagattcgagagactgtgggccggcagcctgagcagcagaagcctggccctggccgccgcccccagcagcaacggcagcccctggagactgctgggcgccctgtgcctgcagagaccccccgtggtgagcaagcccctgacccccctgcaggaggagatggccagcctgctgcagcagatcgagatcgagagaagcctgtacagcgaccacgagctgagagccctggacgagaaccagagactggccaagaagaaggccgacctgcacgacgaggaggacgagcaggacatcctgctggcccaggacctggaggacatgtgggagcagaagttcctgcagttcaagctgggcgccagaatcaccgaggccgacgagaagaacgacagaaccagcctgaacagaaagctggacagaaacctggtgctgctggtgagagagaagttcggcgaccaggacgtgtggatcctgccccaggccgagtggcagcccggcgagaccctgagaggcaccgccgagagaaccctggccaccctgagcgagaacaacatggaggccaagttcctgggcaacgccccctgcggccactacaccttcaagttcccccaggccatgagaaccgagagcaacctgggcgccaaggtgttcttcttcaaggccctgctgctgaccggcgacttcagccaggccggcaacaagggccaccacgtgtgggtgaccaaggacgagctgggcgactacctgaagcccaagtacctggcccaggtgagaagattcgtgagcgacctgtag

SEQ ID NO: 9859 - DNA, 609 bp, synthetic construct
  source 1..609: mol_type = other DNA; note = Synthetic coding sequence
atggaggccgaggccggcggcctggaggagctgaccgacgaggagatggccgccctgggcaaggaggagctggtgagaagactgagaagagaggaggccgccagactggccgccctggtgcagagaggcagactgatgcaggaggtgaacagacagctgcagggccacctgggcgagatcagagagctgaagcagctgaacagaagactgcaggccgagaacagagagctgagagacctgtgctgcttcctggacagcgagagacagagaggcagaagagccgccagacagtggcagctgttcggcacccaggccagcagagccgtgagagaggacctgggcggctgctggcagaagctggccgagctggagggcagacaggaggagctgctgagagagaacctggccctgaaggagctgtgcctggccctgggcgaggagtggggccccagaggcggccccagcggcgccggcggcagcggcgccggccccgcccccgagctggccctgcccccctgcggccccagagacctgggcgacggcagcagcagcaccggcagcgtgggcagccccgaccagctgcccctggcctgcagccccgacgactag

SEQ ID NO: 9860 - DNA, 1353 bp, synthetic construct
  source 1..1353: mol_type = other DNA; note = Synthetic coding sequence
atgagagagtgcatcagcatccacgtgggccaggccggcgtgcagatcggcaacgcctgctgggagctgtactgcctggagcacggcatccagcccgacggccagatgcccagcgacaagaccatcggcggcggcgacgacagcttcaacaccttcttcagcgagaccggcgccggcaagcacgtgcccagagccgtgttcgtggacctggagcccaccgtggtggacgaggtgagaaccggcacctacagacagctgttccaccccgagcagctgatcaccggcaaggaggacgccgccagcaactacgccagaggccactacaccatcggcaaggagatcgtggacctggtgctggacagaatcagaaagctggccgacctgtgcaccggcctgcagggcttcctgatcttccacagcttcggcggcggcaccggcagcggcttcgccagcctgctgatggagagactgagcgtggactacagcaagaagagcaagctggagttcgccatctaccccgccccccaggtgagcaccgccgtggtggagccctacaacagcatcctgaccacccacaccaccctggagcacagcgactgcgccttcatggtggacaacgaggccatctacgacatctgcagaagaaacctggacatcgagagacccacctacaccaacctgaacagactgatcggccagatcgtgagcagcatcaccgccagcctgagattcgacggcgccctgaacgtggacctgaccgagttccagaccaacctggtgccctaccccagaatccacttccccctggccacctacgcccccgtgatcagcgccgagaaggcctaccacgagcagctgagcgtggccgagatcaccaacgcctgcttcgagcccgccaaccagatggtgaagtgcgaccccagacacggcaagtacatggcctgctgcatgctgtacagaggcgacgtggtgcccaaggacgtgaacgccgccatcgccaccatcaagaccaagagaaccatccagttcgtggactggtgccccaccggcttcaaggtgggcatcaactaccagccccccaccgtggtgcccggcggcgacctggccaaggtgcagagagccgtgtgcatgctgagcaacaccaccgccatcgccgaggcctgggccagactggtgcacaagttcgacctgatgtacgccaagtgggccttcgtgcactggtacgtgggcgagggcatggaggagggcgagttcagcgaggccagagaggacctggccgccctggagaaggactgcgaggaggtgggcgtggacagcgtggaggccgaggccgaggagggcgaggcctactag

SEQ ID NO: 9861 - DNA, 3078 bp, synthetic construct
  source 1..3078: mol_type = other DNA; note = Synthetic coding sequence
atggtggccatggccgaggccgaggccggcgtggccgtggaggtgagaggcctgccccccgccgtgcccgacgagctgctgaccctgtacttcgagaacagaagaagaagcggcggcggccccgtgctgagctggcagagactgggctgcggcggcgtgctgaccttcagagagcccgccgacgccgagagagtgctggcccaggccgaccacgagctgcacggcgcccagctgagcctgagacccgccccccccagagcccccgccagactgctgctgcagggcctgccccccggcaccaccccccagagactggagcagcacgtgcaggccctgctgagagccagcggcctgcccgtgcagccctgctgcgccctggccagccccagacccgacagagccctggtgcagctgcccaagcccctgagcgaggccgacgtgagagtgctggaggagcaggcccagaacctgggcctggagggcaccctggtgagcctggccagagtgccccaggccagagccgtgagagtggtgggcgacggcgccagcgtggacctgctgctgctggagctgtacctggagaacgagagaagaagcggcggcggccccctggaggacctgcagagactgcccggccccctgggcaccgtggccagcttccagcagtggcaggtggccgagagagtgctgcagcaggagcacagactgcagggcagcgagctgagcctggtgccccactacgacatcctggagcccgaggagctggccgagaacaccagcggcggcgaccaccccagcacccagggccccagagccaccaagcacgccctgctgagaaccggcggcctggtgaccgccctgcagggcgccggcaccgtgaccatgggcagcggcgaggagcccggccagagcggcgccagcctgagaaccggccccatggtgcagggcagaggcatcatgaccaccggcagcggccaggagcccggccagagcggcaccagcctgagaaccggccccatgggcagcctgggccaggccgagcaggtgagcagcatgcccatgggcagcctggagcacgagggcctggtgagcctgagacccgtgggcctgcaggagcaggagggccccatgagcctgggccccgtgggcagcgccggccccgtggagaccagcaagggcctgctgggccaggagggcctggtggagatcgccatggacagccccgagcaggagggcctggtgggccccatggagatcaccatgggcagcctggagaaggccggccccgtgagccccggctgcgtgaagctggccggccaggagggcctggtggagatggtgctgctgatggagcccggcgccatgagattcctgcagctgtaccacgaggacctgctggccggcctgggcgacgtggccctgctgcccctggagggccccgacatgaccggcttcagactgtgcggcgcccaggccagctgccaggccgccgaggagttcctgagaagcctgctgggcagcatcagctgccacgtgctgtgcctggagcaccccggcagcgccagattcctgctgggccccgagggccagcacctgctgcagggcctggaggcccagttccagtgcgtgttcggcaccgagagactggccaccgccaccctggacaccggcctggaggaggtggaccccaccgaggccctgcccgtgctgcccggcaacgcccacaccctgtggacccccgacagcaccggcggcgaccaggaggacgtgagcctggaggaggtgagagagctgctggccaccctggagggcctggacctggacggcgaggactggctgcccagagagctggaggaggagggcccccaggagcagcccgaggaggaggtgacccccggccacgaggaggaggagcccgtggcccccagcaccgtggcccccagatggctggaggaggaggccgccctgcagctggccctgcacagaagcctggagccccagggccaggtggccgagcaggaggaggccgccgccctgagacaggccctgaccctgagcctgctggagcagccccccctggaggccgaggagccccccgacggcggcaccgacggcaaggcccagctggtggtgcacagcgccttcgagcaggacgtggaggagctggacagagccctgagagccgccctggaggtgcacgtgcaggaggagaccgtgggcccctggagaagaaccctgcccgccgagctgagagccagactggagagatgccacggcgtgagcgtggccctgagaggcgactgcaccatcctgagaggcttcggcgcccaccccgccagagccgccagacacctggtggccctgctggccggcccctgggaccagagcctggccttccccctggccgccagcggccccaccctggccggccagaccctgaagggcccctggaacaacctggagagactggccgagaacaccggcgagttccaggaggtggtgagagccttctacgacaccctggacgccgccagaagcagcatcagagtggtgagagtggagagagtgagccaccccctgctgcagcagcagtacgagctgtacagagagagactgctgcagagatgcgagagaagacccgtggagcaggtgctgtaccacggcaccaccgcccccgccgtgcccgacatctgcgcccacggcttcaacagaagcttctgcggcagaaacgccaccgtgtacggcaagggcgtgtacttcgccagaagagccagcctgagcgtgcaggacagatacagcccccccaacgccgacggccacaaggccgtgttcgtggccagagtgctgaccggcgactacggccagggcagaagaggcctgagagccccccccctgagaggccccggccacgtgctgctgagatacgacagcgccgtggactgcatctgccagcccagcatcttcgtgatcttccacgacacccaggccctgcccacccacctgatcacctgcgagcacgtgcccagagccagccccgacgaccccagcggcctgcccggcagaagccccgacacctag

SEQ ID NO: 9862 - DNA, 390 bp, synthetic construct
  source 1..390: mol_type = other DNA; note = Synthetic coding sequence
atgagccacctgcagagcctgctgctggacaccctgctgggcaccaagcacgtggacagcgccgccctgatcaagatccaggagagaagcctgtgcgtggccagccccggcttcaacgtgacccccagcgacgtgagaaccctggtgaacggcttcgccaagaaccccctgcaggccagaagagagggcctgtacttcaagggcaaggactacagatgcgtgagagccgacgagtacagcctgtacgccaagaacgagaacaccggcgtggtggtggtgaagacccacctgtacctgctggtggccacctacaccgagggcatgtaccccagcatctgcgtggaggccaccgagagcctgggcgactacctgagaaagaagggcagctag

SEQ ID NO: 9863 - DNA, 945 bp, synthetic construct
  source 1..945: mol_type = other DNA; note = Synthetic coding sequence
atgctgggcaagggcggcaagagaaagttcgacgagcacgaggacggcctggagggcaagatcgtgagcccctgcgacggccccagcaaggtgagctacaccctgcagagacagaccatcttcaacatcagcctgatgaagctgtacaaccacagacccctgaccgagcccagcctgcagaagaccgtgctgatcaacaacatgctgagaagaatccaggaggagctgaagcaggagggcagcctgagacccatgttcacccccagcagccagcccaccaccgagcccagcgacagctacagagaggccccccccgccttcagccacctggccagccccagcagccacccctgcgacctgggcagcaccacccccctggaggcctgcctgacccccgccagcctgctggaggacgacgacgacaccttctgcaccagccaggccatgcagcccaccgcccccaccaagctgagcccccccgccctgctgcccgagaaggacagcttcagcagcgccctggacgagatcgaggagctgtgccccaccagcaccagcaccgaggccgccaccgccgccaccgacagcgtgaagggcaccagcagcgaggccggcacccagaagctggacggcccccaggagagcagagccgacgacagcaagctgatggacagcctgcccggcaacttcgagatcaccaccagcaccggcttcctgaccgacctgaccctggacgacatcctgttcgccgacatcgacaccagcatgtacgacttcgacccctgcaccagcagcagcggcaccgccagcaagatggcccccgtgagcgccgacgacctgctgaagaccctggccccctacagcagccagcccgtgacccccagccagcccttcaagatggacctgaccgagctggaccacatcatggaggtgctggtgggcagctag

SEQ ID NO: 9864 - DNA, 246 bp, synthetic construct
  source 1..246: mol_type = other DNA; note = Synthetic coding sequence
atgaagggcagcagaatcgagctgggcgacgtgaccccccacaacatcaagcagctgaagagactgaaccaggtgatcttccccgtgagctacaacgacaagttctacaagaagttcggcttcgagatcatcgagaccaagaagaactactacaagagaatcgagcccgccgacgcccacgtgctgcagaagaacctgaaggtgcccagcggccagaacgccgacgtgcagaagaccgacaactag

SEQ ID NO: 9865 - DNA, 1437 bp, synthetic construct
  source 1..1437: mol_type = other DNA; note = Synthetic coding sequence
atggccagcgccaccgaggaccccgtgctggagagatacttcaagggccacaaggccgccatcaccagcctggacctgagccccaacggcaagcagctggccaccgccagctgggacaccttcctgatgctgtggaacttcaagccccacgccagagcctacagatacgtgggccacaaggacgtggtgaccagcgtgcagttcagcccccacggcaacctgctggccagcgccagcagagacagaaccgtgagactgtggatccccgacaagagaggcaagttcagcgagttcaaggcccacaccgcccccgtgagaagcgtggacttcagcgccgacggccagttcctggccaccgccagcgaggacaagagcatcaaggtgtggagcatgtacagacagagattcctgtacagcctgtacagacacacccactgggtgagatgcgccaagttcagccccgacggcagactgatcgtgagctgcagcgaggacaagaccatcaagatctgggacaccaccaacaagcagtgcgtgaacaacttcagcgacagcgtgggcttcgccaacttcgtggacttcaaccccagcggcacctgcatcgccagcgccggcagcgaccagaccgtgaaggtgtgggacgtgagagtgaacaagctgctgcagcactaccaggtgcacagcggcggcgtgaactgcatcagcttccaccccagcggcaactacctgatcaccgccagcagcgacggcaccctgaagatcctggacctgctggagggcagactgatctacaccctgcagggccacaccggccccgtgttcaccgtgagcttcagcaagggcggcgagctgttcgccagcggcggcgccgacacccaggtgctgctgtggagaaccaacttcgacgagctgcactgcaagggcctgaccaagagaaacctgaagagactgcacttcgacagccccccccacctgctggacatctaccccagaaccccccacccccacgaggagaaggtggagaccgtggagatcaaccccaagctggaggtgatcgacctgcagatcagcaccccccccgtgatggacatcctgagcttcgacagcaccaccaccaccgagaccagcggcagaaccctgcccgacaagggcgaggaggcctgcggctacttcctgaaccccagcctgatgagccccgagtgcctgcccaccaccaccaagaagaagaccgaggacatgagcgacctgccctgcgagagccagagaagcatccccctggccgtgaccgacgccctggagcacatcatggagcagctgaacgtgctgacccagaccgtgagcatcctggagcagagactgaccctgaccgaggacaagctgaaggactgcctggagaaccagcagaagctgttcagcgccgtgcagcagaagagctag

SEQ ID NO: 9866 - DNA, 1263 bp, synthetic construct
  source 1..1263: mol_type = other DNA; note = Synthetic coding sequence
atgctgaaggccgtgatcctgatcggcggcccccagaagggcaccagattcagacccctgagcttcgaggtgcccaagcccctgttccccgtggccggcgtgcccatgatccagcaccacatcgaggcctgcgcccaggtgcccggcatgcaggagatcctgctgatcggcttctaccagcccgacgagcccctgacccagttcctggaggccgcccagcaggagttcaacctgcccgtgagatacctgcaggagttcgcccccctgggcaccggcggcggcctgtaccacttcagagaccagatcctggccggcagccccgaggccttcttcgtgctgaacgccgacgtgtgcagcgacttccccctgagcgccatgctggaggcccacagaagacagagacaccccttcctgctgctgggcaccaccgccaacagaacccagagcctgaactacggctgcatcgtggagaacccccagacccacgaggtgctgcactacgtggagaagcccagcaccttcatcagcgacatcatcaactgcggcatctacctgttcagccccgaggccctgaagcccctgagagacgtgttccagagaaaccagcaggacggccagctggaggacagccccggcctgtggcccggcgccggcaccatcagactggagcaggacgtgttcagcgccctggccggccagggccagatctacgtgcacctgaccgacggcatctggagccagatcaagagcgccggcagcgccctgtacgccagcagactgtacctgagcagataccaggacacccaccccgagagactggccaagcacacccccggcggcccctggatcagaggcaacgtgtacatccaccccaccgccaaggtggcccccagcgccgtgctgggccccaacgtgagcatcggcaagggcgtgaccgtgggcgagggcgtgagactgagagagagcatcgtgctgcacggcgccaccctgcaggagcacacctgcgtgctgcacagcatcgtgggctggggcagcaccgtgggcagatgggccagagtggagggcacccccagcgaccccaaccccaacgaccccagagccagaatggacagcgagagcctgttcaaggacggcaagctgctgcccgccatcaccatcctgggctgcagagtgagaatccccgccgaggtgctgatcctgaacagcatcgtgctgccccacaaggagctgagcagaagcttcaccaaccagatcatcctgtag

SEQ ID NO: 9867 - DNA, 1215 bp, synthetic construct
  source 1..1215: mol_type = other DNA; note = Synthetic coding sequence
atggaccaggactacgagagaagactgctgagacagatcgtgatccagaacgagaacaccatgcccagagtgaccgagatgagaagaaccctgacccccgccagcagccccgtgagcagccccagcaagcacggcgacagattcatccccagcagagccggcgccaactggagcgtgaacttccacagaatcaacgagaacgagaagagccccagccagaacagaaaggccaaggacgccaccagcgacaacggcaaggacggcctggcctacagcgccctgctgaagaacgagctgctgggcgccggcatcgagaaggtgcaggacccccagaccgaggacagaagactgcagcccagcacccccgagaagaagggcctgttcaccgtgaccagactgtgcgacctgagcgtggagggcgacagcgtgaccagcgtgggctggagcgagagaggcaacctggtggccgtgggcacccacaagggcttcgtgcagatctgggacgccgccgccggcaagaagctgagcatgctggagggccacaccgccagagtgggcgccctggcctggaacgccgagcagctgagcagcggcagcagagacagaatgatcctgcagagagacatcagaaccccccccctgcagagcgagagaagactgcagggccacagacaggaggtgtgcggcctgaagtggagcaccgaccaccagctgctggccagcggcggcaacgacaacaagctgctggtgtggaaccacagcagcctgagccccgtgcagcagtacaccgagcacctggccgccgtgaaggccatcgcctggagcccccaccagcacggcctgctggccagcggcggcggcaccgccgacagatgcatcagattctggaacaccctgaccggccagcccctgcagtgcatcgacaccggcagccaggtgtgcaacctggcctggagcaagcacgccaacgagctggtgagcacccacggctacagccagaaccagatcctggtgtggaagtaccccagcctgacccaggtggccaagctgaccggccacagctacagagtgctgtacctggccatgagccccgacggcgaggccatcgtgaccggcgccggcgacgagaccctgagattctggaacgtgttcagcaagaccagaagcaccaaggagagcgtgagcgtgctgaacctgttcaccagaatcagatag

SEQ ID NO: 9868 - DNA, 5892 bp, synthetic construct
  source 1..5892: mol_type = other DNA; note = Synthetic coding sequence
atgaagcagagaaagggccagggcagcggcggcagcagaggcagaaagaagagaggcctgagcgacatcagccccagcaccagcctgccccccctggtggagggccagctgagatgcttcctgaagctgaccgtgaacagagtgatctggaagatcgccaagccccccacctgcgtgctggtgagagtgagatggtggggcgagaccagcgacggcaccctgttctgccccagagacgccctgcagaccgagcccaaggccgtgagaaccaccaccagatacgccatcagatgcggccccaagcagttcaccagctacctgaccgacatggccgtgctggtgctggaggtgatcaccaagctggacggcctgcccatcggcagagtgcagatcaacggcctggcccagctgagccccacccaccagatcaacggcttcttcaccatcgtgagcagcaccagcaagaagctgggcgagctgcaggtgagcctggccctggagcccctgagcgagacctacgacagctaccaccccctgcccaccaccgacatgaccgagaacgtgctgctgagcaagcagggcttcagagagaacaccgagcccagcagcacccagttccaggtgcccagcagacccagagacatccacaccatcaagatcgacggcaaggagctggccgccaacagcagcagaagcaccacccccagaggcaaggaccacgtgtgcttcgccgagaaccccgacaccatcaaggacagcagcttcggcctgcagcacagcctgaacagcggccagagcctggagagcgtgaccctgaagggcagagcccccagaaagcagatgagcctgctgaacagcagcgagttccagccccagatcagaaccgtggccaagagccacagcgacagctgcatcctgagcagcaacaacctgcccaccaaggacctgctgagcgccctgctggagcagggcaacaagctgagaaacgccatggtgatcagcgccatgaagagcagccccgagaccagcatgctgctggaccaggtgcacccccccatcaacgaggacagcctgagagccagcacccagatcagagccttcagcagaaacagattcaaggaccacatcgaggaccacctgctgcccagcaccgagaacaccttctggagacacgacaccaaggccgacaccagagccatccagctgctgctgggcagcgccgagctgagccagggcaacttctgggacggcctgggcagcccccccgacagccccagccccggcagcgacgtgtactgcatcagcgagctgaacgacccccagtacgaccagagcctgctggagaacctgttctacaccgcccccaagagcgacaccagcatcagcgacttcctgagcgaggaggacgacatcgtgcccagcaagaagatcagccagagcaccgccctggccagaagcagcaaggtgctggagagcagcgaccacaagctgaagaagagaagcgccggcaagagaaacagaaacctggtggagcagcagatgctgagcgagacccccgaggacgcccagaccatgaccctgagcgtggacagactggccctgctgggcagaacccacagcgtgagaatcatcatcgagaccatgggcgtgccccccgacagcccccagatgacccccggcaagaagagctacgccggccccccccccaaggtgaccaccgccaagaagagaaccttcttcgtggagtaccacttccccgtgggcttcagcgagagcggcctgggcaagaccgccctgatcaccgaggtggtgagactggccagcagcaagatcaccgacggcaaggtgaagttccagcagagattcgtgttccccgtgcagttcggcggccccatgatcgagcactggtggaacagcaacctgaccttccagatctacgtgaagaagaccccccagaagaagcccgaggtgatcggcagcgtgagcctgagcctgagagccgtgatccagagcgagctgctgagcttcagcgaccagctgcccgtgcagcaggagaacggccagagccccttcggccccctgaaggtgaccatggagctgatcaccgacaacaaggacttcaccggcatcaacaccaagctgagcggcaacacccactacacccccctgtgcgcccccaccagccccaacaaggccctgcccgagctgaaccaggacatgacctgcaccaagaacccccagaacctgaaccagatccacgaggagaccgccaagaaggcccagaacctggtgctgcccaacagaaagagccccagccccgtggccccccaccccagcaccttcgtggccacccccgccagccacaacctggtgaaccagaccaacggcaccaccaaggagagcgccctgctgctgcacgtgctgctgatggtgcccgacggcaaggacttcatcagcggcgagagcgagaagcagagcccctgcaacgtgtacctgaactgcaagctgttcagcaccgaggaggtgaccagaagcgtgatcgcctggggcaccacccagcccgtgttcaacttcagccaggtgatccccgtgagcctgagcagcaagtacctggagagactgaagaacaacgtgatggtgatcgagacctggaacaaggtgagaagccccggccaggacaagctgctgggcctggtgaagctgcccctgcaccagttctacatgagcttcaaggacgccaagatcagcagactgctgctggacgcccagtaccccgtggtggccgtggacagctacatgcccgtgatcgacgtgttcagcggccaccagaacggcagcctgagagtgttcctggccatgggcagcagcaaccagatcatggccctgcagagactgaagaacgaggagggcaccctgccccccttcagccccagacccgcccacttcctggaccagcccaccgccgccagcgtggccatggccgaggacagaggcaacggcctgatggagcactgcttcgagatccacatcgagatggtgaagggcctggcccccctgcaggccaccgtgtggggcgaggccgactgctacgtgcagtactacttccccgtgcagcacagccagagcagcgtgctgaagggccccgagttcctggagaacggcatcaccctgaagcccttcagaaccgccaccaccctgtgcgtgcccgaccccatcttcaacagcgagcaccaccacagcctgctgctgcccgccgaggtgcccgtgcagagactgctgctgagcgccttcagcgcccagggcctggtgcccggcggcggcgtgcagttcgagatctggtgcagatactactaccccaacgtgagagaccagaaggtggccaagggcaccctgcccctgagcagaatctgcgccatggtgaccacccagcacagagaggacgtgggcatccagaccttcaacctgcccctgacccccagaatcgagaacagaaaggagctgagaaaccagagcagcggcctgctggacgtgggcctgagatacagaagaagccccagaaccgccgagggcgtgctggccgccagaaccgtgagcatcagcgtgcagatcatcagagcctgcggcctgcaggccgccgccaaggccctggccgagagagagcccgccctgcagttcagcgccaccgtgggcgtgaacgccagcgtgaccacccacctgagcttcctgccccagggcgagcagagaagaacccaccccgtggcctgcagcttctgccccgagttcagccaccacgtggagttcacctgcaacctggtgacccagcactgcagcggcgaggcctgcttcctggccgagctgctggagttcgccgaggtgatcttcgccgtgtaccacgagaacaccaagagcgccagcgacatcatcagcatcgagagctgcaaggagtacctgctgggcgtggtgaaggtgcccaccaaggagctgctgatcaagagaagcggcatcaccggctggtaccccatcatcctgcccgaggacggcggcctgccccacggcctggagctgatgcagaagatcgtgggcggcctggagctgagcatcagcttcacccacagaggcgacagagagagagtgctggaggccgccgagcacctgggctggagcttcgagaacagcctgaaggacttcgtgagaatggacgagggcgagcccgccaccgtgaccatcagcacccccagactgtggctgcccatccactgcgtgctgctggccggccacaaccacatccacaagaacacctactgctacctgagatacaagttctacgaccacgaggccttctggacccccctgaagaagcccaaggagagcgtgaacaagaagcagatcatggtgaccttcaaggccagcaagagagccgaggtgaccagaggccccagcctgctgtggtacttcagagaggagagactggagatccaggtgtggagagcctacggcaacgacagcgtggagagaccccaccagaccgacagctggatcggcagcgcctacgtggacctggccagactgggcgagagaagcgccagaaccctgaccgtgagcggcgtgtaccccctgttcggcagaaacgccagcaacctgagcggcgccgccctgagagtgcacgtggtgctgagcagcctgagcagccacctggagcccacccacgagctggacagcatggactgcagcagccacagcgagagcgagcagctgcccagaagaaacgacgaggtgcagctgagcccccccgaggtgatcagctgccaccagaagagccccgccagcacccaggtgccctgcagcagcaccaccgccgaggtgagactgacccaggagggccccgccgacctggacggcaccttcgccgtgagcatcctggtggagagagccatgcacctgagcctgaagggcagccccctgaccgagagaaaggtgagcatccccagctgctgcgtgagcttcgccaccgccgacgagagcagccccgtgtacacccaggtggtggagaacaccgacagccccatctggaacttccagcagcagagcagactgagcaaggagctgctgctggacccccagcagaccctggtgttcaaggtgtggcacaagggcgacgaggagagagtgatcggcttcgccagcgtggacctgagccccctgctgagcggcttccagttcgtgtgcggctggtacaacatcaccgacttcagcggcgagtgccagggccagatcaaggtggccgtgagccccctggagagcctgatccacttcaaggaggagagacaggccagaagaggcgtggagaccagcaagagcctgatccccatctacagccccttcagcttccccgccagcgacacctacgccgccttcagcagccacatggccagacagaccctggaccagctggcccacgccagcagcaaggagctggacttcagcagccccggcagaagcgacaccaccagaagccaggccagcagacacgaggagcacgtgcagaacatcagaagattccacgagagcctgcacctgcagggcgaggcccccctgccctgcgacgacaagctgaccaccagccccctgagcagccagaccagcatcctgaccagcctgagaaagaacctgagcgagctggaccagatccagagatacttcagacagaagctgaccaagcccttcctgcccctgagcccccagacccagaccgccatcagccagcaccaggagagctgcagagaccacctgggccccggcgccagcagcctggaccccggcagccagtgcatcctggagaagagcagcaacctggtgctgcaggtgagcagcctgatcaccggcagctactag

SEQ ID NO: 9869 - DNA, 5586 bp, synthetic construct
  source 1..5586: mol_type = other DNA; note = Synthetic coding sequence
atgaagcagagaaagggccagggcagcggcggcagcagaggcagaaagaagagaggcctgagcgacatcagccccagcaccagcctgccccccctggtggagggccagctgagatgcttcctgaagctgaccgtgaacagagtgatctggaagatcgccaagccccccacctgcgtgctggtgagagtgagatggtggggcgagaccagcgacggcaccctgttctgccccagagacgccctgcagaccgagcccaaggccgtgagaaccaccaccagatacgccatcagatgcggccccaagcagttcaccagctacctgaccgacatggccgtgctggtgctggaggtgatcaccaagctggacggcctgcccatcggcagagtgcagatcaacggcctggcccagctgagccccacccaccagatcaacggcttcttcaccatcgtgagcagcaccagcaagaagctgggcgagctgcaggtgagcctggccctggagcccctgagcgagacctacgacagctaccaccccctgcccaccaccgacatgaccgagaacgtgctgctgagcaagcagggcttcagagagaacaccgagcccagcagcacccagttccaggtgcccagcagacccagagacatccacaccatcaagatcgacggcaaggagctggccgccaacagcagcagaagcaccacccccagaggcaaggaccacgtgtgcttcgccgagaaccccgacaccatcaaggacagcagcttcggcctgcagcacagcctgaacagcggccagagcctggagagcgtgaccctgaagggcagagcccccagaaagcagatgagcctgctgaacagcagcgagttccagccccagatcagaaccgtggccaagagccacagcgacagctgcatcctgagcagcaacaacctgcccaccaaggacctgctgagcgccctgctggagcagggcaacaagctgagaaacgccatggtgatcagcgccatgaagagcagccccgagaccagcatgctgctggaccaggtgcacccccccatcaacgaggacagcctgagagccagcacccagatcagagccttcagcagaaacagattcaaggaccacatcgaggaccacctgctgcccagcaccgagaacaccttctggagacacgacaccaaggccgacaccagagccatccagctgctgctgggcagcgccgagctgagccagggcaacttctgggacggcctgggcagcccccccgacagccccagccccggcagcgacgtgtactgcatcagcgagctgaacgacccccagtacgaccagagcctgctggagaacctgttctacaccgcccccaagagcgacaccagcatcagcgacttcctgagcgaggaggacgacatcgtgcccagcaagaagatcagccagagcaccgccctggccagaagcagcaaggtgctggagagcagcgaccacaagctgaagaagagaagcgccggcaagagaaacagaaacctggtggagcagcagatgctgagcgagacccccgaggacgcccagaccatgaccctgagcgtggacagactggccctgctgggcagaacccacagcgtgagaatcatcatcgagaccatgggcgtgccccccgacagcccccagatgacccccggcaagaagagctacgccggccccccccccaaggtgaccaccgccaagaagagaaccttcttcgtggagtaccacttccccgtgggcttcagcgagagcggcctgggcaagaccgccctgatcaccgaggtggtgagactggccagcagcaagatcaccgacggcaaggtgaagttccagcagagattcgtgttccccgtgcagttcggcggccccatgatcgagcactggtggaacagcaacctgaccttccagatctacgtgaagaagaccccccagaagaagcccgaggtgatcggcagcgtgagcctgagcctgagagccgtgatccagagcgagctgctgagcttcagcgaccagctgcccgtgcagcaggagaacggccagagccccttcggccccctgaaggtgaccatggagctgatcaccgacaacaaggacttcaccggcatcaacaccaagctgagcggcaacacccactacacccccctgtgcgcccccaccagccccaacaaggccctgcccgagctgaaccaggacatgacctgcaccaagaacccccagaacctgaaccagatccacgaggagaccgccaagaaggcccagaacctggtgctgcccaacagaaagagccccagccccgtggccccccaccccagcaccttcgtggccacccccgccagccacaacctggtgaaccagaccaacggcaccaccaaggagagcgccctgctgctgcacgtgctgctgatggtgcccgacggcaaggacttcatcagcggcgagagcgagaagcagagcccctgcaacgtgtacctgaactgcaagctgttcagcaccgaggaggtgaccagaagcgtgatcgcctggggcaccacccagcccgtgttcaacttcagccaggtgatccccgtgagcctgagcagcaagtacctggagagactgaagaacaacgtgatggtgatcgagacctggaacaaggtgagaagccccggccaggacaagctgctgggcctggtgaagctgcccctgcaccagttctacatgagcttcaaggacgccaagatcagcagactgctgctggacgcccagtaccccgtggtggccgtggacagctacatgcccgtgatcgacgtgttcagcggccaccagaacggcagcctgagagtgttcctggccatgggcagcagcaaccagatcatggccctgcagagactgaagaacgaggagggcaccctgccccccttcagccccagacccgcccacttcctggaccagcccaccgccgccagcgtggccatggccgaggacagaggcaacggcctgatggagcactgcttcgagatccacatcgagatggtgaagggcctggcccccctgcaggccaccgtgtggggcgaggccgactgctacgtgcagtactacttccccgtgcagcacagccagagcagcgtgctgaagggccccgagttcctggagaacggcatcaccctgaagcccttcagaaccgccaccaccctgtgcgtgcccgaccccatcttcaacagcgagcaccaccacagcctgctgctgcccgccgaggtgcccgtgcagagactgctgctgagcgccttcagcgcccagggcctggtgcccggcggcggcgtgcagttcgagatctggtgcagatactactaccccaacgtgagagaccagaaggtggccaagggcaccctgcccctgagcagaatctgcgccatggtgaccacccagcacagagaggacgtgggcatccagaccttcaacctgcccctgacccccagaatcgagaacagaaaggagctgagaaaccagagcagcggcctgctggacgtgggcctgagatacagaagaagccccagaaccgccgagggcgtgctggccgccagaaccgtgagcatcagcgtgcagatcatcagagcctgcggcctgcaggccgccgccaaggccctggccgagagagagcccgccctgcagttcagcgccaccgtgggcgtgaacgccagcgtgaccacccacctgagcttcctgccccagggcgagcagagaagaacccaccccgtggcctgcagcttctgccccgagttcagccaccacgtggagttcacctgcaacctggtgacccagcactgcagcggcgaggcctgcttcctggccgagctgctggagttcgccgaggtgatcttcgccgtgtaccacgagaacaccaagagcgccagcgacatcatcagcatcgagagctgcaaggagtacctgctgggcgtggtgaaggtgcccaccaaggagctgctgatcaagagaagcggcatcaccggctggtaccccatcatcctgcccgaggacggcggcctgccccacggcctggagctgatgcagaagatcgtgggcggcctggagcacctgggctggagcttcgagaacagcctgaaggacttcgtgagaatggacgagggcgagcccgccaccgtgaccatcagcacccccagactgtggctgcccatccactgcgtgctgctggccggccacaaccacatccacaagaacacctactgctacctgagatacaagttctacgaccacgaggccttctggacccccctgaagaagcccaaggagagcgtgaacaagaagcagatcatggtgaccttcaaggccagcaagagagccgaggtgaccagaggccccagcctgctgtggtacttcagagaggagagactggagatccaggtgtggagagcctacggcaacgacagcgtggagagaccccaccagaccgacagctggatcggcagcgcctacgtggacctggccagactgggcgagagaagcgccagaaccctgaccgtgagcggcgtgtaccccctgttcggcagaaacgccagcaacctgagcggcgccgccctgagagtgcacgtggtgctgagcagcctgagcagccacctggagcccacccacgagctggacagcatggactgcagcagccacagcgagagcgagcagctgcccagaagaaacgacgaggtgcagctgagcccccccgaggtgatcagctgccaccagaagagccccgccagcacccaggtgccctgcagcagcaccaccgccgaggtgagactgacccaggagggccccgccgacctggacggcaccttcgccgtgagcatcctggtggagagagccatgcacctgagcctgaagggcagccccctgaccgagagaaaggtgagcatccccagctgctgcgtgagcttcgccaccgccgacgagagcagccccgtgtacacccaggtggtggagaacaccgacagccccatctggaacttccagcagcagagcagactgagcaaggagctgctgctggacccccagcagaccctggtgttcaaggtgtggcacaagggcgacgaggagagagtgatcggcttcgccagcgtggacctgagccccctgctgagcggcttccagttcgtgtgcggctggtacaacatcaccgacttcagcggcgagtgccagggccagatcaaggtggccgtgagccccctggagagcctgatccacttcaaggaggagagacaggccagaagaggcgtggagaccagcaagagcctgatccccatctacagccccttcagcttccccgccagcgacacctacgccgccttcagcagccacatggccagacagaccctggaccagctggcccacgccagcagcaaggagctggacttcagcagccccggcagaagcgacaccaccagaagccaggccagcagacacgaggagcacgtgcagaacatcagaagattccacgagagcctgcacctgcagggcgaggcccccctgccctgcgacgacaagctgaccaccagccccctgagcagccagacctag

SEQ ID NO: 9870 - DNA, 1131 bp, synthetic construct
  source 1..1131: mol_type = other DNA; note = Synthetic coding sequence
atgctgaccttcctgcagcagctgagagtggactggcccgccgccagcgagagagccagcagccacaccctgagaagccacgccctggaggagctgaccagcgccaacgacggcagaaccctgagccccggcatcctgggcagactgtgcctgaaggagctggtggaggagcagggcagaaccgccggctacgaccccaacctggacaactgcctggtgaccgaggacctgctgagcgtgctggccgagctgcaggaggccctgtggcactggcccgaggacagccaccccggcctggccggcgccagcgacaccggcaccggcggctgcctggtggtgcacgtggtgagctgcgaggaggagttccagcagcagaagctggacctgctgtggcagaagctggtggacaaggcccccctgagacagaagcacctgatctgcggccccgtgaaggtggccggcgcccccggcaccctgatgaccgcccccgagtactacgagttcagacacacccaggtgtgcaaggccagcgccctgaagcacggcggcgacctggcccaggaccccgcctggaccgagatcttcggcgtgctgagcgtggccaccatcaagttcgagatgctgagcaccgccccccagagccagctgttcctggccctggccgacagcagcatcagcaccaagggcaccaagagcggcaccttcgtgatgtacaactgcgccagactggccaccctgttcgagagctacaagtgcagcatggagcagggcctgtaccccaccttcccccccgtgagcagcctggacttcagcctgctgcacgacgagggcgagtggctgctgctgttcaacagcatcctgcccttccccgacctgctgagcagaaccgccgtgctggactgcaccgcccccggcctgcacatcgccgtgagaaccgagatgatctgcaagttcctggtgcagctgagcatggacttcagcagctactacaacagagtgcacatcctgggcgagcccagaccccacctgttcggccagatgttcgtgagactgcagctgctgagagccgtgagagaggtgctgcacaccggcctggccatgctgggcctgccccccctgagccacatctag

SEQ ID NO: 9871 - DNA, 1572 bp, synthetic construct
  source 1..1572: mol_type = other DNA; note = Synthetic coding sequence
atgaaccagccctgcaacagcatggagcccagagtgatggacgacgacatgctgaagctggccgtgggcgaccagggcccccaggaggaggccggccagctggccaagcaggagggcatcctgttcaaggacgtgctgagcctgcagctggacttcagaaacatcctgagaatcgacaacctgtggcagttcgagaacctgagaaagctgcagctggacaacaacatcatcgagaagatcgagggcctggagaacctggcccacctggtgtggctggacctgagcttcaacaacatcgagaccatcgagggcctggacaccctggtgaacctggaggacctgagcctgttcaacaacagaatcagcaagatcgacagcctggacgccctggtgaagctgcaggtgctgagcctgggcaacaacagaatcgacaacatgatgaacatcatctacctgagaagattcaagtgcctgagaaccctgagcctgagcagaaaccccatcagcgaggccgaggactacaagatgttcatctgcgcctacctgcccgacctgatgtacctggactacagaagaatcgacgaccacaccaagaagctggccgaggccaagcaccagtacagcatcgacgagctgaagcaccaggagaacctgatgcaggcccagctggaggacgagcaggcccagagagaggagctggagaagcacaagaccgccttcgtggagcacctgaacggcagcttcctgttcgacagcatgtacgccgaggacagcgagggcaacaacctgagctacctgcccggcgtgggcgagctgctggagacctacaaggacaagttcgtgatcatctgcgtgaacatcttcgagtacggcctgaagcagcaggagaagagaaagaccgagctggacaccttcagcgagtgcgtgagagaggccatccaggagaaccaggagcagggcaagagaaagatcgccaagttcgaggagaagcacctgagcagcctgagcgccatcagagaggagctggagctgcccaacatcgagaagatgatcctggagtgcagcgccgacatcagcgagctgttcgacgccctgatgaccctggagatgcagctggtggagcagctggaggagaccatcaacatgttcgagagaaacatcgtggacatggtgggcctgttcatcgagaacgtgcagagcctgatggcccagtgcagagacctggagaaccaccaccacgagaagctgctggagatcagcatcagcaccctggagaagatcgtggagggcgacctggacgaggacctgcccaacgacctgagagccctgttcgtggacaaggacaccatcgtgaacgccgtgggcgccagccacgacatccacctgctgaagatcgacaacagagaggacgagctggtgaccagaatcaacagctggtgcaccagactgatcgacagaatccacaaggacgagatcatgagaaacagaaagagagtgaaggagatcaaccagtacatcgaccacatgcagagcgagctggacaacctggagtgcggcgacatcctggactag

SEQ ID NO: 9872 - DNA, 1680 bp, synthetic construct
  source 1..1680: mol_type = other DNA; note = Synthetic coding sequence
atgaaggtgatcacctgcgagatcgcctggcacaacaaggagcccgtgtacagcctggacttccagcacggcaccgccggcagaatccacagactggccagcgccggcgtggacaccaacgtgagaatctggaaggtggagaagggccccgacggcaaggccatcgtggagttcctgagcaacctggccagacacaccaaggccgtgaacgtggtgagattcagccccaccggcgagatcctggccagcggcggcgacgacgccgtgatcctgctgtggaaggtgaacgacaacaaggagcccgagcagatcgccttccaggacgaggacgaggcccagctgaacaaggagaactggaccgtggtgaagaccctgagaggccacctggaggacgtgtacgacatctgctgggccaccgacggcaacctgatggccagcgccagcgtggacaacaccgccatcatctgggacgtgagcaagggccagaagatcagcatcttcaacgagcacaagagctacgtgcagggcgtgacctgggaccccctgggccagtacgtggccaccctgagctgcgacagagtgctgagagtgtacagcatccagaagaagagagtggccttcaacgtgagcaagatgctgagcggcatcggcgccgagggcgaggccagaagctacagaatgttccacgacgacagcatgaagagcttcttcagaagactgagcttcacccccgacggcagcctgctgctgacccccgccggctgcgtggagagcggcgagaacgtgatgaacaccacctacgtgttcagcagaaagaacctgaagagacccatcgcccacctgccctgccccggcaaggccaccctggccgtgagatgctgccccgtgtacttcgagctgagacccgtggtggagaccggcgtggagctgatgagcctgccctacagactggtgttcgccgtggccagcgaggacagcgtgctgctgtacgacacccagcagagcttccccttcggctacgtgagcaacatccactaccacaccctgagcgacatcagctggagcagcgacggcgccttcctggccatcagcagcaccgacggctactgcagcttcgtgaccttcgagaaggacgagctgggcatccccctgaaggagaagcccgtgctgaacatgagaacccccgacaccgccaagaagaccaagagccagacccacagaggcagcagccccggccccagacccgtggagggcacccccgccagcagaacccaggaccccagcagccccggcaccacccccccccaggccagacaggcccccgcccccaccgtgatcagagacccccccagcatcacccccgccgtgaagagccccctgcccggccccagcgaggagaagaccctgcagcccagcagccagaacaccaaggcccaccccagcagaagagtgaccctgaacaccctgcaggcctggagcaagaccacccccagaagaatcaacctgacccccctgaagaccgacaccccccccagcagcgtgcccaccagcgtgatcagcacccccagcaccgaggagatccagagcgagacccccggcgacgcccagggcagcccccccgagctgaagagacccagactggacgagaacaagggcggcaccgagagcctggacccctag

SEQ ID NO: 9873 - DNA, 1527 bp, synthetic construct
  source 1..1527: mol_type = other DNA; note = Synthetic coding sequence
atggccgacggccaggtggccgagctgctgctgagaagactggaggccagcgacggcggcctggacagcgccgagctggccgccgagctgggcatggagcaccaggccgtggtgggcgccgtgaagagcctgcaggccctgggcgaggtgatcgaggccgagctgagaagcaccaagcactgggagctgaccgccgagggcgaggagatcgccagagagggcagccacgaggccagagtgttcagaagcatcccccccgagggcctggcccagagcgagctgatgagactgcccagcggcaaggtgggcttcagcaaggccatgagcaacaagtggatcagagtggacaagagcgccgccgacggccccagagtgttcagagtggtggacagcatggaggacgaggtgcagagaagactgcagctggtgagaggcggccaggccgagaagctgggcgagaaggagagaagcgagctgagaaagagaaagctgctggccgaggtgaccctgaagacctactgggtgagcaagggcagcgccttcagcaccagcatcagcaagcaggagaccgagctgagccccgagatgatcagcagcggcagctggagagacagacccttcaagccctacaacttcctggcccacggcgtgctgcccgacagcggccacctgcaccccctgctgaaggtgagaagccagttcagacagatcttcctggagatgggcttcaccgagatgcccaccgacaacttcatcgagagcagcttctggaacttcgacgccctgttccagccccagcagcaccccgccagagaccagcacgacaccttcttcctgagagaccccgccgaggccctgcagctgcccatggactacgtgcagagagtgaagagaacccacagccagggcggctacggcagccagggctacaagtacaactggaagctggacgaggccagaaagaacctgctgagaacccacaccaccagcgccagcgccagagccctgtacagactggcccagaagaagcccttcacccccgtgaagtacttcagcatcgacagagtgttcagaaacgagaccctggacgccacccacctggccgagttccaccagatcgagggcgtggtggccgaccacggcctgaccctgggccacctgatgggcgtgctgagagagttcttcaccaagctgggcatcacccagctgagattcaagcccgcctacaacccctacaccgagcccagcatggaggtgttcagctaccaccagggcctgaagaagtgggtggaggtgggcaacagcggcgtgttcagacccgagatgctgctgcccatgggcctgcccgagaacgtgagcgtgatcgcctggggcctgagcctggagagacccaccatgatcaagtacggcatcaacaacatcagagagctggtgggccacaaggtgaacctgcagatggtgtacgacagccccctgtgcagactggacgccgagcccagacccccccccacccaggaggccgcctag

SEQ ID NO: 9874 - DNA, 1203 bp, synthetic construct
  source 1..1203: mol_type = other DNA; note = Synthetic coding sequence
atgagcagccccctggccagcctgagcaagaccagaaaggtgcccctgcccagcgagcccatgaaccccggcagaagaggcatcagaatctacggcgacgaggacgaggtggacatgctgagcgacggctgcggcagcgaggagaagatcagcgtgcccagctgctacggcggcatcggcgcccccgtgagcagacagggcgacagcctggccccccccgaggtggacttcgacagactgctggccagcctgcaggacctgagcgagctggtggtggagggcgacacccaggtgacccccgtgcccggcggcgccagactgagaaccctggagcccatccccctgaagctgtacagaaacggcatcatgatgttcgacggccccttccagcccttctacgaccccagcacccagagatgcctgagagacatcctggacggcttcttccccagcgagctgcagagactgtaccccaacggcgtgcccttcaaggtgagcgacctgagaaaccaggtgtacctggaggacggcctggaccccttccccggcgagggcagagtggtgggcagacagctgatgcacaaggccctggacagagtggaggagcaccccggcagcagaatgaccgccgagaagttcctgaacagactgcccaagttcgtgatcagacagggcgaggtgatcgacatcagaggccccatcagagacaccctgcagaactgctgccccctgcccgccagaatccaggagatcgtggtggagacccccaccctggccgccgagagagagagaagccaggagagccccaacacccccgccccccccctgagcatgctgagaatcaagagcgagaacggcgagcaggccttcctgctgatgatgcagcccgacaacaccatcggcgacgtgagagccctgctggcccaggccagagtgatggacgccagcgccttcgagatcttcagcaccttcccccccaccctgtaccaggacgacaccctgaccctgcaggccgccggcctggtgcccaaggccgccctgctgctgagagccagaagagcccccaagagcagcctgaagttcagccccggcccctgccccggccccggccccggccccagccccggccccggccccggccccagccccggccccggccccggccccagcccctgccccggccccagccccagcccccagtag

SEQ ID NO: 9875 - DNA, 1350 bp, synthetic construct
  source 1..1350: mol_type = other DNA; note = Synthetic coding sequence
atggccagcgccctgagaccccccagagtgcccaagcccaagggcgtgctgcccagccactactacgagagcttcctggagaagaagggcccctgcgacagagactacaagaagttctgggccggcctgcagggcctgaccatctacttctacaacagcaacagagacttccagcacgtggagaagctgaacctgggcgccttcgagaagctgaccgacgagatcccctggggcagcagcagagaccccggcacccacttcagcctgatcctgagagaccaggagatcaagttcaaggtggagaccctggagtgcagagagatgtggaagggcttcatcctgaccgtggtggagctgagagtgcccaccgacctgaccctgctgcccggccacctgtacatgatgagcgaggtgctggccaaggaggaggccagaagagccctggagacccccagctgcttcctgaaggtgagcagactggaggcccagctgctgctggagagataccccgagtgcggcaacctgctgctgagacccagcggcgacggcgccgacggcgtgagcgtgaccaccagacagatgcacaacggcacccacgtggtgagacactacaaggtgaagagagagggccccaagtacgtgatcgacgtggagcagcccttcagctgcaccagcctggacgccgtggtgaactacttcgtgagccacaccaagaaggccctggtgcccttcctgctggacgaggactacgagaaggtgctgggctacgtggaggccgacaaggagaacggcgagaacgtgtgggtggcccccagcgcccccggccccggccccgccccctgcaccggcggccccaagcccctgagccccgccagcagccaggacaagctgccccccctgccccccctgcccaaccaggaggagaactacgtgacccccatcggcgacggccccgccgtggactacgagaaccaggacgtggccagcagcagctggcccgtgatcctgaagcccaagaagctgcccaagccccccgccaagctgcccaagccccccgtgggccccaagcccgtggagaagggcttccaccacgtggcccaggccggcctggagctgctgaccagcagcgacccccccaccagcgccagccagagcgccggcatcaccggcgtgagccaccacacctggccccacctgagcagcctgcccgagcccaaggtgttcaacggcggcctgggcagaaagctgcccgtgagcagcgcccagcccctgttccccaccgccggcctggccgacatgaccgccgagctgcagaagaagctggagaagagaagagccctggagcactag

SEQ ID NO: 9876 - DNA, 1239 bp, synthetic construct
  source 1..1239: mol_type = other DNA; note = Synthetic coding sequence
atggaccccatcagaagcttctgcggcaagctgagaagcctggccagcaccctggactgcgagaccgccagactgcagagagccctggacggcgaggagagcgacttcgaggactaccccatgagaatcctgtacgacctgcacagcgaggtgcagaccctgaaggacgacgtgaacatcctgctggacaaggccagactggagaaccaggagggcatcgacttcatcaaggccaccaaggtgctgatggagaagaacagcatggacatcatgaagatcagagagtacttccagaagtacggctacagccccagagtgaagaagaacagcgtgcacgagcaggaggccatcaacagcgaccccgagctgagcaactgcgagaacttccagaagaccgacgtgaaggacgacctgagcgacccccccgtggccagcagctgcatcagcgagaagagccccagaagcccccagctgagcgacttcggcctggagagatacatcgtgagccaggtgctgcccaaccccccccaggccgtgaacaactacaaggaggagcccgtgatcgtgaccccccccaccaagcagagcctggtgaaggtgctgaagacccccaagtgcgccctgaagatggacgacttcgagtgcgtgacccccaagctggagcacttcggcatcagcgagtacaccatgtgcctgaacgaggactacaccatgggcctgaagaacgccagaaacaacaagagcgaggaggccatcgacaccgagagcagactgaacgacaacgtgttcgccacccccagccccatcatccagcagctggagaagagcgacgccgagtacaccaacagccccctggtgcccaccttctgcacccccggcctgaagatccccagcaccaagaacagcatcgccctggtgagcaccaactaccccctgagcaagaccaacagcagcagcaacgacctggaggtggaggacagaaccagcctggtgctgaacagcgacacctgcttcgagaacctgaccgaccccagcagccccaccatcagcagctacgagaacctgctgagaacccccaccccccccgaggtgaccaagatccccgaggacatcctgcagctgctgagcaagtacaacagcaacctggccacccccatcgccatcaaggccgtgccccccagcaagagattcctgaagcacggccagaacatcagagacgtgagcaacaaggagaactag

SEQ ID NO: 9877 - DNA, 2583 bp, synthetic construct
  source 1..2583: mol_type = other DNA; note = Synthetic coding sequence
atgaccgagggcaccaagaagaccagcaagaagttcaagttcttcaagttcaagggcttcggcagcctgagcaacctgcccagaagcttcaccctgagaagaagcagcgccagcatcagcagacagagccacctggagcccgacaccttcgaggccacccaggacgacatggtgaccgtgcccaagagcccccccgcctacgccagaagcagcgacatgtacagccacatgggcaccatgcccagacccagcatcaagaaggcccagaacagccaggccgccagacaggcccaggaggccggccccaagcccaacctggtgcccggcggcgtgcccgacccccccggcctggaggccgccaaggaggtgatggtgaaggccaccggccccctggaggacacccccgccatggagcccaaccccagcgccgtggaggtggaccccatcagaaagcccgaggtgcccaccggcgacgtggaggaggagagaccccccagagacgtgcacagcgagagagccgccggcgagcccgaggccggcagcgactacgtgaagttcagcaaggagaagtacatcctggacagcagccccgagaagctgcacaaggagctggaggaggagctgaagctgagcagcaccgacctgagaagccacgcctggtaccacggcagaatccccagagaggtgagcgagaccctggtgcagagaaacggcgacttcctgatcagagacagcctgaccagcctgggcgactacgtgctgacctgcagatggagaaaccaggccctgcacttcaagatcaacaaggtggtggtgaaggccggcgagagctacacccacatccagtacctgttcgagcaggagagcttcgaccacgtgcccgccctggtgagataccacgtgggcagcagaaaggccgtgagcgagcagagcggcgccatcatctactgccccgtgaacagaaccttccccctgagatacctggaggccagctacggcctgggccagggcagcagcaagcccgccagccccgtgagccccagcggccccaagggcagccacatgaagagaagaagcgtgaccatgaccgacggcctgaccgccgacaaggtgaccagaagcgacggctgccccaccagcaccagcctgcccagacccagagacagcatcagaagctgcgccctgagcatggaccagatccccgacctgcacagccccatgagccccatcagcgagagccccagcagccccgcctacagcaccgtgaccagagtgcacgccgcccccgccgcccccagcgccaccgccctgcccgccagccccgtggccagaagaagcagcgagccccagctgtgccccggcagcgcccccaagacccacggcgagagcgacaagggcccccacaccagccccagccacaccctgggcaaggccagccccagccccagcctgagcagctacagcgaccccgacagcggccactactgccagctgcagccccccgtgagaggcagcagagagtgggccgccaccgagaccagcagccagcaggccagaagctacggcgagagactgaaggagctgagcgagaacggcgcccccgagggcgactggggcaagaccttcaccgtgcccatcgtggaggtgaccagcagcttcaaccccgccaccttccagagcctgctgatccccagagacaacagacccctggaggtgggcctgctgagaaaggtgaaggagctgctggccgaggtggacgccagaaccctggccagacacgtgaccaaggtggactgcctggtggccagaatcctgggcgtgaccaaggagatgcagaccctgatgggcgtgagatggggcatggagctgctgaccctgccccacggcagacagctgagactggacctgctggagagattccacaccatgagcatcatgctggccgtggacatcctgggctgcaccggcagcgccgaggagagagccgccctgctgcacaagaccatccagctggccgccgagctgagaggcaccatgggcaacatgttcagcttcgccgccgtgatgggcgccctggacatggcccagatcagcagactggagcagacctgggtgaccctgagacagagacacaccgagggcgccatcctgtacgagaagaagctgaagcccttcctgaagagcctgaacgagggcaaggagggcccccccctgagcaacaccaccttcccccacgtgctgcccctgatcaccctgctggagtgcgacagcgccccccccgagggccccgagccctggggcagcaccgagcacggcgtggaggtggtgctggcccacctggaggccgccagaaccgtggcccaccacggcggcctgtaccacaccaacgccgaggtgaagctgcagggcttccaggccagacccgagctgctggaggtgttcagcaccgagttccagatgagactgctgtggggcagccagggcgccagcagcagccaggccagaagatacgagaagttcgacaaggtgctgaccgccctgagccacaagctggagcccgccgtgagaagcagcgagctgtag

SEQ ID NO: 9878 - DNA, 573 bp, synthetic construct
  source 1..573: mol_type = other DNA; note = Synthetic coding sequence
atgaccgtgccctggagacccggcaagagaagaatcacctacaaggaggaggaggacctgaccctgcagcccagacccgccagcagcgcccccgagagcctggtgggcctgcaggagggcaagagcaccgagcagggcaaccacgaccagctgaaggagctgtacagcgccggcaacctgaccgtgctggccaccgaccccctgctgcaccaggaccccgtgcagctggacttccacttcagactgaccagccagaccagcgcccactggcacggcctgctgtgcgacagaagactgttcctggacatcccctaccaggccctggaccagggcaacagagagagcctgaccgccaccctggagtacgtggaggagaagaccaacgtggacagcgtgttcgtgaacttccagaacgacagaaacgacagaggcgccctgctgagagccttcagctacatgggcttcgaggtggtgagacccgaccaccccgccctgccccccctggacaacgtgatcttcatggtgtaccccctggagagagacgtgggccacctgcccagcgagcccccctag

SEQ ID NO: 9879 - DNA, 1527 bp, synthetic construct
  source 1..1527: mol_type = other DNA; note = Synthetic coding sequence
atggccaccgactggctgggcagcatcgtgagcatcaactgcggcgacagcctgggcgtgtaccagggcagagtgagcgccgtggaccaggtgagccagaccatcagcctgaccagacccttccacaacggcgtgaagtgcctggtgcccgaggtgaccttcagagccggcgacatcaccgagctgaagatcctggagatccccggccccggcgacaaccagcacttcggcgacctgcaccagaccgagctgggccccagcggcgccggctgccaggtgggcatcaaccagaacggcaccggcaagttcgtgaagaagcccgccagcagcagcagcgccccccagaacatccccaagagaaccgacgtgaagagccaggacgtggccgtgagcccccagcagcagcagtgcagcaagagctacgtggacagacacatggagagcctgagccagagcaagagcttcagaagaagacacaacagctggagcagcagcagcagacaccccaaccaggccacccccaagaagagcggcctgaagaacggccagatgaagaacaaggacgacgagtgcttcggcgacgacatcgaggagatccccgacaccgacttcgacttcgagggcaacctggccctgttcgacaaggccgccgtgttcgaggagatcgacacctacgagagaagaagcggcaccagaagcagaggcatccccaacgagagacccaccagatacagacacgacgagaacatcctggagagcgagcccatcgtgtacagaagaatcatcgtgccccacaacgtgagcaaggagttctgcaccgacagcggcctggtggtgcccagcatcagctacgagctgcacaagaagctgctgagcgtggccgagaagcacggcctgaccctggagagaagactggagatgaccggcgtgtgcgccagccagatggccctgaccctgctgggcggccccaacagactgaaccccaagaacgtgcaccagagacccaccgtggccctgctgtgcggcccccacgtgaagggcgcccagggcatcagctgcggcagacacctggccaaccacgacgtgcaggtgatcctgttcctgcccaacttcgtgaagatgctggagagcatcaccaacgagctgagcctgttcagcaagacccagggccagcaggtgagcagcctgaaggacctgcccaccagccccgtggacctggtgatcaactgcctggactgccccgagaacgtgttcctgagagaccagccctggtacaaggccgccgtggcctgggccaaccagaacagagcccccgtgctgagcatcgacccccccgtgcacgaggtggagcagggcatcgacgccaagtggagcctggccctgggcctgcccctgcccctgggcgagcacgccggcagaatctacctgtgcgacatcggcatcccccagcaggtgttccaggaggtgggcatcaactaccacagccccttcggctgcaagttcgtgatccccctgcacagcgcctag

SEQ ID NO: 9880 - DNA, 1158 bp, synthetic construct
  source 1..1158: mol_type = other DNA; note = Synthetic coding sequence
atgggcagatggtgccagaccgtggccagaggccagagacccagaaccagcgcccccagcagagccggcgccctgctgctgctgctgctgctgctgagaagcgccggctgctggggcgccggcgaggcccccggcgccctgagcaccgccgaccccgccgaccagagcgtgcagtgcgtgcccaaggccacctgccccagcagcagacccagactgctgtggcagacccccaccacccagaccctgcccagcaccaccatggagacccagttccccgtgagcgagggcaaggtggacccctacagaagctgcggcttcagctacgagcaggaccccaccctgagagaccccgaggccgtggccagaagatggccctggatggtgagcgtgagagccaacggcacccacatctgcgccggcaccatcatcgccagccagtgggtgctgaccgtggcccactgcctgatctggagagacgtgatctacagcgtgagagtgggcagcccctggatcgaccagatgacccagaccgccagcgacgtgcccgtgctgcaggtgatcatgcacagcagatacagagcccagagattctggagctgggtgggccaggccaacgacatcggcctgctgaagctgaagcaggagctgaagtacagcaactacgtgagacccatctgcctgcccggcaccgactacgtgctgaaggaccacagcagatgcaccgtgaccggctggggcctgagcaaggccgacggcatgtggccccagttcagaaccatccaggagaaggaggtgatcatcctgaacaacaaggagtgcgacaacttctaccacaacttcaccaagatccccaccctggtgcagatcatcaagagccagatgatgtgcgccgaggacacccacagagagaagttctgctacgagctgaccggcgagcccctggtgtgcagcatggagggcacctggtacctggtgggcctggtgagctggggcgccggctgccagaagagcgaggccccccccatctacctgcaggtgagcagctaccagcactggatctgggactgcctgaacggccaggccctggccctgcccgcccccagcagaaccctgctgctggccctgcccctgcccctgagcctgctggccgccctgtag

SEQ ID NO: 9881 - DNA, 750 bp, synthetic construct
  source 1..750: mol_type = other DNA; note = Synthetic coding sequence
atggtggacagactggccaacagcgaggccaacaccagaagaatcagcatcgtggagaactgcttcggcgccgccggccagcccctgaccatccccggcagagtgctgatcggcgagggcgtgctgaccaagctgtgcagaaagaagcccaaggccagacagttcttcctgttcaacgacatcctggtgtacggcaacatcgtgatccagaagaagaagtacaacaagcagcacatcatccccctggagaacgtgaccatcgacagcatcaaggacgagggcgacctgagaaacggctggctgatcaagacccccaccaagagcttcgccgtgtacgccgccaccgccaccgagaagagcgagtggatgaaccacatcaacaagtgcgtgaccgacctgctgagcaagagcggcaagacccccagcaacgagcacgccgccgtgtgggtgcccgacagcgaggccaccgtgtgcatgagatgccagaaggccaagttcacccccgtgaacagaagacaccactgcagaaagtgcggcttcgtggtgtgcggcccctgcagcgagaagagattcctgctgcccagccagagcagcaagcccgtgagaatctgcgacttctgctacgacctgctgagcgccggcgacatggccacctgccagcccgccagaagcgacagctacagccagagcctgaagagccccctgaacgacatgagcgacgacgacgacgacgacgacagcagcgactag

SEQ ID NO: 9882 - DNA, 2745 bp, synthetic construct
  source 1..2745: mol_type = other DNA; note = Synthetic coding sequence
atgggcgacagcagagacctgtgcccccacctggacagcatcggcgaggtgaccaaggaggacctgctgctgaagagcaagggcacctgccagagctgcggcgtgaccggccccaacctgtgggcctgcctgcaggtggcctgcccctacgtgggctgcggcgagagcttcgccgaccacagcaccatccacgcccaggccaagaagcacaacctgaccgtgaacctgaccaccttcagactgtggtgctacgcctgcgagaaggaggtgttcctggagcagagactggccgcccccctgctgggcagcagcagcaagttcagcgagcaggacagccccccccccagccaccccctgaaggccgtgcccatcgccgtggccgacgagggcgagagcgagagcgaggacgacgacctgaagcccagaggcctgaccggcatgaagaacctgggcaacagctgctacatgaacgccgccctgcaggccctgagcaactgcccccccctgacccagttcttcctggagtgcggcggcctggtgagaaccgacaagaagcccgccctgtgcaagagctaccagaagctggtgagcgaggtgtggcacaagaagagacccagctacgtggtgcccaccagcctgagccacggcatcaagctggtgaaccccatgttcagaggctacgcccagcaggacacccaggagttcctgagatgcctgatggaccagctgcacgaggagctgaaggagcccgtggtggccaccgtggccctgaccgaggccagagacagcgacagcagcgacaccgacgagaagagagagggcgacagaagccccagcgaggacgagttcctgagctgcgacagcagcagcgacagaggcgagggcgacggccagggcagaggcggcggcagcagccaggccgagaccgagctgctgatccccgacgaggccggcagagccatcagcgagaaggagagaatgaaggacagaaagttcagctggggccagcagagaaccaacagcgagcaggtggacgaggacgccgacgtggacaccgccatggccgccctggacgaccagcccgccgaggcccagccccccagccccagaagcagcagcccctgcagaacccccgagcccgacaacgacgcccacctgagaagcagcagcagaccctgcagccccgtgcaccaccacgagggccacgccaagctgagcagcagcccccccagagccagccccgtgagaatggcccccagctacgtgctgaagaaggcccaggtgctgagcgccggcagcagaagaagaaaggagcagagatacagaagcgtgatcagcgacatcttcgacggcagcatcctgagcctggtgcagtgcctgacctgcgacagagtgagcaccaccgtggagaccttccaggacctgagcctgcccatccccggcaaggaggacctggccaagctgcacagcgccatctaccagaacgtgcccgccaagcccggcgcctgcggcgacagctacgccgcccagggctggctggccttcatcgtggagtacatcagaagattcgtggtgagctgcacccccagctggttctggggccccgtggtgaccctggaggactgcctggccgccttcttcgccgccgacgagctgaagggcgacaacatgtacagctgcgagagatgcaagaagctgagaaacggcgtgaagtactgcaaggtgctgagactgcccgagatcctgtgcatccacctgaagagattcagacacgaggtgatgtacagcttcaagatcaacagccacgtgagcttccccctggagggcctggacctgagacccttcctggccaaggagtgcaccagccagatcaccacctacgacctgctgagcgtgatctgccaccacggcaccgccggcagcggccactacatcgcctactgccagaacgtgatcaacggccagtggtacgagttcgacgaccagtacgtgaccgaggtgcacgagaccgtggtgcagaacgccgagggctacgtgctgttctacagaaagagcagcgaggaggccatgagagagagacagcaggtggtgagcctggccgccatgagagagcccagcctgctgagattctacgtgagcagagagtggctgaacaagttcaacaccttcgccgagcccggccccatcaccaaccagaccttcctgtgcagccacggcggcatccccccccacaagtaccactacatcgacgacctggtggtgatcctgccccagaacgtgtgggagcacctgtacaacagattcggcggcggccccgccgtgaaccacctgtacgtgtgcagcatctgccaggtggagatcgaggccctggccaagagaagaagaatcgagatcgacaccttcatcaagctgaacaaggccttccaggccgaggagagccccggcgtgatctactgcatcagcatgcagtggttcagagagtgggaggccttcgtgaagggcaaggacaacgagccccccggccccatcgacaacagcagaatcgcccaggtgaagggcagcggccacgtgcagctgaagcagggcgccgactacggccagatcagcgaggagacctggacctacctgaacagcctgtacggcggcggccccgagatcgccatcagacagagcgtggcccagcccctgggccccgagaacctgcacggcgagcagaagatcgaggccgagaccagagccgtgtag

SEQ ID NO: 9883 - DNA, 1341 bp, synthetic construct
  source 1..1341: mol_type = other DNA; note = Synthetic coding sequence
atgagagccgccagaagaggcctgcactgcgccggcgccgagagacccagaagaagaggcagactgtgggacagcagcggcgtgccccagagacagaagagacccggcccctggagaacccagacccaggagcagatgagcagagacgtgtgcatccacacctggccctgcacctactacctggagcccaagagaagatgggtgaccggccagctgagcctgaccagcctgagcctgagattcatgaccgacagcaccggcgagatcctggtgagcttccccctgagcagcatcgtggagatcaagaaggaggccagccacttcatcttcagcagcatcaccatcctggagaagggccacgccaagcactggttcagcagcctgagacccagcagaaacgtggtgttcagcatcatcgagcacttctggagagagctgctgctgagccagcccggcgccgtggccgacgccagcgtgcccagaaccagaggcgaggagctgaccggcctgatggccggcagccagaagagactggaggacaccgccagagtgctgcaccaccagggccagcagctggacagcgtgatgagaggcctggacaagatggagagcgacctggaggtggccgacagactgctgaccgagctggagagccccgcctggtggcccttcagcagcaagctgtggaagaccccccccgagaccaagcccagagaggacgtgagcatgaccagctgcgagcccttcggcaaggagggcatcctgatcaagatccccgccgtgatcagccacagaaccgagagccacgtgaagcccggcagactgaccgtgctggtgagcggcctggagatccacgacagcagcagcctgctgatgcacagattcgagagagaggacgtggacgacatcaaggtgcacagcccctacgagatcagcatcagacagagattcatcggcaagcccgacatggcctacagactgatcagcgccaagatgcccgaggtgatccccatcctggaggtgcagttcagcaagaagatggagctgctggaggacgccctggtgctgagaagcgccagaaccagcagccccgccgagaagagctgcagcgtgtggcacgccgccagcggcctgatgggcagaaccctgcacagagagccccccgccggcgaccaggagggcaccgccctgcacctgcagaccagcctgcccgccctgagcgaggccgacacccaggagctgacccagggcttcagacccatgagcctgagcacccagaccgtgctggtgatgctgtgcagcgagagcgccggcgccctgtggagacagagactgagctag

SEQ ID NO: 9884 - DNA, 1896 bp, synthetic construct
  source 1..1896: mol_type = other DNA; note = Synthetic coding sequence
atggccatcgtgcagaccctgcccgtgcccctggagcccgcccccgaggccgccaccgccccccaggcccccgtgatgggcagcgtgagcagcctgatcagcggcagaccctgccccggcggccccgccccccccagacaccacggcccccccggccccaccttcttcagacagcaggacggcctgctgagaggcggctacgaggcccaggagcccctgtgccccgccgtgccccccagaaaggccgtgcccgtgaccagcttcacctacatcaacgaggacttcagaaccgagagcccccccagccccagcagcgacgtggaggacgccagagagcagagagcccacaacgcccacctgagaggccccccccccaagctgatccccgtgagcggcaagctggagaagaacatggagaagatcctgatcagacccaccgccttcaagcccgtgctgcccaagcccagaggcgcccccagcctgcccagcttcatgggccccagagccaccggcctgagcggcagccagggcagcctgacccagctgttcggcggccccgccagcagcagcagcagcagcagcagcagcagcgccgccgacaagcccctggccttcagcggctgggccagcggctgccccagcggcaccctgagcgacagcggcagaaacagcctgagcagcctgcccacctacagcaccggcggcgccgagcccaccaccagcagccccggcggccacctgcccagccacggcagcggcagaggcgccctgcccggccccgccagaggcgtgcccaccggccccagccacagcgacagcggcagaagcagcagcagcaagagcaccggcagcctgggcggcagagtggccggcggcctgctgggcagcggcaccagagccagccccgacagcagcagctgcggcgagagaagcccccccccccccccccccccccccagcgacgaggccctgctgcactgcgtgctggagggcaagctgagagacagagaggccgagctgcagcagctgagagacagcctggacgagaacgaggccaccatgtgccaggcctacgaggagagacagagacactggcagagagagagagaggccctgagagaggactgcgccgcccaggcccagagagcccagagagcccagcagctgctgcagctgcaggtgttccagctgcagcaggagaagagacagctgcaggacgacttcgcccagctgctgcaggagagagagcagctggagagaagatgcgccaccctggagagagagcagagagagctgggccccagactggaggagaccaagtgggaggtgtgccagaagagcggcgagatcagcctgctgaagcagcagctgaaggagagccaggccgagctggtgcagaagggcagcgagctggtggccctgagagtggccctgagagaggccagagccaccctgagagtgagcgagggcagagccagaggcctgcaggaggccgccagagccagagagctggagctggaggcctgcagccaggagctgcagagacacagacaggaggccgagcagctgagagagaaggccggccagctggacgccgaggccgccggcctgagagagccccccgtgccccccgccaccgccgaccccttcctgctggccgagagcgacgaggccagcgccaccgccaaccccgtgcacagaagattccagcccacccccgccagaggcgccggcaagaagaagggcctgccccccctgcacatcccccccgaccccaaggccagagagagccagatggcccccgccgcccccgacgtgcccgcccacatcggcggccagggcagagcctgggccagattccccggcctgagcagcgccgccagcctgctggagtag

SEQ ID NO: 9885 - DNA, 1473 bp, synthetic construct
  source 1..1473: mol_type = other DNA; note = Synthetic coding sequence
atgaacggcgccctggaccacagcgaccagcccgaccccgacgccatcaagatgttcgtgggccagatccccagaagctggagcgagaaggagctgaaggagctgttcgagccctacggcgccgtgtaccagatcaacgtgctgagagacagaagccagaaccccccccagagcaagggctgctgcttcgtgaccttctacaccagaaaggccgccctggaggcccagaacgccctgcacaacatcaagaccctgcccggcatgcaccaccccatccagatgaagcccgccgacagcgagaagagcaacgccgtggaggacagaaagctgttcatcggcatggtgagcaagaagtgcaacgagaacgacatcagagtgatgttcagccccttcggccagatcgaggagtgcagaatcctgagaggccccgacggcctgagcagaggctgcgccttcgtgaccttcagcaccagagccatggcccagaacgccatcaaggccatgcaccagagccagaccatggagggctgcagcagccccatcgtggtgaagttcgccgacacccagaaggacaaggagcagagaagactgcagcagcagctggcccagcagatgcagcagctgaacaccgccacctggggcaacctgaccggcctgggcggcctgaccccccagtacctggccctgctgcagcaggccaccagcagcagcaacctgggcgccttcagcggcatccagcagatggccggcatgaacgccctgcagctgcagaacctggccaccctggccgccgccgccgccgccgcccagaccagcgccaccagcaccaacgccaaccccctgagcaccaccagcagcgccctgggcgccctgaccagccccgtggccgccagcacccccaacagcaccgccggcgccgccatgaacagcctgaccagcctgggcaccctgcagggcctggccggcgccaccgtgggcctgaacaacatcaacgccctggccgtggcccagatgctgagcggcatggccgccctgaacggcggcctgggcgccaccggcctgaccaacggcaccgccggcaccatggacgccctgacccaggcctacagcggcatccagcagtacgccgccgccgccctgcccaccctgtacagccagagcctgctgcagcagcagagcgccgccggcagccagaaggagggccccgagggcgccaacctgttcatctaccacctgccccaggagttcggcgaccaggacatcctgcagatgttcatgcccttcggcaacgtgatcagcgccaaggtgttcatcgacaagcagaccaacctgagcaagtgcttcggcttcgtgagctacgacaaccccgtgagcgcccaggccgccatccaggccatgaacggcttccagatcggcatgaagagactgaaggtgcagctgaagagaagcaagaacgacagcaagccctactag

SEQ ID NO: 9886 - DNA, 627 bp, synthetic construct
  source 1..627: mol_type = other DNA; note = Synthetic coding sequence
atggccgccagcgtggagcagagagagggcaccatccaggtgcagggccaggccctgttcttcagagaggccctgcccggcagcggccaggccagattcagcgtgctgctgctgcacggcatcagattcagcagcgagacctggcagaacctgggcaccctgcacagactggcccaggccggctacagagccgtggccatcgacctgcccggcctgaagggcgagccccccgcccaggagcccctgctgagccagagcagagccagcttcctggccgccgtggtggacgccctggagctgggcccccccgtggtgatcagccccagcctgagcggcatgtacagcctgcccttcctgaccgcccccggcagccagctgcccggcttcgtgcccgtggcccccatctgcaccgacaagatcaacgccgccaactacgccagcgtgaagacccccgccctgatcgtgtacggcgaccaggaccccatgggccagaccagcttcgagcacctgaagcagctgcccaaccacagagtgctgatcatgaagggcgccggccacccctgctacctggacaagcccgaggagtggcacaccggcctgctggacttcctgcagggcctgcagtag

SEQ ID NO: 9887 - DNA, 546 bp, synthetic construct
  source 1..546: mol_type = other DNA; note = Synthetic coding sequence
atggagagcagaagcgtggcccaggccggcgtgcagtggtgcgacctgggcagcctgcagccccccccccccggcttcaagcagttcagctacttcagcctgcagagcagctgggactacagatacgtgcccccctgccccgccaacttcgtgttcctggtggagatgggcttcctgcacgtggaccaggccggcctgaagctgctgaccagcggcatcgacttcgccaccagaaagatcgccaagctgctgaagccccagaaggtgatcgagcagaacggcgacagcttcaccatccacaccaacagcagcctgagaaactacttcgtgaagttcaaggtgggcgaggagttcgacgaggacaacagaggcctggacaacagaaagtgcaagagcctggtgatctgggacaacgacagactgacctgcatccagaagggcgagaagaagaacagaggctggacccactggatcgagggcgacaagctgcacctggagatgttctgcgagggccaggtgtgcaagcagaccttccagagagcctag

SEQ ID NO: 9888 - DNA, 1647 bp, synthetic construct
  source 1..1647: mol_type = other DNA; note = Synthetic coding sequence
atgagcgccagcctgaactacaagagcttcagcaaggagcagcagaccatggacaacctggagaagcagctgatctgccccatctgcctggagatgttcaccaagcccgtggtgatcctgccctgccagcacaacctgtgcagaaagtgcgccagcgacatcttccaggccagcaacccctacctgcccaccagaggcggcaccaccatggccagcggcggcagattcagatgccccagctgcagacacgaggtggtgctggacagacacggcgtgtacggcctgcagagaaacctgctggtggagaacatcatcgacatctacaagcaggagagcaccagacccgagaagaagagcgaccagcccatgtgcgaggagcacgaggaggagagaatcaacatctactgcctgaactgcgaggtgcccacctgcagcctgtgcaaggtgttcggcgcccacaaggactgccaggtggcccccctgacccacgtgttccagagacagaagagcgagctgagcgacggcatcgccatcctggtgggcagcaacgacagagtgcagggcgtgatcagccagctggaggacacctgcaagaccatcgaggagtgctgcagaaagcagaagcaggagctgtgcgagaagttcgactacctgtacggcatcctggaggagagaaagaacgagatgacccaggtgatcaccagaacccaggaggagaagctggagcacgtgagagccctgatcaagaagtacagcgaccacctggagaacgtgagcaagctggtggagagcggcatccagttcatggacgagcccgagatggccgtgttcctgcagaacgccaagaccctgctgaagaagatcagcgaggccagcaaggccttccagatggagaagatcgagcacggctacgagaacatgaaccacttcaccgtgaacctgaacagagaggagaagatcatcagagagatcgacttctacagagaggacgaggacgaggaggaggaggagggcggcgagggcgagaaggagggcgagggcgaggtgggcggcgaggccgtggaggtggaggaggtggagaacgtgcagaccgagttccccggcgaggacgagaaccccgagaaggccagcgagctgagccaggtggagctgcaggccgcccccggcgccctgcccgtgagcagccccgagcccccccccgccctgccccccgccgccgacgcccccgtgacccagggcgaggtggtgcccaccggcagcgagcagaccaccgagagcgagacccccgtgcccgccgccgccgagaccgccgaccccctgttctaccccagctggtacaagggccagaccagaaaggccaccaccaaccccccctgcacccccggcagcgagggcctgggccagatcggcccccccggcagcgaggacagcaacgtgagaaaggccgaggtggccgccgccgccgccagcgagagagccgccgtgagcggcaaggagaccagcgcccccgccgccaccagccagatcggcttcgaggccccccccctgcagggccaggccgccgcccccgccagcggcagcggcgccgacagcgagcccgccagacacatcttcagcttcagctggctgaacagcctgaacgagtag

SEQ ID NO: 9889 - DNA, 1374 bp, synthetic construct
  source 1..1374: mol_type = other DNA; note = Synthetic coding sequence
atgttccccaagttcagcctgagaagcatgttccacggcgccggcggcggcaacgacatccagtggtgcttcagccaggtgaagggcgccgtggacgacgacgtggccgaggccgacatcatcagcaccgtggagttcaaccacagcggcgagctgctggccaccggcgacaagggcggcagagtggtgatcttccagcaggagcaggagaacaagatccagagccacagcagaggcgagtacaacgtgtacagcaccttccagagccacgagcccgagttcgactacctgaagagcctggagatcgaggagaagatcaacaagatcagatggctgccccagaagaacgccgcccagttcctgctgagcaccaacgacaagaccatcaagctgtggaagatcagcgagagagacaagagacccgagggctacaacctgaaggaggaggacggcagatacagagaccccaccaccgtgaccaccctgagagtgcccgtgttcagacccatggacctgatggtggaggccagccccagaagaatcttcgccaacgcccacacctaccacatcaacagcatcagcatcaacagcgactacgagacctacctgagcgccgacgacctgagaatcaacctgtggcacctggagatcaccgacagaagcttcaacatcgtggacatcaagcccgccaacatggaggagctgaccgaggtgatcaccgccgccgagttccaccccaacagctgcaacaccttcgtgtacagcagcagcaagggcaccatcagactgtgcgacatgagagccagcgccctgtgcgacagacacagcaagctgttcgaggagcccgaggaccccagcaacagaagcttcttcagcgagatcatcagcagcatcagcgacgtgaagttcagccacagcggcagatacatgatgaccagagactacctgagcgtgaagatctgggacctgaacatggagaacagacccgtggagacctaccaggtgcacgagtacctgagaagcaagctgtgcagcctgtacgagaacgactgcatcttcgacaagttcgagtgctgctggaacggcagcgacagcgtggtgatgaccggcagctacaacaacttcttcagaatgttcgacagaaacaccaagagagacatcaccctggaggccagcagagagaacaacaagcccagaaccgtgctgaagcccagaaaggtgtgcgccagcggcaagagaaagaaggacgagatcagcgtggacagcctggacttcaacaagaagatcctgcacaccgcctggcaccccaaggagaacatcatcgccgtggccaccaccaacaacctgtacatcttccaggacaaggtgaactag

SEQ ID NO: 9890 - DNA, 738 bp, synthetic construct
  source 1..738: mol_type = other DNA; note = Synthetic coding sequence
atggccggcctggagctgctgagcgaccagggctacagagtggacggcagaagagccggcgagctgagaaagatccaggccagaatgggcgtgttcgcccaggccgacggcagcgcctacatcgagcagggcaacaccaaggccctggccgtggtgtacggcccccacgagatcagaggcagcagagccagagccctgcccgacagagccctggtgaactgccagtacagcagcgccaccttcagcaccggcgagagaaagagaagaccccacggcgacagaaagagctgcgagatgggcctgcagctgagacagaccttcgaggccgccatcctgacccagctgcaccccagaagccagatcgacatctacgtgcaggtgctgcaggccgacggcggcacctacgccgcctgcgtgaacgccgccaccctggccgtgctggacgccggcatccccatgagagacttcgtgtgcgcctgcagcgccggcttcgtggacggcaccgccctggccgacctgagccacgtggaggaggccgccggcggcccccagctggccctggccctgctgcccgccagcggccagatcgccctgctggagatggacgccagactgcacgaggaccacctggagagagtgctggaggccgccgcccaggccgccagagacgtgcacaccctgctggacagagtggtgagacagcacgtgagagaggccagcatcctgctgggcgactag

SEQ ID NO: 9891 - DNA, 2631 bp, synthetic construct
  source 1..2631: mol_type = other DNA; note = Synthetic coding sequence
atgatggccgacggcgccgccgccggcgccggcggcagccccagcctgagagagctgagagccagaatggtggccgccgccaacgagatcgccaaggagagaagaaagcaggacgtggtgaacagagtggccacccacagcagcaacatcagaagcaccttcaagcccgtgatcgacggcagcatgctgaagaacgacatcaagcagagactggccagagagagaagagaggagaagagaagacagcaggacgccaacaaggagacccagctgctggagaaggagagaaagaccaagctgcagtacgagaagcagatggaggagagacagagaaagctgaaggagagaaaggagaaggaggagcagagaagaatcgccgccgaggagaagagacaccagaaggacgaggcccagaaggagaagttcaccgccatcctgtacagaaccctggagagaagaagactggccgacgactaccagcagaagagatggagctggggcggcagcgccatggccaacagcgagagcaagaccgccaacaagagaagcgccagcaccgagaagctggagcagggcaccagcgccctgatcagacagatgcccctgagcagcgccggcctgcagaacagcgtggccaagagaaagaccgacaaggagagaagcagcagcctgaacagaagagacagcaacctgcacagcagcaccgacaaggagcaggccgagagaaagcccagagtgaccggcgtgaccaactacgtgatgcagtacgtgaccgtgcccctgagaaagtgcaccagcgacgagctgagagccgtgatgttccccatgagcaccatgaagatccccccccagaccaaggtggaggagagccccctggagaaggtggagaccccccccaaggccagcgtggacgcccccccccaggtgaacgtggaggtgttctgcaacaccagcatggaggccagccccaaggccggcgtgggcatggcccccgaggtgagcaccgacagcttccccgtggtgagcgtggacgtgagccccgtggtgagcacctacgacagcgagatgagcatggacgccagccccgagctgagcatcgaggccctgcccaaggtggacctggagaccgtgcccaaggtgagcatcgtggccagccccgaggccagcctggaggccccccccgaggtgagcctggaggccctgcccgaggtgagcgtggaggccgcccccgagggcagcctggaggccccccccaagggcagcgccgaggtggcccccaaggagagcgtgaagggcagccccaaggagagcatggaggccagccccgaggccatggtgaaggccagccccaagaccagcctggaggccagcatggaggccagccccaaggccaaggccagagacgcccccaagaagagcgagatggacaagcaggccctgatccccatcgccaagaagagactgagcagctacaccgagtgctacaagtggagcagcagccccgagaacgcctgcggcctgcccagccccatcagcaccaacagacagatccagaagaactgcccccccagccccctgcccctgatcagcaagcagagcccccagaccagcttcccctacaagatcatgcccatccagcacaccctgagcgtgcagagcgccagcagcaccgtgaagaagaagaaggagaccgtgagcaagaccaccaacagatgcgaggccctgagccagagacacatgatctacgaggagagcggcaacaagagcaccgccggcatcatgaacgccgaggccgccaccaagatcctgaccgagctgagaagactggccagagagcagagagagaaggaggaggaggagagacagagagaggagatgcagcagagagtgatcaagaagagcaaggacatggccaaggaggccgtgggcggccaggccgaggaccacctgaagctgaaggacggccagcagcagaacgagaccaagaagaagaagggctggctggaccaggaggaccaggaggcccccctgcagaagggcgacgccaagatcaaggcccaggaggaggccgacaagagaaagaaggagcacgagagaatcatgctgcagaacctgcaggagagactggagagaaagaagagaatcgaggagatcatgaagagaaccagaaagaccgacgtgaacgccagcaaggtgaccgagaccagcagccacgacatctacgaggaggccgaggccgacaacgaggagagcgacaaggacagcctgaacgagatgttccccagcgccatcctgaacggcaccggcagccccaccaagttcaagatgcccttcaacaacgccaagaagatgacccacaagctggtgttcctggaggacggcaccagccaggtgagaaaggagcccaagacctacttcaacggcgacctgaagaacttcagacagaagagcatgaaggacaccagcatccaggaggtggtgagcagacccagcagcaagagaatgaccagccacaccaccaagaccagaaaggccgacgagaccaacaccaccagcagaagcagcgcccagaccaagagcgagggcttccacgacatcctgcccaagagcagcgacaccttcagacagtag

SEQ ID NO: 9892 - DNA, 6291 bp, synthetic construct
  source 1..6291: mol_type = other DNA; note = Synthetic coding sequence
atgtgcagcacccccggcatgcccgcccccggcgccagcctggccctgagagtgagcttcgtggacgtgcaccccgacgtgatccccgtgcagctgtggggcctggtgggcgagagaagaggcgagtacctgagactgagcagagagatccaggaggccgccgccaccagaggccagtgggccctgggcagcgccagcgccagccccggcgagctgtgcctggtgcaggtgggcctgctgtggcacagatgcagagtggtgagcagacaggcccaggagagcagagtgttcctgctggacgagggcagaaccatcaccgccggcgccggcagcctggcccccggcagaagagagttcttcaacctgcccagcgaggtgctgggctgcgtgctggccggcctggtgcccgccggctgcggcgccggcagcggcgagcccccccagcactggcccgccgacgccgtggacttcctgagcaacctgcagggcaaggaggtgcacggctgcgtgctggacgtgctgctgctgcacagactggtgctgctggaggtgcccgacgtgttccagcagatgagagagctgggcctggccagaagagtgcccgacagcctgttcagaagcctgctggagagatacctgaccgccgccaccgccagcgtgggcagcggcgtgcccgtgctgagcagagtgcccctgaagcagaagcagcccggcctggactacttctacccccagctgcagctgggcgtgaccgaggccgtggtgatcacccaggtgtgccacccccacagaatccactgccagctgagaagcgtgagccaggagatccacagactgagcgagagcatggcccaggtgtacagaggcagcaccggcaccggcgacgagaacagcaccagcgccacctgggaggagagagaggagagccccgacaagcccggcagcccctgcgccagctgcggcctggacggccactggtacagagccctgctgctggagaccttcagaccccagagatgcgcccaggtgctgcacgtggactacggcagaaaggagctggtgagctgcagcagcctgagatacctgctgcccgagtacttcagaatgcccgtggtgacctacccctgcgccctgtacggcctgtgggacggcggcagaggctggagcagaagccaggtgggcgacctgaagaccctgatcctgggcaaggccgtgaacgccaagatcgagttctactgcagcttcgagcacgtgtactacgtgagcctgtacggcgaggacggcatcaacctgaacagagtgttcggcgtgcagagctgctgcctggccgacagagtgctgcagagccaggccaccgaggaggaggagcccgagaccagccagagccagagccccgccgaggaggtggacgaggagatcagcctgcccgccctgagaagcatcagactgaagatgaacgccttctacgacgcccaggtggagttcgtgaagaaccccagcgagttctggatcagactgagaaagcacaacgtgaccttcagcaagctgatgagaagaatgtgcggcttctacagcagcgccagcaagctggacggcgtggtgctgaagcccgagcccgacgacctgtgctgcgtgaagtggaaggagaacggctactacagagccatcgtgaccaagctggacgacaagagcgtggacgtgttcctggtggacagaggcaacagcgagaacgtggactggtacgacgtgagaatgctgctgccccagttcagacagctgcccatcctggccgtgaagtgcaccctggccgacatctggcccctgggcaagacctggagccaggaggccgtgagcttcttcaagaagaccgtgctgcacaaggagctggtgatccacatcctggacaagcaggaccaccagtacgtgatcgagatcctggacgagagcagaaccggcgaggagaacatcagcaaggtgatcgcccaggccggctacgccaagtaccaggagttcgagaccaaggagaacatcctggtgaacgcccacagccccggccacgtgagcaaccacttcaccaccgagagcaacaagatccccttcgccaagaccggcgagggcgagcagaaggccaagagagagaacaagaccaccagcgtgagcaaggccctgagcgacaccaccgtggtgaccaacggcagcaccgagctggtggtgcaggagaaggtgaagagagccagcgtgtacttccccctgatgcagaactgcctggagatcaagcccggcagcagcagcaagggcgagctggaggtgggcagcaccgtggaggtgagagtgagctacgtggagaaccccggctacttctggtgccagctgaccagaaacatccagggcctgaagaccctgatgagcgacatccagtactactgcaagaacaccgccgccccccaccagagaaacaccctggcctgcctggccaagagaaccgtgaacagacagtggagcagagccctgatcagcggcatccagagcgtggagcacgtgaacgtgaccttcgtggactacggcgacagagagatggtgagcgtgaagaacatctacagcatcagcgaggagttcctgaaggtgaaggcccaggccttcagatgcagcctgtacaacctgatccagcccgtgggccagaaccccttcgtgtgggacgtgaaggccatccaggccttcaacgagttcatcgacaacgcctggcagaagaacctggagctgaagtgcaccatcttcgccctggccagcatcaacgaggagctgttcaacatcgtggacctgctgacccccttccagagcgcctgccacttcctggtggagaagagactggccagacccgtgaagctgcagaagcccctggagagcagcgtgcagctgcacagctacttctacagcacccacgacatgaagatcggcagcgaggagctggtgtacatcacccacatcgacgacccctggaccttctactgccagctggccagaaacgccaacatcctggagcagctgagctgcagcatcacccagctgagcaaggtgctgctgaacctgaagaccagccccctgaaccccggcaccctgtgcctggccaagtacaccgacggcaactggtacagaggcatcgtgatcgagaaggagcccaagaaggtgttcttcgtggacttcggcaacatctacgtggtgaccagcgacgacctgctgcccatccccagcgacgcctacgacgtgctgctgctgcccatgcaggccgtgagatgcagcctgagcgacatccccgaccacatccccgaggaggtggtggtgtggttccaggagaccatcctggacaagagcctgaaggccctggtggtggccaaggaccccgacggcaccctgatcatcgagctgtacggcgacaacatccagatcagcgccagcatcaacaagaagctgggcctgctgagctacaaggacagaatcagaaagaaggagagcgaggtgctgtgcagcaccaccgagaccctggaggagaagaacgagaacatgaagctgccctgcaccgagtacctgagcaagagcgtgggctacaagctgcccaacaaggagatcctggaggagagctacaagccccagatcaacagcagctacaaggagctgaagctgctgcagagcctgaccaagaccaacctggtgacccagtaccaggacagcgtgggcaacaagaacagccaggtgttccccctgaccaccgagaagaaggaggagatcagcgccgagacccccctgaagaccgccagagtggaggccaccctgagcgagagaaagatcggcgacagctgcgacaaggacctgcccctgaagttctgcgagttcccccagaagaccatcatgcccggcttcaagaccaccgtgtacgtgagccacatcaacgacctgagcgacttctacgtgcagctgatcgaggacgaggccgagatcagccacctgagcgagagactgaacagcgtgaagaccagacccgagtactacgtgggcccccccctgcagagaggcgacatgatctgcgccgtgttccccgaggacaacctgtggtacagagccgtgatcaaggagcagcagcccaacgacctgctgagcgtgcagttcatcgactacggcaacgtgagcgtggtgcacaccaacaagatcggcagactggacctggtgaacgccatcctgcccggcctgtgcatccactgcagcctgcagggcttcgaggtgcccgacaacaagaacagcaagaagatgatgcactacttcagccagagaaccagcgaggccgccatcagatgcgagttcgtgaagttccaggacagatgggaggtgatcctggccgacgagcacggcatcatcgccgacgacatgatcagcagatacgccctgagcgagaagagccaggtggagctgagcacccaggtgatcaagagcgccagcagcaagagcgtgaacaagagcgacatcgacaccagcgtgttcctgaactggtacaaccccgagaagaagatgatcagagcctacgccaccgtgatcgacggccccgagtacttctggtgccagttcgccgacaccgagaagctgcagtgcctggaggtggaggtgcagaccgccggcgagcaggtggccgacagaagaaactgcatcccctgcccctacatcggcgacccctgcatcgtgagatacagagaggacggccactactacagagccctgatcaccaacatctgcgaggactacctggtgagcgtgagactggtggacttcggcaacatcgaggactgcgtggaccccaaggccctgtgggccatccccagcgagctgctgagcgtgcccatgcaggccttcccctgctgcctgagcggcttcaacatcagcgagggcctgtgcagccaggagggcaacgactacttctacgagatcatcaccgaggacgtgctggagatcaccatcctggagatcagaagagacgtgtgcgacatccccctggccatcgtggacctgaagagcaagggcaagagcatcaacgagaagatggagaagtacagcaagaccggcatcaagagcgccctgccctacgagaacatcgacagcgagatcaagcagaccctgggcagctacaacctggacgtgggcctgaagaagctgagcaacaaggccgtgcagaacaagatctacatggagcagcagaccgacgagctggccgagatcaccgagaaggacgtgaacatcatcggcaccaagcccagcaacttcagagaccccaagaccgacaacatctgcgagggcttcgagaacccctgcaaggacaagatcgacaccgaggagctggagggcgagctggagtgccacctggtggacaaggccgagttcgacgacaagtacctgatcaccggcttcaacaccctgctgccccacgccaacgagaccaaggagatcctggagctgaacagcctggaggtgcccctgagccccgacgacgagagcaaggagttcctggagctggagagcatcgagctgcagaacagcctggtggtggacgaggagaagggcgagctgagccccgtgccccccaacgtgcccctgagccaggagtgcgtgaccaagggcgccatggagctgttcaccctgcagctgcccctgagctgcgaggccgagaagcagcccgagctggagctgcccaccgcccagctgcccctggacgacaagatggaccccctgagcctgggcgtgagccagaaggcccaggagagcatgtgcaccgaggacatgagaaagagcagctgcgtggagagcttcgacgaccagagaagaatgagcctgcacctgcacggcgccgactgcgaccccaagacccagaacgagatgaacatctgcgaggaggagttcgtggagtacaagaacagagacgccatcagcgccctgatgcccctgttcagcgaggaggagagcagcgacggcagcaagcacaacaacggcctgcccgaccacatcagcgcccagctgcagaacacctacaccctgaaggccttcaccgtgggcagcaagtgcgtggtgtggagcagcctgagaaacacctggagcaagtgcgagatcctggagaccgccgaggagggcaccagagtgctgaacctgagcaacggcatggaggagatcgtgaaccccgagaacgtgtggaacggcatccccaagctggacaagagcccccccgagaagagaggcctggaggtgatggagatctag

SEQ ID NO: 9893 - DNA, 690 bp, synthetic construct
  source 1..690: mol_type = other DNA; note = Synthetic coding sequence
atgggcaagagctgcaaggtggtggtgtgcggccaggccagcgtgggcaagaccagcatcctggagcagctgctgtacggcaaccacgtggtgggcagcgagatgatcgagacccaggaggacatctacgtgggcagcatcgagaccgacagaggcgtgagagagcaggtgagattctacgacaccagaggcctgagagacggcgccgagctgcccagacactgcttcagctgcaccgacggctacgtgctggtgtacagcaccgacagcagagagagcttccagagagtggagctgctgaagaaggagatcgacaagagcaaggacaagaaggagggcctgaccctgccccccagactggagtgcagcggcatgatcaccgcccactgcagcctgaacctgcccagactgagatggagcagctgcctgagccccctgctgagactgcaggtgaccatcgtggtgctgggcaacaagtgcgacctgcaggagcagagaagagtggaccccgacgtggcccagcactgggccaagagcgagaaggtgaagctgtgggaggtgagcgtggccgacagaagaagcctgctggagcccttcgtgtacctggccagcaagatgacccagccccagagcaagagcgccttccccctgagcagaaagaacaagggcagcggcagcctggacggctag

SEQ ID NO: 9894 - DNA, 2412 bp, synthetic construct
  source 1..2412: mol_type = other DNA; note = Synthetic coding sequence
atggagagcggccccagagccgagctgggcgccggcgccccccccgccgtggtggccagaaccccccccgagcccagacccagccccgagggcgaccccagccccccccccccccccatgagcgccctggtgcccgacaccccccccgacaccccccccgccatgaagaacgccaccagcagcaagcagctgcccctggagcccgagagccccagcggccaggtgggccccagacccgcccccccccaggaggagagccccagcagcgaggccaagagcagaggccccaccccccccgccatgggccccagagacgccagaccccccagaagaagcagccagcccagccccaccgccgtgcccgccagcgacagcccccccaccaagcaggaggtgaagaaggccggcgagagacacaagctggccaaggagagaagagaggagagagccaagtacctggccgccaagaaggccgtgtggctggagaaggaggagaaggccaaggccctgagagagaagcagctgcaggagagaagaagaagactggaggagcagagactgaaggccgagcagagaagagccgccctggaggagagacagagacagaagctggagaagaacaaggagagatacgaggccgccatccagagaagcgtgaagaagacctgggccgagatcagacagcagagatggagctgggccggcgccctgcaccacagcagccccggccacaagaccaacagaagcctgcagctgagcgcctgggagagcagcatcgtggacagactgatgacccccaccctgagcttcctggccagaagcagaagcgccgtgaccctgcccagaaacggcagagaccagggcagaggctgcgaccccggcagaggccccacctggggcagagccggcgccagcctggccagaggcccccagcccgacagaacccaccccagcgccgccgtgcccgtgtgccccagaagcgccagcgccagccccctgaccccctgcagcgtgaccagaagcgtgcacagatgcgcccccgccggcgagagaggcgagagaagaaagcccaacgccggcggcagccccgcccccgtgagaagaagacccgaggccagccccgtgcagaagaaggagaagaaggacaaggagagagagaacgagaaggagaagagcgccctggccagagagagaagcctgaagaagagacagagcctgcccgccagccccagagccagactgagcgccagcaccgccagcgagctgagccccaagagcaaggccagacccagcagccccagcaccagctggcacagacccgccagcccctgccccagccccggccccggccacaccctgccccccaagccccccagccccagaggcaccaccgccagccccaagggcagagtgagaagaaaggaggaggccaaggagagccccagcgccgccggccccgaggacaagagccagagcaagagaagagccagcaacgagaaggagagcgccgcccccgccagccccgcccccagccccgcccccagccccacccccgcccccccccagaaggagcagccccccgccgagacccccaccgacgccgccgtgctgaccagcccccccgcccccgccccccccgtgacccccagcaagcccatggccggcaccaccgacagagaggaggccaccagactgctggccgagaagagaagacaggccagagagcagagagagagagaggagcaggagagaagactgcaggccgagagagacaagagaatgagagaggagcagctggccagagaggccgaggccagagccgagagagaggccgaggccagaagaagagaggagcaggaggccagagagaaggcccaggccgagcaggaggagcaggagagactgcagaagcagaaggaggaggccgaggccagaagcagagaggaggccgagagacagagactggagagagagaagcacttccagcagcaggagcaggagagacaggagagaagaaagagactggaggagatcatgaagagaaccagaaagagcgaggtgagcgagaccaagaagcaggacagcaaggaggccaacgccaacggcagcagccccgagcccgtgaaggccgtggaggccagaagccccggcctgcagaaggaggccgtgcagaaggaggagcccatcccccaggagccccagtggagcctgcccagcaaggagctgcccgccagcctggtgaacggcctgcagcccctgcccgcccaccaggagaacggcttcagcaccaacggccccagcggcgacaagagcctgagcagaacccccgagaccctgctgcccttcgccgaggccgaggccttcctgaagaaggccgtggtgcagagcccccaggtgaccgaggtgctgtag

SEQ ID NO: 9895 - DNA, 1125 bp, synthetic construct
  source 1..1125: mol_type = other DNA; note = Synthetic coding sequence
atgagagcccccatgctgcagaagcagcaggcccccagaatggacacccccccccccgaggagagactggagaagcagaacgagaagctgaacaaccaggaggaggagaccgagttcaaggagctggacggcctgagagaggccctggccaacctgagaggcctgagcgaggaggagagaagcgagaaggccatgctgagaagcagaatcgaggagcagagccagctgatctgcatcctgaagagaagaagcgacgaggccctggagagatgccagatcctggagctgctgaacgccgagctggaggagaagatgatgcaggaggccgagaagctgaaggcccagggcgagtacagcagaaagctggaggagagattcatgaccctggccgccaaccacgagctgatgctgagattcaaggacgagtacaagagcgagaacatcaagctgagagaggagaacgagaagctgagactggagaacagcagcctgttcagccaggccctgaaggacgaggaggccaaggtgctgcagctgaccgtgagatgcgaggccctgaccggcgagctggagaccctgaaggagagatgcgcccaggacgcctgccaggcccaggccagagagaaggagctgctggagctgcagagccagcaggcctgcacccacaccaaggagaccgagcagctgagaagccagctgcagaccctgaagcagcagcaccagcaggccgtggagcagatcgccaaggccgaggagacccacagcagcctgagccaggagctgcaggccagactgcagaccgtgaccagagagaaggaggagctgctgcagctgagcatcgagagaggcaaggtgctgcagaacaagcaggccgagatctgccagctggaggagaagctggagatcgccaacgaggacagaaagcacgccctggagagattcgagcaggaggccgtggccgtggacagcaacctgagagtgagagagctgcagagaaaggtggacggcatccagaaggcctacgacgagctgagactgcagagcgaggccttcaagaagcacagcctggacctgctgagcaaggagagagagctgaacggcaagctgagacacctgagcccctag

SEQ ID NO: 9896 - DNA, 585 bp, synthetic construct
  source 1..585: mol_type = other DNA; note = Synthetic coding sequence
atggaggacggcctgctggagatcatgaccaaggacggcggcgacatgcccgcccccctggaggtgagcaccgtgcccgccgtgggcgacgtgatcagcggcgagtacaacggcggcatgaaggagctgatggagcacctgaaggcccagctgcaggccctgttcgaggacgtgagagccatgagaggcgccctggacgagcaggccagccacatccaggtgctgagcgacgacgtgtgcgccaaccagagagccatcgtgagcatgtgccagatcatgaccaccgcccccagacagggcggcctgggcgtggtgggcggcaagggcagcttccagagcgacccccaggagcccgagacccccagccccggcatcggcgacagcggcctgctgggcagagaccccgaggacgaggaggaggaggaggaggagaaggagatgcccagccccgccacccccagcagccactgcgagagacccgagagcccctgcgccggcctgctgggcggcgacggccccctggtggagcccctggacatgcccgacatcaccctgctgcagctggagggcgaggccagcctgtag

SEQ ID NO: 9897 - DNA, 1281 bp, synthetic construct
  source 1..1281: mol_type = other DNA; note = Synthetic coding sequence
atggcccacctgagaggcttcgccaaccagcacagcagagtggaccccgaggagctgttcaccaagctggacagaatcggcaagggcagcttcggcgaggtgtacaagggcatcgacaaccacaccaaggaggtggtggccatcaagatcatcgacctggaggaggccgaggacgagatcgaggacatccagcaggagatcaccgtgctgagccagtgcgacagcccctacatcaccagatacttcggcagctacctgaagagcaccaagctgtggatcatcatggagtacctgggcggcggcagcgccctggacctgctgaagcccggccccctggaggagacctacatcgccaccatcctgagagagatcctgaagggcctggactacctgcacagcgagagaaagatccacagagacatcaaggccgccaacgtgctgctgagcgagcagggcgacgtgaagctggccgacttcggcgtggccggccagctgaccgacacccagatcaagagaaacaccttcgtgggcacccccttctggatggcccccgaggtgatcaagcagagcgcctacgacttcaaggccgacatctggagcctgggcatcaccgccatcgagctggccaagggcgagccccccaacagcgacctgcaccccatgagagtgctgttcctgatccccaagaacagcccccccaccctggagggccagcacagcaagcccttcaaggagttcgtggaggcctgcctgaacaaggaccccagattcagacccaccgccaaggagctgctgaagcacaagttcatcaccagatacaccaagaagaccagcttcctgaccgagctgatcgacagatacaagagatggaagagcgagggccacggcgaggagagcagcagcgaggacagcgacatcgacggcgaggccgaggacggcgagcagggccccatctggaccttcccccccaccatcagacccagcccccacagcaagctgcacaagggcaccgccctgcacagcagccagaagcccgccgagcccgtgaagagacagcccagaagccagtgcctgagcaccctggtgagacccgtgttcggcgagctgaaggagaagcacaagcagagcggcggcagcgtgggcgccctggaggagctggagaacgccttcagcctggccgaggagagctgccccggcatcagcgacaagctgatggtgcacctggtggagagagtgcagagattcagccacaacagaaaccacctgaccagcaccagatag

SEQ ID NO: 9898 - DNA, 1350 bp, synthetic construct
  source 1..1350: mol_type = other DNA; note = Synthetic coding sequence
atgatgctgagcaccgagggcagagagggcttcgtggtgaaggtgagaggcctgccctggagctgcagcgccgacgaggtgatgagattcttcagcgactgcaagatccagaacggcaccagcggcatcagattcatctacaccagagagggcagacccagcggcgaggccttcgtggagctggagagcgaggaggaggtgaagctggccctgaagaaggacagagagaccatgggccacagatacgtggaggtgttcaagagcaacagcgtggagatggactgggtgctgaagcacaccggccccaacagccccgacaccgccaacgacggcttcgtgagactgagaggcctgcccttcggctgcagcaaggaggagatcgtgcagttcttcagcggcctggagatcgtgcccaacggcatgaccctgcccgtggacttccagggcagaagcaccggcgaggccttcgtgcagttcgccagccaggagatcgccgagaaggccctgaagaagcacaaggagagaatcggccacagatacatcgagatcttcaagagcagcagagccgaggtgagaacccactacgacccccccagaaagctgatggccatgcagagacccggcccctacgacagacccggcgccggcagaggctacaacagcatcggcagaggcgccggcttcgagagaatgagaagaggcgcctacggcggcggctacggcggctacgacgactacggcggctacaacgacggctacggcttcggcagcgacagattcggcagagacctgaactactgcttcagcggcatgagcgaccacagatacggcgacggcggcagcagcttccagagcaccaccggccactgcgtgcacatgagaggcctgccctacagagccaccgagaacgacatctacaacttcttcagccccctgaaccccatgagagtgcacatcgagatcggccccgacggcagagtgaccggcgaggccgacgtggagttcgccacccacgaggacgccgtggccgccatggccaaggacaaggccaacatgcagcacagatacgtggagctgttcctgaacagcaccgccggcaccagcggcggcgcctacgaccacagctacgtggagctgttcctgaacagcaccgccggcgccagcggcggcgcctacggcagccagatgatgggcggcatgggcctgagcaaccagagcagctacggcggccccgccagccagcagctgagcggcggctacggcggcggctacggcggccagagcagcatgagcggctacgaccaggtgctgcaggagaacagcagcgactaccagagcaacctggcctag

SEQ ID NO: 9899 - DNA, 1317 bp, synthetic construct
  source 1..1317: mol_type = other DNA; note = Synthetic coding sequence
atgtgccccaagaacgccagctactacggcaacagagccgccaccctgatgatgctgggcagattcagagaggccctgggcgacgcccagcagagcgtgagactggacgacagcttcgtgagaggccacctgagagagggcaagtgccacctgagcctgggcaacgccatggccgcctgcagaagcttccagagagccctggagctggaccacaagaacgcccaggcccagcaggagttcaagaacgccaacgccgtgatggagtacgagaagatcgccgagaccgacttcgagaagagagacttcagaaaggtggtgttctgcatggacagagccctggagttcgcccccgcctgccacagattcaagatcctgaaggccgagtgcctggccatgctgggcagataccccgaggcccagagcgtggccagcgacatcctgagaatggacagcaccaacgccgacgccctgtacgtgagaggcctgtgcctgtactacgaggactgcatcgagaaggccgtgcagttcttcgtgcaggccctgagaatggcccccgaccacgagaaggcctgcatcgcctgcagaaacgccaaggccctgaaggccaagaaggaggacggcaacaaggccttcaaggagggcaactacaagctggcctacgagctgtacaccgaggccctgggcatcgaccccaacaacatcaagaccaacgccaagctgtactgcaacagaggcaccgtgaacagcaagctgagaaagctggacgacgccatcgaggactgcaccaacgccgtgaagctggacgacacctacatcaaggcctacctgagaagagcccagtgctacatggacaccgagcagtacgaggaggccgtgagagactacgagaaggtgtaccagaccgagaagaccaaggagcacaagcagctgctgaagaacgcccagctggagctgaagaagagcaagagaaaggactactacaagatcctgggcgtggacaagaacgccagcgaggacgagatcaagaaggcctacagaaagagagccctgatgcaccaccccgacagacacagcggcgccagcgccgaggtgcagaaggaggaggagaagaagttcaaggaggtgggcgaggccttcaccatcctgagcgaccccaagaagaagaccagatacgacagcggccaggacctggacgaggagggcatgaacatgggcgacttcgaccccaacaacatcttcaaggccttcttcggcggccccggcggcttcagcttcgaggccagcggccccggcaacttcttcttccagttcggctag

SEQ ID NO: 9900 - DNA, 165 bp, synthetic construct
  source 1..165: mol_type = other DNA; note = Synthetic coding sequence
atgcccggcaagaaggccagaaagaacgcccagcccagccccgccagagcccccgccgagctggaggtggagtgcgccacccagctgagaagattcggcgacaagctgaacttcagacagaagctgctgaacctgatcagcaagctgttctgcagcggcacctag

SEQ ID NO: 9901 - DNA, 1404 bp, synthetic construct
  source 1..1404: mol_type = other DNA; note = Synthetic coding sequence
atggccagcgtggccgccgccagagccgtgcccgtgggcagcggcctgagaggcctgcagagaaccctgcccctggtggtgatcctgggcgccaccggcaccggcaagagcaccctggccctgcagctgggccagagactgggcggcgagatcgtgagcgccgacagcatgcaggtgtacgagggcctggacatcatcaccaacaaggtgagcgcccaggagcagagaatctgcagacaccacatgatcagcttcgtggaccccctggtgaccaactacaccgtggtggacttcagaaacagagccaccgccctgatcgaggacatcttcgccagagacaagatccccatcgtggtgggcggcaccaactactacatcgagagcctgctgtggaaggtgctggtgaacaccaagccccaggagatgggcaccgagaaggtgatcgacagaaaggtggagctggagaaggaggacggcctggtgctgcacaagagactgagccaggtggaccccgagatggccgccaagctgcacccccacgacaagagaaaggtggccagaagcctgcaggtgttcgaggagaccggcatcagccacagcgagttcctgcacagacagcacaccgaggagggcggcggccccctgggcggccccctgaagttcagcaacccctgcatcctgtggctgcacgccgaccaggccgtgctggacgagagactggacaagagagtggacgacatgctggccgccggcctgctggaggagctgagagacttccacagaagatacaaccagaagaacgtgagcgagaacagccaggactaccagcacggcatcttccagagcatcggcttcaaggagttccacgagtacctgatcaccgagggcaagtgcaccctggagaccagcaaccagctgctgaagaagggcatcgaggccctgaagcaggtgaccaagagatacgccagaaagcagaacagatgggtgaagaacagattcctgagcagacccggccccatcgtgccccccgtgtacggcctggaggtgagcgacgtgagcaagtgggaggagagcgtgctggagcccgccctggagatcgtgcagagcttcatccagggccacaagcccaccgccacccccatcaagatgccctacaacgaggccgagaacaagagaagctaccacctgtgcgacctgtgcgacagaatcatcatcggcgacagagagtgggccgcccacatcaagagcaagagccacctgaaccagctgaagaagagaagaagactggacagcgacgccgtgaacaccatcgagagccagagcgtgagccccgaccacaacaaggagcccaaggagaagggcagccccggccagaacgaccaggagctgaagtgcagcgtgtag

SEQ ID NO: 9902 - DNA, 558 bp, synthetic construct
  source 1..558: mol_type = other DNA; note = Synthetic coding sequence
atgggcgtgaacctgaccagaagcaacaaggagaccgtgaagcacagcgacgtgctgttcctggccgtgaagccccacatcatccccttcatcctggacgagatcggcgccgacgtgcaggccagacacatcgtggtgagctgcgccgccggcgtgaccatcagcagcgtggagaagaagctgatggccttccagcccgcccccaaggtgatcagatgcatgaccaacacccccgtggtggtgcaggagggcgccaccgtgtacgccaccggcacccacgccctggtggaggacggccagctgctggagcagctgatgagcagcgtgggcttctgcaccgaggtggaggaggacctgatcgacgccgtgaccggcctgagcggcagcggccccgcctaccagagcatggccgaccaggagaagatcagccccgccgccctgaagaagaccctgctggacagagtgaagctggagagccccaccgtgagcaccctgacccccagcagccccggcaagctgctgaccagaagcctggccctgggcggcaagaaggactag

SEQ ID NO: 9903 - DNA, 960 bp, synthetic construct
  source 1..960: mol_type = other DNA; note = Synthetic coding sequence
atgagcgtgggcttcatcggcgccggccagctggccatgctgtggagaggcgccagcagaccccagcaccccgtgggcagccaggacaacagccagctgcccagaaacgagcccgcccacggcgtgagagcccaggaggacggctgcgagcccgacacccagcagcagggcgacggcgaggcccagagaagacccgtgagcggctgcgaggcccacatcatccccttcatcctggacgagatcggcgccgacgtgcaggccagacacatcgtggtgagctgcgccgccggcgtgaccatcagcagcgtggagaagaagctgatggccttccagcccgcccccaaggtgatcagatgcatgaccaacacccccgtggtggtgcaggagggcgccaccgtgtacgccaccggcacccacgccctggtggaggacggccagctgctggagcagctgatgagcagcgtgggcttctgcaccgaggtggaggaggacctgatcgacgccgtgaccggcctgagcggcagcggccccgcctacgccttcatggccctggacgccctggccgacggcggcgtgaagatgggcctgcccagaagactggccatccagctgggcgcccaggccctgctgggcgccgccaagatgctgctggacagcgagcagcacccctgccagctgaaggacaacgtgtgcagccccggcggcgccaccatccacgccctgcacttcctggagagcggcggcttcagaagcctgctgatcaacgccgtggaggccagctgcatcagaaccagagagctgcagagcatggccgaccaggagaagatcagccccgccgccctgaagaagaccctgctggacagagtgaagctggagagccccaccgtgagcaccctgacccccagcagccccggcaagctgctgaccagaagcctggccctgggcggcaagaaggactag

SEQ ID NO: 9904 - DNA, 708 bp, synthetic construct
  source 1..708: mol_type = other DNA; note = Synthetic coding sequence
atgctgagcgccaccagaagagcctgccagctgctgctgctgcacagcctgttccccgtgcccagaatgggcaacagcgccagcaacatcgtgagcccccaggaggccctgcccggcagaaaggagcagacccccgtggccgccaagcaccacgtgaacggcaacagaaccgtggagcccttccccgagggcacccagatggccgtgttcggcatgggctgcttctggggcgccgagagaaagttctgggtgctgaagggcgtgtacagcacccaggtgggcttcgccggcggctacaccagcaaccccacctacaaggaggtgtgcagcgagaagaccggccacgccgaggtggtgagagtggtgtaccagcccgagcacatgagcttcgaggagctgctgaaggtgttctgggagaaccacgaccccacccagggcatgagacagggcaacgaccacggcacccagtacagaagcgccatctaccccaccagcgccaagcagatggaggccgccctgagcagcaaggagaactaccagaaggtgctgagcgagcacggcttcggccccatcaccaccgacatcagagagggccagaccttctactacgccgaggactaccaccagcagtacctgagcaagaaccccaacggctactgcggcctgggcggcaccggcgtgagctgccccgtgggcatcaagaagtag

SEQ ID NO: 9905 - DNA, 3873 bp, synthetic construct
  source 1..3873: mol_type = other DNA; note = Synthetic coding sequence
atgagcggccccctggagggcgccgacggcggcggcgaccccagacccggcgagagcttctgccccggcggcgtgcccagccccggccccccccagcacagaccctgccccggccccagcctggccgacgacaccgacgccaacagcaacggcagcagcggcaacgagagcaacggccacgagagcagaggcgccagccagagaagcagccacagcagcagcagcggcaacggcaaggacagcgccctgctggagaccaccgagagcagcaagagcaccaacagccagagccccagcccccccagcagcagcatcgcctacagcctgctgagcgccagcagcgagcaggacaaccccagcaccagcggctgcagcagcgagcagagcgccagagccagaacccagaaggagctgatgaccgccctgagagagctgaagctgagactgccccccgagagaagaggcaagggcagaagcggcaccctggccaccctgcagtacgccctggcctgcgtgaagcaggtgcaggccaaccaggagtactaccagcagtggagcctggaggagggcgagccctgcagcatggacatgagcacctacaccctggaggagctggagcacatcaccagcgagtacaccctgcagaaccaggacaccttcagcgtggccgtgagcttcctgaccggcagaatcgtgtacatcagcgagcaggccgccgtgctgctgagatgcaagagagacgtgttcagaggcaccagattcagcgagctgctggccccccaggacgtgggcgtgttctacggcagcaccgcccccagcagactgcccacctggggcaccggcgccagcgccggcagcggcctgagagacttcacccaggagaagagcgtgttctgcagaatcagaggcggccccgacagagaccccggccccagataccagcccttcagactgaccccctacgtgaccaagatcagagtgagcgacggcgcccccgcccagccctgctgcctgctgatcgccgagagaatccacagcggctacgaggcccccagaatcccccccgacaagagaatcttcaccaccagacacacccccagctgcctgttccaggacgtggacgagagagccgcccccctgctgggctacctgccccaggacctgctgggcgcccccgtgctgctgttcctgcaccccgaggacagacccctgatgctggccatccacaagaagatcctgcagctggccggccagcccttcgaccacagccccatcagattctgcgccagaaacggcgagtacgtgaccatggacaccagctgggccggcttcgtgcacccctggagcagaaaggtggccttcgtgctgggcagacacaaggtgagaaccgcccccctgaacgaggacgtgttcaccccccccgcccccagccccgcccccagcctggacaccgacatccaggagctgagcgagcagatccacagactgctgctgcagcccgtgcacagccccagccccaccggcctgtgcggcgtgggcgccgtgaccagccccggccccctgcacagccccggcagcagcagcgacagcaacggcggcgacgccgagggccccggcccccccgcccccgtgaccttccagcagatctgcaaggacgtgcacctggtgaagcaccagggccagcagctgttcatcgagagcagagccagaccccagagcagacccagactgcccgccaccggcaccttcaaggccaaggccctgccctgccagagccccgaccccgagctggaggccggcagcgcccccgtgcaggcccccctggccctggtgcccgaggaggccgagagaaaggaggccagcagctgcagctaccagcagatcaactgcctggacagcatcctgagatacctggagagctgcaacctgcccagcaccaccaagagaaagtgcgccagcagcagcagctacaccaccagcagcgccagcgacgacgacagacagagaaccggccccgtgagcgtgggcaccaagaaggacccccccagcgccgccctgagcggcgagggcgccacccccagaaaggagcccgtggtgggcggcaccctgagccccctggccctggccaacaaggccgagagcgtggtgagcgtgaccagccagtgcagcttcagcagcaccatcgtgcacgtgggcgacaagaagccccccgagagcgacatcatcatgatggaggacctgcccggcctggcccccggccccgcccccagccccgcccccagccccaccgtggcccccgaccccgcccccgacgcctacagacccgtgggcctgaccaaggccgtgctgagcctgcacacccagaaggaggagcaggccttcctgagcagattcagagacctgggcagactgagaggcctggacagcagcagcaccgcccccagcgccctgggcgagagaggctgccaccacggccccgccccccccagcagaagacaccactgcagaagcaaggccaagagaagcagacaccaccagaaccccagagccgaggccccctgctacgtgagccaccccagccccgtgccccccagcaccccctggcccaccccccccgccaccacccccttccccgccgtggtgcagccctaccccctgcccgtgttcagccccagaggcggcccccagcccctgccccccgcccccaccagcgtgccccccgccgccttccccgcccccctggtgacccccatggtggccctggtgctgcccaactacctgttccccacccccagcagctacccctacggcgccctgcagacccccgccgagggcccccccacccccgccagccacagccccagccccagcctgcccgccctggcccccagccccccccacagacccgacagccccctgttcaacagcagatgcagcagccccctgcagctgaacctgctgcagctggaggagctgcccagagccgagggcgccgccgtggccggcggccccggcagcagcgccggcccccccccccccagcgccgaggccgccgagcccgaggccagactggccgaggtgaccgagagcagcaaccaggacgccctgagcggcagcagcgacctgctggagctgctgctgcaggaggacagcagaagcggcaccggcagcgccgccagcggcagcctgggcagcggcctgggcagcggcagcggcagcggcagccacgagggcggcagcaccagcgccagcatcaccagaagcagccagagcagccacaccagcaagtacttcggcagcatcgacagcagcgaggccgaggccggcgccgccagaggcggcgccgagcccggcgaccaggtgatcaagtacgtgctgcaggaccccatctggctgctgatggccaacgccgaccagagagtgatgatgacctaccaggtgcccagcagagacatgaccagcgtgctgaagcaggacagagagagactgagagccatgcagaagcagcagcccagattcagcgaggaccagagaagagagctgggcgccgtgcacagctgggtgagaaagggccagctgcccagagccctggacgtgatggcctgcgtggactgcggcagcagcacccaggaccccggccaccccgacgaccccctgttcagcgagctggacggcctgggcctggagcccatggaggagggcggcggcgagcagggcagcagcggcggcggcagcggcgagggcgagggctgcgaggaggcccagggcggcgccaaggccagcagcagccaggacctggccatggaggaggaggaggagggcagaagcagcagcagccccgccctgcccaccgccggcaactgcaccagctag

SEQ ID NO: 9906 - DNA, 2022 bp, synthetic construct
  source 1..2022: mol_type = other DNA; note = Synthetic coding sequence
atggagaaggccgtgaacgacggcagccacagcgaggagctgttctgccacctgaagaccatcagcgagaaggaggacctgcccagatgcaccagcgagagccacctgagctgcctgaagcaggacatcctgaacgagaagaccgagctggaggccaccctgaaggaggccgagctggtgacccacagcgtggagctgctgctgcccctgttcaaggacaccatcgagaagatcaacttcgagaacgccaacctgagcgccctgaacctgaagatcagcgagcagaaggagatcctgatcaaggagctggacaccttcaagagcgtgaagctggccctggagcacctgctgagaaagagagactacaagcagaccggcgacaacctgagcagcatgctgctggagaacctgaccgacaacgagagcgagaacaccaacctgaagaagaaggtgttcgagaaggaggcccacatccaggagctgagctgcctgttccagagcgagaaggccaacaccctgaaggccaacagattcagccagagcgtgaaggtggtgcacgagagactgcagatccagatccacaagagagaggccgagaacgacaagctgaaggagtacgtgaagagcctggagaccaagatcgccaagtggaacctgcagagcagaatgaacaagaacgaggccatcgtgatgaaggaggccagcagacagaagaccgtggccctgaagaaggccagcaaggtgtacaagcagagactggaccacttcaccggcgccatcgagaagctgaccagccagatcagagaccaggaggccaagctgagcgagaccatcagcgccagcaacgcctggaagagccactacgagaagatcgtgatcgagaagaccgagctggaggtgcagatcgagaccatgaagaagcagatcatcaacctgctggaggacctgaagaagatggaggaccacggcaagaacagctgcgaggagatcctgagaaaggtgcacagcatcgagtacgagaacgagaccctgaacctggagaacaccaagctgaagctgagattcccctgcagaatcaccgagagcaagaacatgaacatcctgatcgtgctggacatgctgtgctacatcagcagcgagaagaccaccctggccgccctgaaggacgaggtggtgagcgtggagaacgagctgagcgagctgcaggaggtggagaagaagcagaagaccctgatcgagatgtacaagacccaggtgcagaagctgcaggaggccgccgagatcgtgaagagcagatgcgagaacctgctgcacaagaacaaccagatcaccaagaccaagaacaagaacgtggagaagatgagaggccagatggagagccacctgaaggagctggagagagtgtgcgacagcctgaccgccgccgagagaagactgcacgagtgccaggagagcctgcagtgctgcaagggcaagtgcgccgaccaggagcacaccatcagagagctgcagggccaggtggacggcaaccacaacctgctgaccaagctgagcctggaggaggagaactgcctgatccagctgaagtgcgagaacctgcagcagaagctggagcagatggacgccgagaacaaggagctggagaagaagctggccaaccaggaggagtgcctgaagcacagcaacctgaagttcaaggagaagagcgccgagtacaccgccctggccagacagctggaggccgccctggaggagggcagacagaaggtggccgaggagatcgagaagatgagcagcagagagagcgccctgcagatcaagatcctggacctggagaccgagctgagaaagaagaacgaggagcagaaccagctggtgtgcaagatgaacagcaaggcccagcaccaggaggtgtgcctgaaggaggtgcagaacagcctggagaagagcgagaaccagaacgagagcatcaagaactacctgcagttcctgaagaccagctacgtgaccatgttcgagtag

SEQ ID NO: 9907 - DNA, 798 bp, synthetic construct
  source 1..798: mol_type = other DNA; note = Synthetic coding sequence
atggacgacaaggccagcgtgggcaagatcagcgtgagcagcgacagcgtgagcaccctgaacagcgaggacttcgtgctggtgagcagacagggcgacgagacccccagcaccaacaacggcagcgacgacgagaagaccggcctgaagatcgtgggcaacggcagcgagcagcagctgcagaaggagctggccgacgtgctgatggacccccccatggacgaccagcccggcgagaaggagctggtgaagagaagccagctggacggcgagggcgacggccccctgagcaaccagctgagcgccagcagcaccatcaaccccgtgcccctggtgggcctgcagaagcccgagatgagcctgcccgtgaagcccggccagggcgacagcgaggccagcagccccttcacccccgtggccgacgaggacagcgtggtgttcagcaagctgacctacctgggctgcgccagcgtgaacgcccccagaagcgaggtggaggccctgagaatgatgagcatcctgagaagccagtgccagatcagcctggacgtgaccctgagcgtgcccaacgtgagcgagggcatcgtgagactgctggacccccagaccaacaccgagatcgccaactaccccatctacaagatcctgttctgcgtgagaggccacgacggcacccccgagagcgactgcttcgccttcaccgagagccactacaacgccgagctgttcagaatccacgtgttcagatgcgagatccaggaggccgtgagcccccaggagaagaccctgtgcaagtag

SEQ ID NO: 9908 - DNA, 636 bp, synthetic construct
  source 1..636: mol_type = other DNA; note = Synthetic coding sequence
atgtgggccagcctgagcctggaccaccccagcgccaaggagaaccaggccctgagactgatcgagatgagagaggagaacggcaacgtgcccaagaccgagcaggccggcagcctgaagcccctgagagacaccggcaagagcaacctgaaggagaagaaggccaacagcaagctgaagcagatcgagaaggagtacacccagaagctggccaagagcagccagatcatcgccgagctgcagaccaccatcagcagcctgaaggaggagaacagccagcagcagctggccgccgagagaagactgcaggacgtgagacagaagttcgaggacgagaagaagcagctgatcagagacaacgaccaggccatcaaggtgctgcaggacgagctggagaacagaagcaaccaggtgagatgcgccgagaagaagctgcagcacaaggagctggagagccaggagcagatcacctacatcagacaggagtacgagaccaagctgaagggcctgatgcccgccagcctgagacaggagctggaggacaccatcagcagcctgaagagccaggtgaacttcctgcagaagagagccagcatcctgcaggaggagctgaccacctaccagggcagaagatag

SEQ ID NO: 9909 - DNA, 867 bp, synthetic construct
  source 1..867: mol_type = other DNA; note = Synthetic coding sequence
atgagcagcagcatgtggtacatcatgcagagcatccagagcaagtacagcctgagcgagagactgatcagaaccatcgccgccatcagaagcttcccccacgacaacgtggaggacctgatcagaggcggcgccgacgtgaactgcacccacggcaccctgaagcccctgcactgcgcctgcatggtgagcgacgccgactgcgtggagctgctgctggagaagggcgccgaggtgaacgccctggacggctacaacagaaccgccctgcactacgccgccgagaaggacgaggcctgcgtggaggtgctgctggagtacggcgccaaccccaacgccctggacggcaacagagacacccccctgcactgggccgccttcaagaacaacgccgagtgcgtgagagccctgctggagagcggcgccagcgtgaacgccctggactacaacaacgacacccccctgagctgggccgccatgaagggcaacctggagagcgtgagcatcctgctggactacggcgccgaggtgagagtgatcaacctgatcggccagacccccatcagcagactggtggccctgctggtgagaggcctgggcaccgagaaggaggacagctgcttcgagctgctgcacagagccgtgggccacttcgagctgagaaagaacggcaccatgcccagagaggtggccagagacccccagctgtgcgagaagctgaccgtgctgtgcagcgcccccggcaccctgaagaccctggccagatacgccgtgagaagaagcctgggcctgcagtacctgcccgacgccgtgaagggcctgcccctgcccgccagcctgaaggagtacctgctgctgctggagtag

SEQ ID NO: 9910 - DNA, 1341 bp, synthetic construct
  source 1..1341: mol_type = other DNA; note = Synthetic coding sequence
atgagagagatcgtgcacatccaggccggccagtgcggcaaccagatcggcaccaagttctgggaggtgatcagcgacgagcacggcatcgaccccgccggcggctacgtgggcgacagcgccctgcagctggagagaatcaacgtgtactacaacgagagcagcagccagaagtacgtgcccagagccgccctggtggacctggagcccggcaccatggacagcgtgagaagcggccccttcggccagctgttcagacccgacaacttcatcttcggccagaccggcgccggcaacaactgggccaagggccactacaccgagggcgccgagctggtggacgccgtgctggacgtggtgagaaaggagtgcgagcactgcgactgcctgcagggcttccagctgacccacagcctgggcggcggcaccggcagcggcatgggcaccctgctgatcagcaagatcagagaggagttccccgacagaatcatgaacaccttcagcgtgatgcccagccccaaggtgagcgacaccgtggtggagccctacaacgccaccctgagcgtgcaccagctggtggagaacaccgacgagacctactgcatcgacaacgaggccctgtacgacatctgcttcagaaccctgaagctgaccacccccacctacggcgacctgaaccacctggtgagcgccaccatgagcggcgtgaccaccagcctgagattccccggccagctgaacgccgacctgagaaagctggccgtgaacatggtgcccttccccagactgcacttcttcatgcccggcttcgcccccctgaccagcagaggcagccagcagtacagagccctgaccgtgcccgagctgacccagcagatgttcgacgccagaaacatgatggccgcctgcgaccccagacacggcagatacctgaccgtggccaccgtgttcagaggccccatgagcatgaaggaggtggacgagcagatgctggccatccagagcaagaacagcagctacttcgtggagtggatccccaacaacgtgaaggtggccgtgtgcgacatcccccccagaggcctgaagatggccagcaccttcatcggcaacagcaccgccatccaggagctgttcaagagaatcagcgagcagttcagcgccatgttcagaagaaaggccttcctgcactggttcaccggcgagggcatggacgagatggagttcaccgaggccgagagcaacatgaacgacctggtgagcgagtaccagcagtaccaggacgccaccgccaacgacggcgaggaggccttcgaggacgaggaggaggagatcgacggctag

SEQ ID NO: 9911 - DNA, 792 bp, synthetic construct
  source 1..792: mol_type = other DNA; note = Synthetic coding sequence
atgctgagcagcaagggcctgaccgtggtggacgtgtaccagggctggtgcggcccctgcaagcccgtggtgagcctgttccagaagatgagaatcgaggtgggcctggacctgctgcacttcgccctggccgaggccgacagactggacgtgctggagaagtacagaggcaagtgcgagcccaccttcctgttctacgccatcaaggacgaggccctgagcgacgaggacgagtgcgtgagccacggcaagaacaacggcgaggacgaggacatggtgagcagcgagagaacctgcaccctggccatcatcaagcccgacgccgtggcccacggcaagaccgacgagatcatcatgaagatccaggaggccggcttcgagatcctgaccaacgaggagagaaccatgaccgaggccgaggtgagactgttctaccagcacaaggccggcgaggaggccttcgagaagctggtgcaccacatgtgcagcggccccagccacctgctgatcctgaccagaaccgagggcttcgaggacgtggtgaccacctggagaaccgtgatgggccccagagaccccaacgtggccagaagagagcagcccgagagcctgagagcccagtacggcaccgagatgcccttcaacgccgtgcacggcagcagagacagagaggacgccgacagagagctggccctgctgttccccagcctgaagttcagcgacaaggacaccgaggccccccagggcgagagcagcacccagcccagactgaagatcaccgacctggactag

SEQ ID NO: 9912 - DNA, 1089 bp, synthetic construct
  source 1..1089: mol_type = other DNA; note = Synthetic coding sequence
atgctgaagaacaagggccacagcagcaagaaggacaacctggccgtgaacgccgtggccctgcaggaccacatcctgcacgacctgcagctgagaaacctgagcgtggccgaccacagcaagacccaggtgcagaagaaggagaacaagagcctgaagagagacaccaaggccatcatcgacaccggcctgaagaagaccacccagtgccccaagctggaggacagcgagaaggagtacgtgctggaccccaagcccccccccctgaccctggcccagaagctgggcctgatcggccccccccccccccccctgagcagcgacgagtgggagaaggtgaagcagagaagcctgctgcagggcgacagcgtgcagccctgccccatctgcaaggaggagttcgagctgagaccccaggtgctgctgagctgcagccacgtgttccacaaggcctgcctgcaggccttcgagaagttcaccaacaagaagacctgccccctgtgcagaaagaaccagtaccagaccagagtgatccacgacggcgccagactgttcagaatcaagtgcgtgaccagaatccaggcctactggagaggctgcgtggtgagaaagtggtacagaaacctgagaaagaccgtgccccccaccgacgccaagctgagaaagaagttcttcgagaagaagttcaccgagatcagccacagaatcctgtgcagctacaacaccaacatcgaggagctgttcgccgagatcgaccagtgcctggccatcaacagaagcgtgctgcagcagctggaggagaagtgcggccacgagatcaccgaggaggagtgggagaagatccaggtgcaggccctgagaagagagacccacgagtgcagcatctgcctggcccccctgagcgccgccggcggccagagagtgggcgccggcagaagaagcagagagatggccctgctgagctgcagccacgtgttccaccacgcctgcctgctggccctggaggagttcagcgtgggcgacagaccccccttccacgcctgccccctgtgcagaagctgctaccagaagaagatcctggagtgctag

SEQ ID NO: 9913 - DNA, 291 bp, synthetic construct
  source 1..291: mol_type = other DNA; note = Synthetic coding sequence
atgatcgagaagatgcagggcagcagaatggacgagcagagatgcagcttccccccccccctgaagaccgaggaggactacatcccctaccccagcgtgcacgaggtgctgggcagagagggccccttccccctgatcctgctgccccagttcggcggctactggatcgagggcaccaaccacgagatcaccagcatccccgagaccgagcccctgcagagccccaccaccaaggtgaagctggagtgcaaccccaccgccagaatctacagaaagcacttcctgggctag

SEQ ID NO: 9914 - DNA, 459 bp, synthetic construct
  source 1..459: mol_type = other DNA; note = Synthetic coding sequence
atggccggcctgcccagaagaatcatcaaggagacccagagactgctggccgagcccgtgcccggcatcaaggccgagcccgacgagagcaacgccagatacttccacgtggtgatcgccggcccccaggacagccccttcgagggcggcaccttcaagctggagctgttcctgcccgaggagtaccccatggccgcccccaaggtgagattcatgaccaagatctaccaccccaacgtggacaagctgggcagaatctgcctggacatcctgaaggacaagtggagccccgccctgcagatcagaaccgtgctgctgagcatccaggccctgctgagcgcccccaaccccgacgaccccctggccaacgacgtggccgagcagtggaagaccaacgaggcccaggccatcgagaccgccagagcctggaccagactgtacgccatgaacaacatctag

SEQ ID NO: 9915 - DNA, 3354 bp, synthetic construct
  source 1..3354: mol_type = other DNA; note = Synthetic coding sequence
atgtacagaagcagcgccagaagcagcgtgagcagccacagacccaaggacgacggcggcggcggccccagaagcggcagaagcagcggcagcagcagcggccccgccagaagaagcagccccccccccccccccagcggcagcagcagcagaacccccgccagaagacccagaagccccagcggccacagaggcagaagagccagccccagcccccccagaggcagaagagtgagccccagcccccccagagccagaagaggcagccccagcccccccagaggcagaagactgttcccccccggccccgccggcttcagaggcagcagcagaggcgagagcagagccgactacgccagagacggcagaggcgaccaccccggcgacagcggcagcagaagaagaagccccggcctgtgcagcgacagcctggagaagagcctgagaatcaccgtgggcaacgaccacttctgcgtgagcacccccgagagaagaagactgagcgacagactgggcagccccgtggacaacctggaggacatggacagagacgacctgaccgacgacagcgtgttcaccagaagcagccagtgcagcagaggcctggagagatacatcagccaggaggagggccccctgagccccttcctgggccagctggacgaggactacagaaccaaggagaccttcctgcacagaagcgactacagcccccacatcagctgccacgacgagctgctgagaggcaccgagagaaacagagagaagctgaagggctacagcatcagaagcgaggagagaagcagagaggccaagagacccagatacgacgacaccgtgaagatcaacagcatgggcggcgaccaccccagcttcaccagcggcaccagaaactacagacagagaagaagaagccccagccccagattcctggaccccgagttcagagagctggacctggccagaagaaagagagaggaggaggaggagagaagcagaagcctgagccaggagctggtgggcgtggacggcggcggcaccggctgcagcatccccggcctgagcggcgtgctgaccgccagcgagcccggctacagcctgcacagacccgaggaggtgagcgtgatgcccaagaagagcatcctgaagaagagaatcgaggtggacatcatggagcccagcatgcagctggagagcttcagcagcagcaccagcagcagccaggaccaccccctgtacagcggccaccccagcctgcccctgagcggcgccatcgccgccttcgccagcgagatcgagaacaagggcaccatggtggagaccgccctgaaggagccccagggcaacctgtaccagtggggccccctgcccggcatccccaaggacaacagccccctgagagagaagttcggcagcttcctgtgccacaaggacaacctggacctgaaggccgagggccccgagagacacaccgacttcctgctgccccacgagagagccagccaggacggcagcggcttcagcagaatcctgagcatgctggccgacagcaccagcacccaggagaagagaagaagaagcttccccgacatcgaggacgaggagaagttcctgtacggcgacgaggaggaggacctgaaggccgagagcgtgcccaagcccctgggcagcagcgagagcgaggtgatgagacagaaggccagcagcctgcccagcagcgcccccgccgtgaagctggagagcctggaggagaccaaccccgagtacgccaagatccacgacctgctgaagaccatcggcctggacatcggcgtggccgagatcagccagctggccgccagaacccaggagagactgcacggcaagaagcccagcctgagaagcagcgccgacagaagaagcagcgtggacagatacttcagcgccgaccactgcagcagcgtggaccacagattcagcgccgacagatgcagcagcgtggaccactgcttcagcgccgacagaagaagcagcgacccccacagactggagagcagagaggcccaccacagcaacacccacagccccgaggtgagccacccccacccccccagccccgtggacccctacctgctgaccaagaacagcccccccttcctgaagagcgaccaccccgtgggccacatcagcggccccgaggtggtgggcagcggcttccagagcagcgtggccgtgagatgcatgctgcccagcgcccccagcgcccccatcagactgccccacaccgccgccctgagccagttccacatgcccagagccagccagttcgccgccgccagaatcccccccaactaccagggccccgccatcccccccgccagcttcgacgcctacagacactacatggcctacgccgccagcagatggcccatgtaccccaccagccagcccagcaaccaccccgtgcccgagccccacagaatcatgcccatcaccaagcaggccaccagaagcagacccaacctgagagtgatccccaccgtgacccccgacaagcccaagcagaaggagagcctgagaggcagcatccccgccgcccaggtgcccgtgcaggtgagcatccccagcctgatcagatacaaccccgagaagatcagcgacgagaagaacagagccagccagaagcagaaggtgatcgaggagagagagaagctgaagaacgacagagaggccagacagaagaagatgtactacctgagaaccgagctggagagactgcacaagcagcagggcgagatgctgagaaagaagagaagagagaaggacggccacaaggaccccctgctggtggaggtgagcagactgcaggacaacatcatgaaggacatcgccgagctgagacaggaggccgaggaggccgagaagaagcagagcgagctggacaaggtggcccagatcctgggcatcaacatcttcgacaagagccagaagagcctgagcgacagcagagagcccaccgagaagcccggcaaggccgagaagagcaagagccccgagaaggtgagcagcttcagcaacagcagcagcaacaaggagagcaaggtgaacaacgagaagttcagaaccaagagccccaagcccgccgagagcccccagagcgccaccaagcagctggaccagcccaccgccgcctacgagtactacgacgccggcaaccactggtgcaaggactgcaacaccatctgcggcaccatgttcgacttcttcacccacatgcacaacaagaagcacacccagggccagttccagaagagcagcgacttccagaaggagggcctgcagcagaccttcctgccccccgagagacagggctag

SEQ ID NO: 9916 - DNA, 576 bp, synthetic construct
  source 1..576: mol_type = other DNA; note = Synthetic coding sequence
atgtacgtgtgcctgtgcgtgagcgtggccaaggtgaccatggccgacagagccgccgccgagagagcctgcaaggaccccaaccccatcatcgacggcagaaaggccaacgtgaacctggcctacctgggcgccaagcccagaatcatgcagcccggcttcgccttcggcgtgcagcagctgcaccccgccctgatccagagacccttcggcatccccgcccactacgtgtacccccaggccttcgtgcagcccggcgtggtgatcccccacgtgcagcccaccgccgccgccgccagcaccaccccctacatcgactacaccggcgccgcctacgcccagtacagcgccgccgccgccgccgccgccgccgccgccgcctacgaccagtacccctacgccgccagccccgccgccgccggctacgtgaccgccggcggctacggctacgccgtgcagcagcccatcaccgccgccgcccccggcaccgccgccgccgccgccgccgccgccgccgccgccgccgccttcggccagtaccagccccagcagctgcagaccgacagaatgcagtag

SEQ ID NO: 9917 - DNA, 330 bp, synthetic construct
  source 1..330: mol_type = other DNA; note = Synthetic coding sequence
atggccggcgcccccaccgtgagcctgcccgagctgagaagcctgctggccagcggcagagccagactgttcgacgtgagaagcagagaggaggccgccgccggcaccatccccggcgccctgaacatccccgtgagcgagctggagagcgccctgcagatggagcccgccgccttccaggccctgtacagcgccgagaagcccaagctggaggacgagcacctggtgttcttctgccagatgggcaagagaggcctgcaggccacccagctggccagaagcctgggctacaccggctacggcgaggtgtggctgctggccggcagatag

SEQ ID NO: 9918 - DNA, 630 bp, synthetic construct
  source 1..630: mol_type = other DNA; note = Synthetic coding sequence
atggccctgctggccgagcacctgctgaagcccctgcccgccgacaagcagatcgagaccggccccttcctggaggccgtgagccacctgccccccttcttcgactgcctgggcagccccgtgttcacccccatcaaggccgacatcagcggcaacatcaccaagatcaaggccgtgtacgacaccaaccccgccaagttcagaaccctgcagaacatcctggaggtggagaaggagatgtacggcgccgagtggcccaaggtgggcgccaccctggccctgatgtggctgaagagaggcctgagattcatccaggtgttcctgcagagcatctgcgacggcgagagagacgagaaccaccccaacctgatcagagtgaacgccaccaaggcctacgagatggccctgaagaagtaccacggctggatcgtgcagaagatcttccaggccgccctgtacgccgccccctacaagagcgacttcctgaaggccctgagcaagggccagaacgtgaccgaggaggagtgcctggagaagatcagactgttcctggtgaactacaccgccaccatcgacgtgatctacgagatgtacacccagatgaacgccgagctgaactacaaggtgtag

SEQ ID NO: 9919 - DNA, 474 bp, synthetic construct
  source 1..474: mol_type = other DNA; note = Synthetic coding sequence
atggaggaggcccagagaaagagaacccagctgagagaggccttcgagcagctgcaggccaagaagcagatggccatggagaagagaagagccgtgcagaaccagtggcagctgcagcaggagaagcacctgcagcacctggccgaggtgagcgccgaggtgagagagagaaagaccggcacccagcaggagctggacagagtgttccagaagctgggcaacctgaagcagcaggccgagcaggagagagacaagctgcagagataccagaccttcctgcagctgctgtacaccctgcagggcaagctgctgttccccgaggccgaggccgaggccgagaacctgcccgacgacaagccccagcagcccaccagaccccaggagcagagcaccggcgacaccatgggcagagaccccggcgtgagcttcaaggccgtgggcctgcagcccgccggcgacgtgaacctgccctag

SEQ ID NO: 9920 - DNA, 639 bp, synthetic construct
  source 1..639: mol_type = other DNA; note = Synthetic coding sequence
atggaggtgctgagaagaagcagcgtgttcgccgccgagatcatggacgccttcgacagaagccccaccgacaaggagctggtggcccaggccaaggccctgggcagagagtacgtgcacgccagactgctgagagccggcctgagctggagcgcccccgagagagccgcccccgtgcccggcagactggccgaggtgtgcgccgtgctgctgagactgggcgacgagctggagatgatcagacccagcgtgtacagaaacgtggccagacagctgcacatcagcctgcagagcgagcccgtggtgaccgacgccttcctggccgtggccggccacatcttcagcgccggcatcacctggggcaaggtggtgagcctgtacgccgtggccgccggcctggccgtggactgcgtgagacaggcccagcccgccatggtgcacgccctggtggactgcctgggcgagttcgtgagaaagaccctggccacctggctgagaagaagaggcggctggaccgacgtgctgaagtgcgtggtgagcaccgaccccggcctgagaagccactggctggtggccgccctgtgcagcttcggcagattcctgaaggccgccttcttcgtgctgctgcccgagagatag

SEQ ID NO: 9921 - DNA, 2148 bp, synthetic construct
  source 1..2148: mol_type = other DNA; note = Synthetic coding sequence
atgagccagagcggcgccgtgagctgctgccccggcgccaccaacggcagcctgggcagaagcgacggcgtggccaagatgagccccaaggacctgttcgagcagagaaagaagtacagcaacagcaacgtgatcatgcacgagaccagccagtaccacgtgcagcacctggccaccttcatcatggacaagagcgaggccatcaccagcgtggacgacgccatcagaaagctggtgcagctgagcagcaaggagaagatctggacccaggagatgctgctgcaggtgaacgaccagagcctgagactgctggacatcgagagccaggaggagctggaggacttccccctgcccaccgtgcagagaagccagaccgtgctgaaccagctgagataccccagcgtgctgctgctggtgtgccaggacagcgagcagagcaagcccgacgtgcacttcttccactgcgacgaggtggaggccgagctggtgcacgaggacatcgagagcgccctggccgactgcagactgggcaagaagatgagaccccagaccctgaagggccaccaggagaagatcagacagagacagagcatcctgccccccccccagggccccgcccccatccccttccagcacagaggcggcgacagccccgaggccaagaacagagtgggcccccaggtgcccctgagcgagcccggcttcagaagaagagagagccaggaggagcccagagccgtgctggcccagaagatcgagaaggagacccagatcctgaactgcgccctggacgacatcgagtggttcgtggccagactgcagaaggccgccgaggccttcaagcagctgaaccagagaaagaagggcaagaagaagggcaagaaggcccccgccgagggcgtgctgaccctgagagccagaccccccagcgagggcgagttcatcgactgcttccagaagatcaagctggccatcaacctgctggccaagctgcagaagcacatccagaaccccagcgccgccgagctggtgcacttcctgttcggccccctggacctgatcgtgaacacctgcagcggccccgacatcgccagaagcgtgagctgccccctgctgagcagagacgccgtggacttcctgagaggccacctggtgcccaaggagatgagcctgtgggagagcctgggcgagagctggatgagacccagaagcgagtggcccagagagccccaggtgcccctgtacgtgcccaagttccacagcggctgggagccccccgtggacgtgctgcaggaggccccctgggaggtggagggcctggccagcgcccccatcgaggaggtgagccccgtgagcagacagagcatcagaaacagccagaagcacagccccaccagcgagcccaccccccccggcgacgccctgccccccgtgagcagcccccacacccacagaggctaccagcccacccccgccatggccaagtacgtgaagatcctgtacgacttcaccgccagaaacgccaacgagctgagcgtgctgaaggacgaggtgctggaggtgctggaggacggcagacagtggtggaagctgagaagcagaagcggccaggccggctacgtgccctgcaacatcctgggcgaggccagacccgaggacgccggcgcccccttcgagcaggccggccagaagtactggggccccgccagccccacccacaagctgccccccagcttccccggcaacaaggacgagctgatgcagcacatggacgaggtgaacgacgagctgatcagaaagatcagcaacatcagagcccagccccagagacacttcagagtggagagaagccagcccgtgagccagcccctgacctacgagagcggccccgacgaggtgagagcctggctggaggccaaggccttcagccccagaatcgtggagaacctgggcatcctgaccggcccccagctgttcagcctgaacaaggaggagctgaagaaggtgtgcggcgaggagggcgtgagagtgtacagccagctgaccatgcagaaggccttcctggagaagcagcagagcggcagcgagctggaggagctgatgaacaagttccacagcatgaaccagagaagaggcgaggacagctag

SEQ ID NO: 9922 - DNA, 600 bp, synthetic construct
  source 1..600: mol_type = other DNA; note = Synthetic coding sequence
atggcctggccctgcatcagcagactgtgctgcctggccagaagatggaaccagctggacagaagcgacgtggccgtgcccctgaccctgcacggctacagcgacctggacagcgaggagcccggcaccggcggcgccgccagcagaagaggccagccccccgccggcgccagagacagcggcagagacgtgcccctgacccagtaccagagagacttcggcctgtggaccacccccgccggccccaaggaccccccccccggcagaggccccggcgccggcggcagaagaggcaagagcagcgcccagagcagcgccccccccgcccccggcgccagaggcgtgtacgtgctgcccatcggcgacgccgacgccgccgccgccgtgaccaccagctacagacaggagttccaggcctggaccggcgtgaagcccagcagaagcaccaagaccaagcccgccagagtgatcaccacccacaccagcggctgggacagcagccccggcgccggcttccaggtgcccgaggtgagaaagaagttcacccccaaccccagcgccatcttccaggccagcgcccccagaatcctgaacgtgtag

SEQ ID NO: 9923 - DNA, 5106 bp, synthetic construct
  source 1..5106: mol_type = other DNA; note = Synthetic coding sequence
atgggcaacagcgacagccagtacaccctgcagggcagcaagaaccacagcaacaccatcaccggcgccaagcagatcccctgcagcctgaagatcagaggcatccacgccaaggaggagaagagcctgcacggctggggccacggcagcaacggcgccggctacaagagcagaagcctggccagaagctgcctgagccacttcaagagcaaccagccctacgccagcagactgggcggccccacctgcaaggtgagcagaggcgtggcctacagcacccacagaaccaacgcccccggcaaggacttccagggcatcagcgccgccttcagcaccgagaacggcttccacagcgtgggccacgagctggccgacaaccacatcaccagcagagactgcaacggccacctgctgaactgctacggcagaaacgagagcatcgccagcaccccccccggcgaggacagaaagagccccagagtgctgatcaagaccctgggcaagctggacggctgcctgagagtggagttccacaacggcggcaaccccagcaaggtgcccgccgaggactgcagcgagcccgtgcagctgctgagatacagccccaccctggccagcgagaccagccccgtgcccgaggccagaagaggcagcagcgccgacagcctgcccagccacagacccagccccaccgacagcagactgagaagcagcaagggcagcagcctgagcagcgagagcagctggtacgacagcccctggggcaacgccggcgagctgagcgaggccgagggcagcttcctggcccccggcatgcccgaccccagcctgcacgccagcttcccccccggcgacgccaagaagcccttcaaccagagcagcagcctgagcagcctgagagagctgtacaaggacgccaacctgggcagcctgagccccagcggcatcagactgagcgacgagtacatgggcacccacgccagcctgagcaacagagtgagcttcgccagcgacatcgacgtgcccagcagagtggcccacggcgaccccatccagtacagcagcttcaccctgccctgcagaaagcccaaggccttcgtggaggacaccgccaagaaggacagcctgaaggccagaatgagaagaatcagcgactggaccggcagcctgagcagaaagaagagaaagctgcaggagcccagaagcaaggagggcagcgactacttcgacagcagaagcgacggcctgaacaccgacgtgcagggcagcagccaggccagcgccttcctgtggagcggcggcagcacccagatcctgagccagagaagcgagagcacccacgccatcggcagcgaccccctgagacagaacatctacgagaacttcatgagagagctggagatgagcagaaccaacaccgagaacatcgagaccagcaccgagaccgccgagagcagcagcgagagcctgagcagcctggagcagctggacctgctgttcgagaaggagcagggcgtggtgagaaaggccggctggctgttcttcaagcccctggtgaccgtgcagaaggagagaaagctggagctggtggccagaagaaagtggaagcagtactgggtgaccctgaagggctgcaccctgctgttctacgagacctacggcaagaacagcatggaccagagcagcgcccccagatgcgccctgttcgccgaggacagcatcgtgcagagcgtgcccgagcaccccaagaaggagaacgtgttctgcctgagcaacagcttcggcgacgtgtacctgttccaggccaccagccagaccgacctggagaactgggtgaccgccgtgcacagcgcctgcgccagcctgttcgccaagaagcacggcaaggaggacaccctgagactgctgaagaaccagaccaagaacctgctgcagaagatcgacatggacagcaagatgaagaagatggccgagctgcagctgagcgtggtgagcgaccccaagaacagaaaggccatcgagaaccagatccagcagtgggagcagaacctggagaagttccacatggacctgttcagaatgagatgctacctggccagcctgcagggcggcgagctgcccaaccccaagagcctgctggccgccgccagcagacccagcaagctggccctgggcagactgggcatcctgagcgtgagcagcttccacgccctggtgtgcagcagagacgacagcgccctgagaaagagaaccctgagcctgacccagagaggcagaaacaagaagggcatcttcagcagcctgaagggcctggacaccctggccagaaagggcaaggagaagagacccagcatcacccaggtggacgagctgctgcacatctacggcagcaccgtggacggcgtgcccagagacaacgcctgggagatccagacctacgtgcacttccaggacaaccacggcgtgaccgtgggcatcaagcccgagcacagagtggaggacatcctgaccctggcctgcaagatgagacagctggagcccagccactacggcctgcagctgagaaagctggtggacgacaacgtggagtactgcatccccgccccctacgagtacatgcagcagcaggtgtacgacgagatcgaggtgttccccctgaacgtgtacgacgtgcagctgaccaagaccggcagcgtgtgcgacttcggcttcgccgtgaccgcccaggtggacgagagacagcacctgagcagaatcttcatcagcgacgtgctgcccgacggcctggcctacggcgagggcctgagaaagggcaacgagatcatgaccctgaacggcgaggccgtgagcgacctggacctgaagcagatggaggccctgttcagcgagaagagcgtgggcctgaccctgatcgccagaccccccgacaccaaggccaccctgtgcaccagctggagcgacagcgacctgttcagcagagaccagaagagcctgctgcccccccccaaccagagccagctgctggaggagttcctggacaacttcaagaagaacaccgccaacgacttcagcaacgtgcccgacatcaccaccggcctgaagagaagccagaccgacggcaccctggaccaggtgagccacagagagaagatggagcagaccttcagaagcgccgagcagatcaccgccctgtgcagaagcttcaacgacagccaggccaacggcatggagggccccagagagaaccaggaccccccccccagaagcctggccagacacctgagcgacgccgacagactgagaaaggtgatccaggagctggtggacaccgagaagagctacgtgaaggacctgagctgcctgttcgagctgtacctggagcccctgcagaacgagaccttcctgacccaggacgagatggagagcctgttcggcagcctgcccgagatgctggagttccagaaggtgttcctggagaccctggaggacggcatcagcgccagcagcgacttcaacaccctggagacccccagccagttcagaaagctgctgttcagcctgggcggcagcttcctgtactacgccgaccacttcaagctgtacagcggcttctgcgccaaccacatcaaggtgcagaaggtgctggagagagccaagaccgacaaggccttcaaggccttcctggacgccagaaaccccaccaagcagcacagcagcaccctggagagctacctgatcaagcccgtgcagagagtgctgaagtaccccctgctgctgaaggagctggtgagcctgaccgaccaggagagcgaggagcactaccacctgaccgaggccctgaaggccatggagaaggtggccagccacatcaacgagatgcagaagatctacgaggactacggcaccgtgttcgaccagctggtggccgagcagagcggcaccgagaaggaggtgaccgagctgagcatgggcgagctgctgatgcacagcaccgtgagctggctgaaccccttcctgagcctgggcaaggccagaaaggacctggagctgaccgtgttcgtgttcaagagagccgtgatcctggtgtacaaggagaactgcaagctgaagaagaagctgcccagcaacagcagacccgcccacaacagcaccgacctggaccccttcaagttcagatggctgatccccatcagcgccctgcaggtgagactgggcaaccccgccggcaccgagaacaacagcatctgggagctgatccacaccaagagcgagatcgagggcagacccgagaccatcttccagctgtgctgcagcgacagcgagagcaagaccaacatcgtgaaggtgatcagaagcatcctgagagagaacttcagaagacacatcaagtgcgagctgcccctggagaagacctgcaaggacagactggtgcccctgaagaacagagtgcccgtgagcgccaagctggccagcagcagaagcctgaaggtgctgaagaacagcagcagcaacgagtggaccggcgagaccggcaagggcaccctgctggacagcgacgagggcagcctgagcagcggcacccagagcagcggctgccccaccgccgagggcagacaggacagcaagagcaccagccccggcaagtacccccaccccggcctggccgacttcgccgacaacctgatcaaggagagcgacatcctgagcgacgaggacgacgaccacagacagaccgtgaagcagggcagccccaccaaggacatcgagatccagttccagagactgagaatcagcgaggaccccgacgtgcaccccgaggccgagcagcagcccggccccgagagcggcgagggccagaagggcggcgagcagcccaagctggtgagaggccacttctgccccatcaagagaaaggccaacagcaccaagagagacagaggcaccctgctgaaggcccagatcagacaccagagcctggacagccagagcgagaacgccaccatcgacctgaacagcgtgctggagagagagttcagcgtgcagagcctgaccagcgtggtgagcgaggagtgcttctacgagaccgagagccacggcaagagctag

SEQ ID NO: 9924 - DNA, 3177 bp, synthetic construct
  source 1..3177: mol_type = other DNA; note = Synthetic coding sequence
atggacctgggccccctgaacatctgcgaggagatgaccatcctgcacggcggcttcctgctggccgagcagctgttccaccccaaggccctggccgagctgaccaagagcgactgggagagagtgggcagacccatcgtggaggccctgagagagatcagcagcgccgccgcccacagccagcccttcgcctggaagaagaaggccctgatcatcatctgggccaaggtgctgcagccccaccccgtgacccccagcgacaccgagaccagatggcaggaggacctgttcttcagcgtgggcaacatgatccccaccatcaaccacaccatcctgttcgagctgctgaagagcctggaggccagcggcctgttcatccagctgctgatggccctgcccaccaccatctgccacgccgagctggagagattcctggagcacgtgaccgtggacaccagcgccgaggacgtggccttcttcctggacgtgtggtgggaggtgatgaagcacaagggccacccccaggaccccctgctgagccagttcagcgccatggcccacaagtacctgcccgccctggacgagttcccccacccccccaagagactgagaagcgaccccgacgcctgccccaccatgcccctgctggccatgctgctgagaggcctgacccagatccagagcagaatcctgggccccggcagaaagtgctgcgccctggccaacctggccgacatgctgaccgtgttcgccctgaccgaggacgacccccaggaggtgagcgccaccgtgtacctggacaagctggccaccgtgatcagcgtgtggaacagcgacacccagaacccctaccaccagcaggccctggccgagaaggtgaaggaggccgagagagacgtgagcctgaccagcctggccaagctgcccagcgagaccatcttcgtgggctgcgagttcctgcaccacctgctgagagagtggggcgaggagctgcaggccgtgctgagaagcagccagggcaccagctacgacagctacagactgtgcgacagcctgaccagcttcagccagaacgccaccctgtacctgaacagaaccagcctgagcaaggaggacagacaggtggtgagcgagctggccgagtgcgtgagagacttcctgagaaagaccagcaccgtgctgaagaacagagccctggaggacatcaccgccagcatcgccatggccgtgatccagcagaagatggacagacacatggaggtgtgctacatcttcgccagcgagaagaagtgggccttcagcgacgagtgggtggcctgcctgggcagcaacagagccctgttcagacagcccgacctggtgctgagactgctggagaccgtgatcgacgtgagcaccgccgacagagccatccccgagagccagatcagacaggtgatccacctgatcctggagtgctacgccgacctgagcctgcccggcaagaacaaggtgctggccggcatcctgagaagctggggcagaaagggcctgagcgagaagctgctggcctacgtggagggcttccaggaggacctgaacaccaccttcaaccagctgacccagagcgccagcgagcagggcctggccaaggccgtggccagcgtggccagactggtgatcgtgcaccccgaggtgaccgtgaagaagatgtgcagcctggccgtggtgaacctgggcacccacaagttcctggcccagatcctgaccgccttccccgccctgagattcgtggaggagcagggccccaacagcagcgccaccttcatggtgagctgcctgaaggagaccgtgtggatgaagttcagcacccccaaggaggagaagcagttcctggagctgctgaactgcctgatgagccccgtgaagccccagggcatccccgtggccgccctgctggagcccgacgaggtgctgaaggagttcgtgctgcccttcctgagactggacgtggaggaggtggacctgagcctgagaatcttcatccagaccctggaggccaacgcctgcagagaggagtactggctgcagacctgcagccccttccccctgctgttcagcctgtgccagctgctggacagattcagcaagtactggcagctgcccaaggagaagagatgcctgagcctggacagaaaggacctggccatccacatcctggagctgctgtgcgagatcgtgagcgccaacgccgagaccttcagccccgacgtgtggatcaagagcctgagctggctgcacagaaagctggagcagctggactggaccgtgggcctgagactgaagagcttcttcgagggccacttcaagtgcgaggtgcccgccaccctgttcgagatctgcaagctgagcgaggacgagtggaccagccaggcccaccccggctacggcgccggcaccggcctgctggcctggatggagtgctgctgcgtgagcagcggcatcagcgagagaatgctgagcctgctggtggtggacgtgggcaaccccgaggaggtgagactgttcagcaagggcttcctggtggccctggtgcaggtgatgccctggtgcagcccccaggagtggcagagactgcaccagctgaccagaagactgctggagaagcagctgctgcacgtgccctacagcctggagtacatccagttcgtgcccctgctgaacctgaagcccttcgcccaggagctgcagctgagcgtgctgttcctgagaaccttccagttcctgtgcagccacagctgcagagactggctgcccctggagggctggaaccacgtggtgaagctgctgtgcggcagcctgaccagactgctggacagcgtgagagccatccaggccgccggcccctgggtgcagggccccgagcaggacctgacccaggaggccctgttcgtgtacacccaggtgttctgccacgccctgcacatcatggccatgctgcaccccgaggtgtgcgagcccctgtacgtgctggccctggagaccctgacctgctacgagaccctgagcaagaccaaccccagcgtgagcagcctgctgcagagagcccacgagcagagattcctgaagagcatcgccgagggcatcggccccgaggagagaagacagaccctgctgcagaagatgagcagcttctag

SEQ ID NO: 9925 - DNA, 267 bp, synthetic construct
  source 1..267: mol_type = other DNA; note = Synthetic coding sequence
atgagcggcctgagagtgtacagcaccagcgtgaccggcagcagagagatcaagagccagcagagcgaggtgaccagaatcctggacggcaagagaatccagtaccagctggtggacatcagccaggacaacgccctgagagacgagatgagagccctggccggcaaccccaaggccacccccccccagatcgtgaacggcgaccagtactgcggcgtgtgggccggcggcagaggcggcggcggcagcgtgggcagaggcctgtag

SEQ ID NO: 9926 - DNA, 933 bp, synthetic construct
  source 1..933: mol_type = other DNA; note = Synthetic coding sequence
atggacggcagcttcgtgcagcacagcgtgagagtgctgcaggagctgaacaagcagagagagaagggccagtactgcgacgccaccctggacgtgggcggcctggtgttcaaggcccactggagcgtgctggcctgctgcagccacttcttccagagcctgtacggcgacggcagcggcggcagcgtggtgctgcccgccggcttcgccgagatcttcggcctgctgctggacttcttctacaccggccacctggccctgaccagcggcaacagagaccaggtgctgctggccgccagagagctgagagtgcccgaggccgtggagctgtgccagagcttcaagcccaagaccagcgtgggccaggccgccggcggccagagcggcctgggcccccccgccagccagaacgtgaacagccacgtgaaggagcccgccggcctggaggaggaggaggtgagcagaaccctgggcctggtgcccagagaccaggagcccagaggcagccacagcccccagagaccccagctgcacagccccgcccagagcgagggccccagcagcctgtgcggcaagctgaagcaggccctgaagccctgccccctggaggacaagaagcccgaggactgcaaggtgccccccagacccctggaggccgagggcgcccagctgcagggcggcagcaacgagtgggaggtggtggtgcaggtggaggacgacggcgacggcgactacatgagcgagcccgaggccgtgctgaccagaagaaagagcaacgtgatcagaaagccctgcgccgccgagcccgccctgagcgccggcagcctggccgccgagcccgccgagaacagaaagggcaccgccgtgcccgtggagtgccccacctgccacaagaagttcctgagcaagtactacctgaaggtgcacaactag

SEQ ID NO: 9927 - DNA, 600 bp, synthetic construct; identical to SEQ ID NO: 9437
  source 1..600: mol_type = other DNA; note = Synthetic coding sequence

SEQ ID NO: 9928 - DNA, 513 bp, synthetic construct
  source 1..513: mol_type = other DNA; note = Synthetic coding sequence
atgagcgtggccggcggcgagatcagaggcgacaccggcggcgaggacaccgccgcccccggcagattcagcttcagccccgagcccaccctggaggacatcagaagactgcacgccgagttcgccgccgagagagactgggagcagttccaccagcccagaaacctgctgctggccctggtgggcgaggtgggcgagctggccgagctgttccagtggaagaccgacggcgagcccggcccccagggctggagccccagagagagagccgccctgcaggaggagctgagcgacgtgctgatctacctggtggccctggccgccagatgcagagtggacctgcccctggccgtgctgagcaagatggacatcaacagaagaagataccccgcccacctggccagaagcagcagcagaaagtacaccgagctgccccacggcgccatcagcgaggaccaggccgtgggccccgccgacatcccctgcgacagcaccggccagaccagcacctag

SEQ ID NO: 9929 - DNA, 702 bp, synthetic construct
  source 1..702: mol_type = other DNA; note = Synthetic coding sequence
atgagcgccaagagagccgagctgaagaagacccacctgagcaagaactacaaggccgtgtgcctggagctgaagcccgagcccaccaagaccttcgactacaaggccgtgaagcaggagggcagattcaccaaggccggcgtgacccaggacctgaagaacgagctgagagaggtgagagaggagctgaaggagaagatggaggagatcaagcagatcaaggacctgatggacaaggacttcgacaagctgcacgagttcgtggagatcatgaaggagatgcagaaggacatggacgagaagatggacatcctgatcaacacccagaagaactacaagctgcccctgagaagagcccccaaggagcagcaggagctgagactgatgggcaagacccacagagagccccagctgagacccaagaagatggacggcgccagcggcgtgaacggcgccccctgcgccctgcacaagaagaccatggccccccagaagaccaagcagggcagcctggaccccctgcaccactgcggcacctgctgcgagaagtgcctgctgtgcgccctgaagaacaactacaacagaggcaacatccccagcgaggccagcggcctgtacaagggcggcgaggagcccgtgaccacccagcccagcgtgggccacgccgtgcccgcccccaagagccagaccgagggcagatag

SEQ ID NO: 9930 - DNA, 2196 bp, synthetic construct
  source 1..2196: mol_type = other DNA; note = Synthetic coding sequence
atgagcgtgaccctgaccagcgtgaagagagtgcagagcagccccaacctgctggccgccggcagagacagccagagccccgacagcgcctggagaagctacaacgacggcaaccaggagaccctgaacggcgacgccacctacagcagcctggccgccaagggcttcagaagcgtgagacccaacctgcaggacaagagaagccccacccagagccagatcaccgtgaacggcaacagcggcggcgccgtgagccccatgagctactaccagagacccttcagccccagcgcctacagcctgcccgccagcctgaacagcagcatcgtgatgcagcacggcaccagcctggacagcaccgacacctacccccagcacgcccagagcctggacggcaccaccagcagcagcatccccctgtacagaagcagcgaggaggagaagagagtgaccgtgatcaaggccccccactaccccggcatcggccccgtggacgagagcggcatccccaccgccatcagaaccaccgtggacagacccaaggactggtacaagaccatgttcaagcagatccacatggtgcacaagcccgacgacgacaccgacatgtacaacaccccctacacctacaacgccggcctgtacaaccccccctacagcgcccagagccaccccgccgccaagacccagacctacagacccctgagcaagagccacagcgacaacagccccaacgccttcaaggacgccagcagccccgtgccccccccccacgtgcccccccccgtgccccccctgagacccagagacagaagcagcaccgagaagcacgactgggacccccccgacagaaaggtggacaccagaaagttcagaagcgagcccagaagcatcttcgagtacgagcccggcaagagcagcatcctgcagcacgagagacccccccccctgcccaccacccccacccccgtgcccagagagcccggcagaaagcccctgagcagcagcagactgggcgaggtgaccggcagccccagccccccccccagaagcggcgcccccacccccagcagcagagcccccgccctgagccccaccagaccccccaagaagcccctggactacgtgcaggaccacagcagcggcgtgttcaacgaggccagcctgtaccagagcagcatcgacagaagcctggagagacccatgagcagcgccagcatggccagcgacttcagaaagagaagaaagagcgagcccgccgtgggcccccccagaggcctgggcgaccagagcgccagcagaaccagccccggcagagtggacctgcccggcagcagcaccaccctgaccaagagcttcaccagcagcagccccagcagccccagcagagccaaggacagagagagccccagaagctacagcagcaccctgaccgacatgggcagaagcgcccccagagagagaagaggcacccccgagaaggagaagctgcccgccaaggccgtgtacgacttcaaggcccagaccagcaaggagctgagcttcaagaagggcgacaccgtgtacatcctgagaaagatcgaccagaactggtacgagggcgagcaccacggcagagtgggcatcttccccatcagctacgtggagaagctgaccccccccgagaaggcccagcccgccagaccccccccccccgcccagcccggcgagatcggcgaggccatcgccaagtacaacttcaacgccgacaccaacgtggagctgagcctgagaaagggcgacagagtgatcctgctgaagagagtggaccagaactggtacgagggcaagatccccggcaccaacagacagggcatcttccccgtgagctacgtggaggtggtgaagaagaacaccaagggcgccgaggactaccccgacccccccatcccccacagctacagcagcgacagaatccacagcctgagcagcaacaagccccagagacccgtgttcacccacgagaacatccagggcggcggcgagcccttccaggccctgtacaactacacccccagaaacgaggacgagctggagctgagagagagcgacgtgatcgacgtgatggagaagtgcgacgacggctggttcgtgggcaccagcagaagaaccaagttcttcggcaccttccccggcaactacgtgaagagactgtag

SEQ ID NO: 9931 - DNA, 969 bp, synthetic construct
  source 1..969: mol_type = other DNA; note = Synthetic coding sequence
atgaccctggaggccatcagatacagcagaggcagcctgcagatcctggaccagctgctgctgcccaagcagagcagatacgaggccgtgggcagcgtgcaccaggcctgggaggccatcagagccatgaaggtgagaggcgcccccgccatcgccctggtgggctgcctgagcctggccgtggagctgcaggccggcgccggcggccccggcctggccgccctggtggccttcgtgagagacaagctgagcttcctggtgaccgccagacccaccgccgtgaacatggccagagccgccagagacctggccgacgtggccgccagagaggccgagagagagggcgccaccgaggaggccgtgagagagagaagagagaccgagctgtgcgagcactgggaggagcacaccagacagagagagctgcccctgagaggccccctgggcggcaccgtgctggagaccagaccctacaaccagggcgccagactgaccgccttcgagctggtgtacgagcagatccccgccaccctgatcaccgacagcatggtggccgccgccatggcccacagaggcgtgagcgccgtggtggtgggcgccgacagagtggtggccaacggcgacaccgccaacaaggtgggcacctaccagctggccatcgtggccaagcaccacggcatccccttctacgtggccgcccccagcagcagctgcgacctgagactggagaccggcaaggagatcatcatcgaggagagacccggccaggagctgaccgacgtgaacggcgtgagaatcgccgcccccggcatcggcgtgtggaaccccgccttcgacgtgaccccccacgacctgatcaccggcggcatcatcaccgagctgggcgtgttcgcccccgaggagctgagaaccgccctgaccaccaccatcagcagcagagacggcaccctggacggcccccagatgtag

SEQ ID NO: 9932 - DNA, 5169 bp, synthetic construct
  source 1..5169: mol_type = other DNA; note = Synthetic coding sequence
atgggcaaccaggacggcaagctgaagagaagcgccggcgacgccctgcacgagggcggcggcggcgccgaggacgccctgggccccagagacgtggaggccaccaagaagggcagcggcggcaagaaggccctgggcaagcacggcaagggcggcggcggcggcggcggcggcggcgagagcggcaagaagaagagcaagagcgacagcagagccagcgtgttcagcaacctgagaatcagaaagaacctgagcaagggcaagggcgccggcggcagcagagaggacgtgctggacagccaggccctgcagaccggcgagctggacagcgcccacagcctgctgaccaagacccccgacctgagcctgagcgccgacgaggccggcctgagcgacaccgagtgcgccgaccccttcgaggtgaccggccccggcggccccggccccgccgaggccagagtgggcggcagacccatcgccgaggacgtggagaccgccgccggcgcccaggacggccagagaaccagcagcggcagcgacaccgacatctacagcttccacagcgccaccgagcaggaggacctgctgagcgacatccagcaggccatcagactgcagcagcagcagcagcagcagctgcagctgcagctgcagcagcagcagcagcagcagcagctgcagggcgccgaggagcccgccgccccccccaccgccgtgagcccccagcccggcgccttcctgggcctggacagattcctgctgggccccagcggcggcgccggcgaggcccccggcagccccgacaccgagcaggccctgagcgccctgagcgacctgcccgagagcctggccgccgagcccagagagccccagcagccccccagccccggcggcctgcccgtgagcgaggcccccagcctgcccgccgcccagcccgccgccaaggacagccccagcagcaccgccttccccttccccgaggccggccccggcgaggaggccgccggcgcccccgtgagaggcgccggcgacaccgacgaggagggcgaggaggacgccttcgaggacgcccccagaggcagccccggcgaggagtgggcccccgaggtgggcgaggacgccccccagagactgggcgaggagcccgaggaggaggcccagggccccgacgcccccgccgccgccagcctgcccggcagccccgcccccagccagagatgcttcaagccctaccccctgatcaccccctgctacatcaagaccaccaccagacagctgagcagccccaaccacagccccagccagagccccaaccagagccccagaatcaagagaagacccgagcccagcctgagcagaggcagcagaaccgccctggccagcgtggccgcccccgccaagaagcacagagccgacggcggcctggccgccggcctgagcagaagcgccgactggaccgaggagctgggcgccagaacccccagagtgggcggcagcgcccacctgctggagagaggcgtggccagcgacagcggcggcggcgtgagccccgccctggccgccaaggccagcggcgcccccgccgccgccgacggcttccagaacgtgttcaccggcagaaccctgctggagaagctgttcagccagcaggagaacggcccccccgaggaggccgagaagttctgcagcagaatcatcgccatgggcctgctgctgcccttcagcgactgcttcagagagccctgcaaccagaacgcccagaccaacgccgccagcttcgaccaggaccagctgtacacctgggccgccgtgagccagcccacccacagcctggactacagcgagggccagttccccagaagagtgcccagcatgggcccccccagcaagccccccgacgaggagcacagactggaggacgccgagaccgagagccagagcgccgtgagcgagaccccccagaagagaagcgacgccgtgcagaaggaggtggtggacatgaagagcgagggccaggccaccgtgatccagcagctggagcagaccatcgaggacctgagaaccaagatcgccgagctggagagacagtaccccgccctggacaccgaggtggccagcggccaccagggcctggagaacggcgtgaccgccagcggcgacgtgtgcctggaggccctgagactggaggagaaggaggtgagacaccacagaatcctggaggccaagagcatccagaccagccccaccgaggagggcggcgtgctgaccctgccccccgtggacggcctgcccggcagacccccctgcccccccggcgccgagagcggcccccagaccaagttctgcagcgagatcagcctgatcgtgagccccagaagaatcagcgtgcagctggacagccaccagcccacccagagcatcagccagcccccccccccccccagcctgctgtggagcgccggccagggccagcccggcagccagcccccccacagcatcagcaccgagttccagaccagccacgagcacagcgtgagcagcgccttcaagaacagctgcaacatccccagccccccccccctgccctgcaccgagagcagcagcagcatgcccggcctgggcatggtgccccccccccccccccccctgcccggcatgaccgtgcccaccctgcccagcaccgccatcccccagcccccccccctgcagggcaccgagatgctgccccccccccccccccccctgcccggcgccggcatccccccccccccccccctgcccggcgccggcatcctgcccctgccccccctgcccggcgccggcatccccccccccccccccctgcccggcgccgccatccccccccccccccccctgcccggcgccggcatccccctgcccccccccctgcccggcgccggcatccccccccccccccccctgcccggcgccggcatccccccccccccccccctgcccggcgccggcatccccccccccccccccctgcccggcgccggcatccccccccccccccccctgcccggcgccggcatccccccccccccccccctgcccggcgccggcatccccccccccccccccctgcccggcgccggcatccccccccccccccccctgcccggcgccggcatccccccccccccccccctgcccggcgccggcatccccccccccccccccctgcccggcgccggcatccccccccccccccccctgcccggcgccggcatccccccccccccccccctgcccggcgccggcatccccccccccccccccctgcccggcgtgggcatccccccccccccccccctgcccggcgccggcatccccccccccccccccctgcccggcgccggcatccccccccccccccccctgcccggcgccggcatccccccccccccccccctgcccagagtgggcatccccccccccccccccctgcccggcgccggcatccccccccccccccccctgcccggcgccggcatccccccccccccccccctgcccggcgtgggcatccccccccccccccccctgcccggcgtgggcatccccccccccccccccctgcccggcgccggcatccccccccccccccccctgcccggcatgggcatcccccccgcccccgccccccccctgcccccccccggcaccggcatcccccccccccccctgctgcccgtgagcggcccccccctgctgccccaggtgggcagcagcaccctgcccaccccccaggtgtgcggcttcctgcccccccccctgcccagcggcctgttcggcctgggcatgaaccaggacaagggcagcagaaagcagcccatcgagccctgcagacccatgaagcccctgtactggaccagaatccagctgcacagcaagagagacagcagcaccagcctgatctgggagaagatcgaggagcccagcatcgactgccacgagttcgaggagctgttcagcaagaccgccgtgaaggagagaaagaagcccatcagcgacaccatcagcaagaccaaggccaagcaggtggtgaagctgctgagcaacaagagaagccaggccgtgggcatcctgatgagcagcctgcacctggacatgaaggacatccagcacgccgtggtgaacctggacaacagcgtggtggacctggagaccctgcaggccctgtacgagaacagagcccagagcgacgagctggagaagatcgagaagcacggcagaagcagcaaggacaaggagaacgccaagagcctggacaagcccgagcagttcctgtacgagctgagcctgatccccaacttcagcgagagagtgttctgcatcctgttccagagcaccttcagcgagagcatctgcagcatcagaagaaagctggagctgctgcagaagctgtgcgagaccctgaagaacggccccggcgtgatgcaggtgctgggcctggtgctggccttcggcaactacatgaacggcggcaacaagaccagaggccaggccgacggcttcggcctggacatcctgcccaagctgaaggacgtgaagagcagcgacaacagcagaagcctgctgagctacatcgtgagctactacctgagaaacttcgacgaggacgccggcaaggagcagtgcctgttccccctgcccgagccccaggacctgttccaggccagccagatgaagttcgaggacttccagaaggacctgagaaagctgaagaaggacctgaaggcctgcgaggtggaggccggcaaggtgtaccaggtgagcagcaaggagcacatgcagcccttcaaggagaacatggagcagttcatcatccaggccaagatcgaccaggaggccgaggagaacagcctgaccgagacccacaagtgcttcctggagaccaccgcctacttcttcatgaagcccaagctgggcgagaaggaggtgagccccaacgccttcttcagcatctggcacgagttcagcagcgacttcaaggacttctggaagaaggagaacaagctgctgctgcaggagagagtgaaggaggccgaggaggtgtgcagacagaagaagggcaagagcctgtacaagatcaagcccagacacgacagcggcatcaaggccaagatcagcatgaagacctag

SEQ ID NO: 9933 - DNA, 3048 bp, synthetic construct
  source 1..3048: mol_type = other DNA; note = Synthetic coding sequence
atgaccgtgagccagaagggcggcccccagcccacccccagccccgccggccccggcacccagctgggccccatcaccggcgagatggacgaggccgacagcgccttcctgaagttcaagcagaccgccgacgacagcctgagcctgaccagccccaacaccgagagcatcttcgtggaggacccctacaccgccagcctgagaagcgagatcgagagcgacggccacgagttcgaggccgagagctggagcctggccgtggacgccgcctacgccaagaagcagaagagagaggtggtgaagagacaggacgtgctgtacgagctgatgcagaccgaggtgcaccacgtgagaaccctgaagatcatgctgaaggtgtacagcagagccctgcaggaggagctgcagttcagcagcaaggccatcggcagactgttcccctgcgccgacgacctgctggagacccacagccacttcctggccagactgaaggagagaagacaggagagcctggaggagggcagcgacagaaactacgtgatccagaagatcggcgacctgctggtgcagcagttcagcggcgagaacggcgagagaatgaaggagaagtacggcgtgttctgcagcggccacaacgaggccgtgagccactacaagctgctgctgcagcagaacaagaagttccagaacctgatcaagaagatcggcaacttcagcatcgtgagaagactgggcgtgcaggagtgcatcctgctggtgacccagagaatcaccaagtaccccgtgctggtggagagaatcatccagaacaccgaggccggcaccgaggactacgaggacctgacccaggccctgaacctgatcaaggacatcatcagccaggtggacgccaaggtgagcgagtgcgagaagggccagagactgagagagatcgccggcaagatggacctgaagagcagcagcaagctgaagaacggcctgaccttcagaaaggaggacatgctgcagagacagctgcacctggagggcatgctgtgctggaagaccaccagcggcagactgaaggacatcctggccatcctgctgaccgacgtgctgctgctgctgcaggagaaggaccagaagtacgtgttcgccagcgtggacagcaagccccccgtgatcagcctgcagaagctgatcgtgagagaggtggccaacgaggagaaggccatgttcctgatcagcgccagcctgcagggccccgagatgtacgagatctacaccagcagcaaggaggacagaaacgcctggatggcccacatccagagagccgtggagagctgccccgacgaggaggagggccccttcagcctgcccgaggaggagagaaaggtggtggaggccagagccaccagactgagagacttccaggagagactgagcatgaaggaccagctgatcgcccagagcctgctggagaagcagcagatctacctggagatggccgagatgggcggcctggaggacctgccccagcccagaggcctgttcagaggcggcgaccccagcgagaccctgcagggcgagctgatcctgaagagcgccatgagcgagatcgagggcatccagagcctgatctgcagacagctgggcagcgccaacggccaggccgaggacggcggcagcagcaccggcccccccagaagagccgagaccttcgccggctacgactgcaccaacagccccaccaagaacggcagcttcaagaagaaggtgagcagcaccgaccccagacccagagactggagaggcccccccaacagccccgacctgaagctgagcgacagcgacatccccggcagcagcgaggagagcccccaggtggtggaggcccccggcaccgagagcgaccccagactgcccaccgtgctggagagcgagctggtgcagagaatccagaccctgagccagctgctgctgaacctgcaggccgtgatcgcccaccaggacagctacgtggagacccagagagccgccatccaggagagagagaagcagttcagactgcagagcaccagaggcaacctgctgctggagcaggagagacagagaaacttcgagaagcagagagaggagagagccgccctggagaagctgcagagccagctgagacacgagcagcagagatgggagagagagagacagtggcagcaccaggagctggagagagccggcgccagactgcaggagagagagggcgaggccagacagctgagagagagactggagcaggagagagccgagctggagagacagagacaggcctaccagcacgacctggagagactgagagaggcccagagagccgtggagagagagagagagagactggagctgctgagaagactgaagaagcagaacaccgcccccggcgccctgccccccgacaccctggccgaggcccagccccccagccacccccccagcttcaacggcgagggcctggagggccccagagtgagcatgctgcccagcggcgtgggccccgagtacgccgagagacccgaggtggccagaagagacagcgcccccaccgagaacagactggccaagagcgacgtgcccatccagctgctgagcgccaccaaccagttccagagacaggccgccgtgcagcagcagatccccaccaagctggccgccagcaccaagggcggcaaggacaagggcggcaagagcagaggcagccagagatgggagagcagcgccagcttcgacctgaagcagcagctgctgctgaacaagctgatgggcaaggacgagagcaccagcagaaacagaagaagcctgagccccatcctgcccggcagacacagccccgcccccccccccgaccccggcttccccgcccccagccccccccccgccgacagccccagcgagggcttcagcctgaaggccggcggcaccgccctgctgcccggcccccccgcccccagccccctgcccgccacccccctgagcgccaaggaggacgccagcaaggaggacgtgatcttcttctag

SEQ ID NO: 9934 - DNA, 2544 bp, synthetic construct
  source 1..2544: mol_type = other DNA; note = Synthetic coding sequence
atggaggccctgggccccggcggcgacagagccagccccgccagcagcaccagcagcctggacctgtggcacctgagcatgagagccgacagcgcctacagcagcttcagcgccgccagcggcggccccgagcccagaacccagagccccggcaccgacctgctgccctacctggactgggactacgtgagagtggtgtggggcggccccggccccgccccccccgacgccgccctgtgcaccagccccagacccagacccgccgtggccgccagaagcggcccccagcccaccgaggtgcccggcacccccggccccctgaacagacaggccacccccctgctgtacgccctggccgccgaggccgaggccgccgcccaggccgccgagccccccagcccccccgccagcagagccgcctacagacagagactgcagggcgcccagagaagagtgctgagagagaccagcttccagagaaaggagctgagaatgagcctgcccgccagactgagacccaccgtgcccgccagaccccccgccacccaccccagaagcgccagcctgagccaccccggcggcgagggcgagcccgccagaagcagagcccccgcccccggcaccgccggcagaggccccctggccaaccagcagagaaagtggtgcttcagcgagcccggcaagctggacagagtgggcagaggcggcggccccgccagagagtgcctgggcgaggcctgcagcagcagcggcctgcccggccccgagcccctggagttccagcaccccgccctggccaagttcgaggaccacgaggtgggctggctgcccgagacccagccccagggcagcatgaacctggacagcggcagcctgaagctgggcgacgccttcagacccgccagcagaagcagaagcgccagcggcgaggtgctgggcagctggggcggcagcggcggcaccatccccatcgtgcaggccgtgccccagggcgccgagacccccagacccctgttccagaccaagctgagcagattcctgccccagaaggaggccgccgtgatgtaccccgccgagctgccccagagcagccccgccgacagcgagcagagagtgagcgagacctgcatcgtgcccgcctggctgcccagcctgcccgacgaggtgttcctggaggaggcccccctggtgagaatgagaagcccccccgacccccacgccagccagggcccccccgccagcgtgcacgccagcgaccagccctacggcaccggcctgggccagagaaccggccaggtgaccgtgcccaccgagtaccccctgcacgagtgccccggcaccgccggcgccgacgactgctggcagggcgtgaacggcagcgtgggcatcagcagacccaccagccacacccccaccggcaccgccaacgacaacatccccaccatcgaccccaccggcctgaccaccaacccccccaccgccgccgagagcgacctgctgaagcccgtgcccgccgacgccctgggcctgagcggcaacgacacccccggccccagccacaacaccgccctggccagaggcaccggccagcccggcagcagacccacctggcccagccagtgcctggaggagctggtgcaggagctggccagactggaccccagcctgtgcgaccccctggccagccagcccagccccgagccccccctgggcctgctggacggcctgatccccctggccgaggtgagagccgccatgagacccgcctgcggcgaggccggcgaggaggccgccagcaccttcgagcccggcagctaccagttcagcttcacccagctgctgcccgcccccagagaggagaccagactggagaaccccgccacccaccccgtgctggaccagccctgcggccagggcctgcccgcccccaacaacagcatccagggcaagaaggtggagctggccgccagactgcagaagatgctgcaggacctgcacaccgagcaggagagactgcagggcgaggcccaggcctgggccagaagacaggccgccctggaggccgccgtgagacaggcctgcgccccccaggagctggagagattcagcagattcatggccgacctggagagagtgctgggcctgctgctgctgctgggcagcagactggccagagtgagaagagccctggccagagccgccagcgacagcgaccccgacgagcagagactgagactgctgcagagacaggaggaggacgccaaggagctgaaggagcacgtggccagaagagagagagccgtgagagaggtgctggtgagagccctgcccgtggaggagctgagagtgtactgcgccctgctggccggcaaggccgccgtgctggcccagcagagaaacctggacgagagaatcagactgctgcaggaccagctggacgccatcagagacgacctgggccaccacgcccccagccccagccccgccagaccccccggcacctgcccccccgtgcagccccccttccccctgctgctgacctag

SEQ ID NO: 9935 - DNA, 2502 bp, synthetic construct
  source 1..2502: mol_type = other DNA; note = Synthetic coding sequence
atgaagttcaccaacaccaaggtgcagatgatgcagaacgtgcacctggcccccgagaccgacgaggacgacctgtacagcggctacaacgactacaaccccatctacgacatcgaggagctggagaacgacgccgccttccagcaggccgtgagaaccagccacggcagaagaccccccatcaccgccaagatcagcagcaccgccgtgaccagacccatcgccaccggctacggcagcaagaccagcctggccagcagcatcggcagacccatgaccggcgccatccaggacggcgtgaccagacccatgaccgccgtgagagccgccggcttcaccaaggccgccctgagaggcagcgccttcgaccccctgagccagagcagaggccccgccagccccctggaggccaagaagaaggacagccccgaggagaagatcaagcagctggagaaggaggtgaacgagctggtggaggagagctgcatcgccaacagctgcggcgacctgaagctggccctggagaaggccaaggacgccggcagaaaggagagagtgctggtgagacagagagagcaggtgaccacccccgagaacatcaacctggacctgacctacagcgtgctgttcaacctggccagccagtacagcgtgaacgagatgtacgccgaggccctgaacacctaccaggtgatcgtgaagaacaagatgttcagcaacgccggcatcctgaagatgaacatgggcaacatctacctgaagcagagaaactacagcaaggccatcaagttctacagaatggccctggaccaggtgcccagcgtgaacaagcagatgagaatcaagatcatgcagaacatcggcgtgaccttcatccaggccggccagtacagcgacgccatcaacagctacgagcacatcatgagcatggcccccaacctgaaggccggctacaacctgaccatctgctacttcgccatcggcgacagagagaagatgaagaaggccttccagaagctgatcaccgtgcccctggagatcgacgaggacaagtacatcagccccagcgacgacccccacaccaacctggtgaccgaggccatcaagaacgaccacctgagacagatggagagagagagaaaggccatggccgagaagtacatcatgaccagcgccaagctgatcgcccccgtgatcgagaccagcttcgccgccggctacgactggtgcgtggaggtggtgaaggccagccagtacgtggagctggccaacgacctggagatcaacaaggccgtgacctacctgagacagaaggactacaaccaggccgtggagatcctgaaggtgctggagaagaaggacagcagagtgaagagcgccgccgccaccaacctgagcgccctgtactacatgggcaaggacttcgcccaggccagcagctacgccgacatcgccgtgaacagcgacagatacaaccccgccgccctgaccaacaagggcaacaccgtgttcgccaacggcgactacgagaaggccgccgagttctacaaggaggccctgagaaacgacagcagctgcaccgaggccctgtacaacatcggcctgacctacgagaagctgaacagactggacgaggccctggactgcttcctgaagctgcacgccatcctgagaaacagcgccgaggtgctgtaccagatcgccaacatctacgagctgatggagaaccccagccaggccatcgagtggctgatgcaggtggtgagcgtgatccccaccgacccccaggtgctgagcaagctgggcgagctgtacgacagagagggcgacaagagccaggccttccagtactactacgagagctacagatacttcccctgcaacatcgaggtgatcgagtggctgggcgcctactacatcgacacccagttctgggagaaggccatccagtacttcgagagagccagcctgatccagcccacccaggtgaagtggcagctgatggtggccagctgcttcagaagaagcggcaactaccagaaggccctggacacctacaaggacacccacagaaagttccccgagaacgtggagtgcctgagattcctggtgagactgtgcaccgacctgggcctgaaggacgcccaggagtacgccagaaagctgaagagactggagaagatgaaggagatcagagagcagagaatcaagagcggcagagacggcagcggcggcagcagaggcaagagagagggcagcgccagcggcgacagcggccagaactacagcgccagcagcaagggcgagagactgagcgccagactgagagccctgcccggcaccaacgagccctacgagagcagcagcaacaaggagatcgacgccagctacgtggaccccctgggcccccagatcgagagacccaagaccgccgccaagaagagaatcgacgaggacgacttcgccgacgaggagctgggcgacgacctgctgcccgagtag

SEQ ID NO: 9936 - DNA, 918 bp, synthetic construct; identical to SEQ ID NO: 9729
  source 1..918: mol_type = other DNA; note = Synthetic coding sequence

SEQ ID NO: 9937 - DNA, 1119 bp, synthetic construct
  source 1..1119: mol_type = other DNA; note = Synthetic coding sequence
atggacgtgctgagccccctgagcttcatcaaggtgagccacgtgagaatgcagggcatcctgctgctggtgttcgccaagtaccagcacctgccctacatccagatcctgagcaccaagagcacccccaccggcctgttcggctactggggcaacaagggcggcgtgaacatctgcctgaagctgtacggctactacgtgagcatcatcaactgccacctgcccccccacatcagcaacaactaccagagactggagcacttcgacagaatcctggagatgcagaactgcgagggcagagacatccccaacatcctggaccacgacctgatcatctggttcggcgacatgaacttcagaatcgaggacttcggcctgcacttcgtgagagagagcatcaagaacagatgctacggcggcctgtgggagaaggaccagctgagcatcgccaagaagcacgaccccctgctgagagagttccaggagggcagactgctgttcccccccacctacaagttcgacagaaacagcaacgactacgacaccagcgagaagaagagaaagcccgcctggaccgacagaatcctgtggagactgaagagacagccctgcgccggccccgacacccccatcccccccgccagccacttcagcctgagcctgagaggctacagcagccacatgacctacggcatcagcgaccacaagcccgtgagcggcaccttcgacctggagctgaagcccctggtgagcgcccccctgatcgtgctgatgcccgaggacctgtggaccgtggagaacgacatgatggtgagctacagcagcaccagcgacttccccagcagcccctgggactggatcggcctgtacaaggtgggcctgagagacgtgaacgactacgtgagctacgcctgggtgggcgacagcaaggtgagctgcagcgacaacctgaaccaggtgtacatcgacatcagcaacatccccaccaccgaggacgagttcctgctgtgctactacagcaacagcctgagaagcgtggtgggcatcagcagacccttccagatcccccccggcagcctgagagaggaccccctgggcgaggcccagccccagatctag

SEQ ID NO: 9938 - DNA, 1692 bp, synthetic construct
  source 1..1692: mol_type = other DNA; note = Synthetic coding sequence
atgagactggacctggccagcctgatgagcgcccccaagagcctgggcagcgccttcaagagctggagactggacaaggcccccagcccccagcacaccttccccagcaccagcatccccggcatggccttcgccctgctggccagcgtgccccccgtgttcggcctgtacaccagcttcttccccgtgctgatctacagcctgctgggcaccggcagacacctgagcaccggcaccttcgccatcctgagcctgatgaccggcagcgccgtggagagactggtgcccgagcccctggtgggcaacctgagcggcatcgagaaggagcagctggacgcccagagagtgggcgtggccgccgccgtggccttcggcagcggcgccctgatgctgggcatgttcgtgctgcagctgggcgtgctgagcaccttcctgagcgagcccgtggtgaaggccctgaccagcggcgccgccctgcacgtgctgctgagccagctgcccagcctgctgggcctgagcctgcccagacagatcggctgcttcagcctgttcaagaccctggccagcctgctgaccgccctgcccagaagcagccccgccgagctgaccatcagcgccctgagcctggccctgctggtgcccgtgaaggagctgaacgtgagattcagagacagactgcccacccccatccccggcgaggtggtgctggtgctgctggccagcgtgctgtgcttcaccagcagcgtggacaccagataccaggtgcagatcgtgggcctgctgcccggcggcttcccccagcccctgctgcccaacctggccgagctgcccagaatcctggccgacagcctgcccatcgccctggtgagcttcgccgtgagcgccagcctggccagcatccacgccgacaagtacagctacaccatcgacagcaaccaggagttcctggcccacggcgccagcaacctgatcagcagcctgttcagctgcttccccaacagcgccaccctggccaccaccaacctgctggtggacgccggcggcaagacccagctggccggcctgttcagctgcaccgtggtgctgagcgtgctgctgtggctgggccccttcttctactacctgcccaaggccgtgctggcctgcatcaacatcagcagcatgagacaggtgttctgccagatgcaggagctgccccagctgtggcacatcagcagagtggacttcctgctgcaggtgcccggcctgtgcatcctgagctaccccacccccctgtacttcggcaccagaggccagttcagatgcaacctggagtggcacctgggcctgggcgagggcgagaaggagaccagcaagcccgacggccccatggtggccgtggccgagcccgtgagagtggtggtgctggacttcagcggcgtgaccttcgccgacgccgccggcgccagagaggtggtgcaggtgagagagagactggccagcagatgcagagacgccagaatcagactgctgctggcccagtgcaacgccctggtgcagggcaccctgaccagagtgggcctgctggacagagtgacccccgaccagctgttcgtgagcgtgcaggacgccgccgcctacgccctgggcagcctgctgagaggcagcagcaccagaagcggcagccaggaggccctgggctgcggcaagtag

SEQ ID NO: 9939 - DNA, 2892 bp, synthetic construct
  source 1..2892: mol_type = other DNA; note = Synthetic coding sequence
atggccgagagaggcggcgccggcggcggccccggcggcgccggcggcggcagcggccagagaggcagcggcgtggcccagagcccccagcagccccccccccagcagcagcagcagcagcccccccagcagcccaccccccccaagctggcccaggccaccagcagcagcagcagcaccagcgccgccgccgccagcagcagcagcagcagcaccagcaccagcatggccgtggccgtggccagcggcagcgccccccccggcggccccggccccggcagaacccccgcccccgtgcagatgaacctgtacgccacctgggaggtggacagaagcagcagcagctgcgtgcccagactgttcagcctgaccctgaagaagctggtgatgctgaaggagatggacaaggacctgaacagcgtggtgatcgccgtgaagctgcagggcagcaagagaatcctgagaagcaacgagatcgtgctgcccgccagcggcctggtggagaccgagctgcagctgaccttcagcctgcagtacccccacttcctgaagagagacgccaacaagctgcagatcatgctgcagagaagaaagagatacaagaacagaaccatcctgggctacaagaccctggccgtgggcctgatcaacatggccgaggtgatgcagcaccccaacgagggcgccctggtgctgggcctgcacagcaacgtgaaggacgtgagcgtgcccgtggccgagatcaagatctacagcctgagcagccagcccatcgaccacgagggcatcaagagcaagctgagcgacagaagccccgacatcgacaactacagcgaggaggaggaggagagcttcagcagcgagcaggagggcagcgacgaccccctgcacggccaggacctgttctacgaggacgaggacctgagaaaggtgaagaagaccagaagaaagctgaccagcaccagcgccatcaccagacagcccaacatcaagcagaagttcgtggccctgctgaagagattcaaggtgagcgacgaggtgggcttcggcctggagcacgtgagcagagagcagatcagagaggtggaggaggacctggacgagctgtacgacagcctggagatgtacaaccccagcgacagcggccccgagatggaggagaccgagagcatcctgagcacccccaagcccaagctgaagcccttcttcgagggcatgagccagagcagcagccagaccgagatcggcagcctgaacagcaagggcagcctgggcaaggacaccaccagccccatggagctggccgccctggagaagatcaagagcacctggatcaagaaccaggacgacagcctgaccgagaccgacaccctggagatcaccgaccaggacatgttcggcgacgccagcaccagcctggtggtgcccgagaaggtgaagacccccatgaagagcagcaagaccgacctgcagggcagcgccagccccagcaaggtggagggcgtgcacacccccagacagaagagaagcacccccctgaaggagagacagctgagcaagcccctgagcgagagaaccaacagcagcgacagcgagagaagccccgacctgggccacagcacccagatccccagaaaggtggtgtacgaccagctgaaccagatcctggtgagcgacgccgccctgcccgagaacgtgatcctggtgaacaccaccgactggcagggccagtacgtggccgagctgctgcaggaccagagaaagcccgtggtgtgcacctgcagcaccgtggaggtgcaggccgtgctgagcgccctgctgaccagaatccagagatactgcaactgcaacagcagcatgcccagacccgtgaaggtggccgccgtgggcggccagagctacctgagcagcatcctgagattcttcgtgaagagcctggccaacaagaccagcgactggctgggctacatgagattcctgatcatccccctgggcagccaccccgtggccaagtacctgggcagcgtggacagcaagtacagcagcagcttcctggacagcggctggagagacctgttcagcagaagcgagccccccgtgagcgagcagctggacgtggccggcagagtgatgcagtacgtgaacggcgccgccaccacccaccagctgcccgtggccgaggccatgctgacctgcagacacaagttccccgacgaggacagctaccagaagttcatccccttcatcggcgtggtgaaggtgggcctggtggaggacagccccagcaccgccggcgacggcgacgacagccccgtggtgagcctgaccgtgcccagcaccagcccccccagcagcagcggcctgagcagagacgccaccgccaccccccccagcagccccagcatgagcagcgccctggccatcgtgggcagccccaacagcccctacggcgacgtgatcggcctgcaggtggactactggctgggccaccccggcgagagaagaagagagggcgacaagagagacgccagcagcaagaacaccctgaagagcgtgttcagaagcgtgcaggtgagcagactgccccacagcggcgaggcccagctgagcggcaccatggccatgaccgtggtgaccaaggagaagaacaagaaggtgcccaccatcttcctgagcaagaagcccagagagaaggaggtggacagcaagagccaggtgatcgagggcatcagcagactgatctgcagcgccaagcagcagcagaccatgctgagagtgagcatcgacggcgtggagtggagcgacatcaagttcttccagctggccgcccagtggcccacccacgtgaagcacttccccgtgggcctgttcagcggcagcaaggccacctag

SEQ ID NO: 9940 - DNA, 546 bp, synthetic construct
  source 1..546: mol_type = other DNA; note = Synthetic coding sequence
atggaggagatccccgcccaggaggccgccggcagccccagagtgcagttccagagcctggagacccagagcgagtgcctgagccccgagccccagttcgtgcaggacaccgacatggagcagggcctgaccggcgccccccccgtgccccaggtgcccgccctgcccagagagggcagccccggcgaccaggccgccgccctgctgaccgccagataccaggagttcgtgaccttcgaggacgtggccgtgcacctgaccagagaggagtggggctacctggaccccgtgcagagagacctgtacagagaggtgatgctggagaactacggcaacgtggtgagcctgggcatcctgctgagactgcccaccaccagaatccacagcgtgaacagctgccccgccctgagccacacccaggccagcgccttcagcggcgagaccctggccgtgctgaccgccggcatcagcaagagatggcccaagtacagactgcccatcgacatcgccagaccctgcagcgagacccccttccccagactgtag

SEQ ID NO: 9941 - DNA, 1410 bp, synthetic construct
  source 1..1410: mol_type = other DNA; note = Synthetic coding sequence
atggtgctggagggcaaccccgaggtgggcagccccagaaccagcgacctgcagcacagaggcaacaagggcagctgcgtgctgagcagccccggcgaggacgcccagcccggcgaggagcccatcaagtacggcgagctgatcgtgctgggctgctgcgaggagggcggcgaggagaccgaggcccagagaggcgaggtgaccggccccagagcccacagctgctacaacggctgcctggccagcggcgacaagggcagaagaagaagcagactggccctgagcagaagaagccacgccaacggcgtgaagcccgacgtgatgcaccacatcagcacccccctggtgagcaaggccctgagcaacagaggccagcacagcatcagctacaccctgagcagaagccacagcgtgatcgtggagtacacccacgacagcgacaccgacatgttccagatcggcagaagcaccgagaacatgatcgacttcgtggtgaccgacaccagccccggcggcggcgccgccgagggccccagcgcccagagcaccatcagcagatacgcctgcagaatcctgtgcgacagaagacccccctacaccgccagaatctacgccgccggcttcgacgccagcagcaacatcttcctgggcgagagagccgccaagtggagaacccccgacggcctgatggacggcctgaccaccaacggcgtgctggtgatgcaccccgccggcggcttcagcgaggacagcgcccccggcgtgtggagagagatcagcgtgtgcggcaacgtgtacaccctgagagacagcagaagcgcccagcagagaggcaagctggtggagaacgagagcaacgtgctgcaggacggcagcctgatcgacctgtgcggcgccaccctgctgtggagaacccccgccggcctgctgagagcccccaccctgaagcagctggaggcccagagacaggaggccaacgccgccagaccccagtgccccgtgggcctgagcaccctggccttccccagccccgccagaggcagaaccgcccccgacaagcagcagccctgggtgtacgtgagatgcggccacgtgcacggctaccacggctggggctgcagaagagagagaggcccccaggagagagagtgccccctgtgcagactggtgggcccctacgtgcccctgtggctgggccaggaggccggcctgtgcctggaccccggcccccccagccacgccttcgccccctgcggccacgtgtgcagcgagaagaccgccagatactgggcccagacccccctgccccacggcacccacgccttccacgccgcctgccccttctgcggcgcctggctgaccggcgagcacggctgcgtgagactgatcttccagggccccctggactag

SEQ ID NO: 9942 - DNA, 3312 bp, synthetic construct
  source 1..3312: mol_type = other DNA; note = Synthetic coding sequence
atggccggcgccagcgtgaaggtggccgtgagagtgagacccttcaacgccagagagaccagccaggacgccaagtgcgtggtgagcatgcagggcaacaccaccagcatcatcaaccccaagcagagcaaggacgcccccaagagcttcaccttcgactacagctactggagccacaccagcaccgaggacccccagttcgccagccagcagcaggtgtacagagacatcggcgaggagatgctgctgcacgccttcgagggctacaacgtgtgcatcttcgcctacggccagaccggcgccggcaagagctacaccatgatgggcagacaggagcccggccagcagggcatcgtgccccagctgtgcgaggacctgttcagcagagtgagcgagaaccagagcgcccagctgagctacagcgtggaggtgagctacatggagatctactgcgagagagtgagagacctgctgaaccccaagagcagaggcagcctgagagtgagagagcaccccatcctgggcccctacgtgcaggacctgagcaagctggccgtgaccagctacgccgacatcgccgacctgatggactgcggcaacaaggccagaaccgtggccgccaccaacatgaacgagaccagcagcagaagccacgccgtgttcaccatcgtgttcacccagagatgccacgaccagctgaccggcctggacagcgagaaggtgagcaagatcagcctggtggacctggccggcagcgagagagccgacagcagcggcgccagaggcatgagactgaaggagggcgccaacatcaacaagagcctgaccaccctgggcaaggtgatcagcgccctggccgacatgcagagcaagaagagaaagagcgacttcatcccctacagagacagcgtgctgacctggctgctgaaggagaacctgggcggcaacagcagaaccgccatgatcgccgccctgagccccgccgacatcaactacgaggagaccctgagcaccctgagatacgccgacagaaccaagcagatcagatgcaacgccatcatcaacgaggaccccaacgccagactgatcagagagctgcaggaggaggtggccagactgagagagctgctgatggcccagggcctgagcgccagcgccctggagggcctgaagaccgaggagggcagcgtgagaggcgccctgcccgccgtgagcagcccccccgcccccgtgagccccagcagccccaccacccacaacggcgagctggagcccagcttcagccccaacaccgagagccagatcggccccgaggaggccatggagagactgcaggagaccgagaagatcatcgccgagctgaacgagacctgggaggagaagctgagaaagaccgaggccctgagaatggagagagaggccctgctggccgagatgggcgtggccgtgagagaggacggcggcaccgtgggcgtgttcagccccaagaagaccccccacctggtgaacctgaacgaggaccccctgatgagcgagtgcctgctgtaccacatcaaggacggcgtgaccagagtgggccaggtggacatggacatcaagctgaccggccagttcatcagagagcagcactgcctgttcagaagcatcccccagcccgacggcgaggtggtggtgaccctggagccctgcgagggcgccgagacctacgtgaacggcaagctggtgaccgagcccctggtgctgaagagcggcaacagaatcgtgatgggcaagaaccacgtgttcagattcaaccaccccgagcaggccagactggagagagagagaggcgtgccccccccccccggcccccccagcgagcccgtggactggaacttcgcccagaaggagctgctggagcagcagggcatcgacatcaagctggagatggagaagagactgcaggacctggagaaccagtacagaaaggagaaggaggaggccgacctgctgctggagcagcagagactgtacgccgacagcgacagcggcgacgacagcgacaagagaagctgcgaggagagctggagactgatcagcagcctgagagagcagctgccccccaccaccgtgcagaccatcgtgaagagatgcggcctgcccagcagcggcaagagaagagcccccagaagagtgtaccagatcccccagagaagaagactgcagggcaaggaccccagatgggccaccatggccgacctgaagatgcaggccgtgaaggagatctgctacgaggtggccctggccgacttcagacacggcagagccgagatcgaggccctggccgccctgaagatgagagagctgtgcagaacctacggcaagcccgacggccccggcgacgcctggagagccgtggccagagacgtgtgggacaccgtgggcgaggaggagggcggcggcgccggcagcggcggcggcagcgaggagggcgccagaggcgccgaggtggaggacctgagagcccacatcgacaagctgaccggcatcctgcaggaggtgaagctgcagaacagcagcaaggacagagagctgcaggccctgagagacagaatgctgagaatggagagagtgatccccctggcccaggaccacgaggacgagaacgaggagggcggcgaggtgccctgggccccccccgagggcagcgaggccgccgaggaggccgcccccagcgacagaatgcccagcgccagaccccccagcccccccctgagcagctgggagagagtgagcagactgatggaggaggaccccgccttcagaagaggcagactgagatggctgaagcaggagcagctgagactgcagggcctgcagggcagcggcggcagaggcggcggcctgagaagaccccccgccagattcgtgcccccccacgactgcaagctgagattccccttcaagagcaacccccagcacagagagagctggcccggcatgggcagcggcgaggcccccacccccctgcagccccccgaggaggtgaccccccaccccgccacccccgccagaagaccccccagccccagaagaagccaccaccccagaagaaacagcctggacggcggcggcagaagcagaggcgccggcagcgcccagcccgagccccagcacttccagcccaagaagcacaacagctacccccagcccccccagccctaccccgcccagagaccccccggccccagataccccccctacaccaccccccccagaatgagaagacagagaagcgcccccgacctgaaggagagcggcgccgccgtgtag

SEQ ID NO: 9943 - DNA, 1260 bp, synthetic construct
  source 1..1260: mol_type = other DNA; note = Synthetic coding sequence
atggccgagcccgtgggcaagagaggcagatggagcggcggcagcggcgccggcagaggcggcagaggcggctggggcggcagaggcagaagacccagagcccagagaagccccagcagaggcaccctggacgtggtgagcgtggacctggtgaccgacagcgacgaggagatcctggaggtggccaccgccagaggcgccgccgacgaggtggaggtggagccccccgagccccccggccccgtggccagcagagacaacagcaacagcgacagcgagggcgaggacagaagacccgccggcccccccagagagcccgtgagaagaagaagaagactggtgctggaccccggcgaggcccccctggtgcccgtgtacagcggcaaggtgaagagcagcctgagactgatccccgacgacctgagcctgctgaagctgtacccccccggcgacgaggaggaggccgagctggccgacagcagcggcctgtaccacgagggcagccccagccccggcagcccctggaagaccaagctgagaaccaaggacaaggaggagaagaagaagaccgagttcctggacctggacaacagccccctgagcccccccagccccagaaccaagagcagaacccacaccagagccctgaagaagctgagcgaggtgaacaagagactgcaggacctgagaagctgcctgagccccaagcccccccagggccaggagcagcagggccaggaggacgaggtggtgctggtggagggccccaccctgcccgagacccccagactgttccccctgaagatcagatgcagagccgacctggtgagactgcccctgagaatgagcgagcccctgcagagcgtggtggaccacatggccacccacctgggcgtgagccccagcagaatcctgctgctgttcggcgagaccgagctgagccccaccgccacccccagaaccctgaagctgggcgtggccgacatcatcgactgcgtggtgctgaccagcagccccgaggccaccgagaccagccagcagctgcagctgagagtgcagggcaaggagaagcaccagaccctggaggtgagcctgagcagagacagccccctgaagaccctgatgagccactacgaggaggccatgggcctgagcggcagaaagctgagcttcttcttcgacggcaccaagctgagcggcagagagctgcccgccgacctgggcatggagagcggcgacctgatcgaggtgtggggctag

SEQ ID NO: 9944 - DNA, 384 bp, synthetic construct
  source 1..384: mol_type = other DNA; note = Synthetic coding sequence
atgagacccctggacatcgtggagctggccgagcccgaggaggtggaggtgctggagcccgaggaggacttcgagcagttcctgctgcccgtgatcaacgagatgagagaggacatcgccagcctgaccagagagcacggcagagcctacctgagaaacagaagcaagctgtgggagatggacaacatgctgatccagatcaagacccaggtggaggccagcgaggagagcgccctgaaccacctgcagaaccccggcgacgccgccgagggcagagccgccaagagatgcgagaaggccgaggagaaggccaaggagatcgccaagatggccgagatgctggtggagctggtgagaagaatcgagaagagcgagagcagctag

SEQ ID NO: 9945 - DNA, 1263 bp, synthetic construct
  source 1..1263: mol_type = other DNA; note = Synthetic coding sequence
atgcccctgcaggtgagcgactacagctggcagcagaccaagaccgccgtgttcctgagcctgcccctgaagggcgtgtgcgtgagagacaccgacgtgttctgcaccgagaactacctgaaggtgaacttcccccccttcctgttcgaggccttcctgtacgcccccatcgacgacgagagcagcaaggccaagatcggcaacgacaccatcgtgttcaccctgtacaagaaggaggccgccatgtgggagaccctgagcgtgaccggcgtggacaaggagatgatgcagagaatcagagagaagagcatcctgcaggcccaggagagagccaaggaggccaccgaggccaaggccgccgccaagagagaggaccagaagtacgccctgagcgtgatgatgaagatcgaggaggaggagagaaagaagatcgaggacatgaaggagaacgagagaatcaaggccaccaaggccctggaggcctggaaggagtaccagagaaaggccgaggagcagaagaagatccagagagaggagaagctgtgccagaaggagaagcagatcaaggaggagagaaagaagatcaagtacaagagcctgaccagaaacctggccagcagaaacctggcccccaagggcagaaacagcgagaacatcttcaccgagaagctgaaggaggacagcatccccgcccccagaagcgtgggcagcatcaagatcaacttcacccccagagtgttccccaccgccctgagagagagccaggtggccgaggaggaggagtggctgcacaagcaggccgaggccagaagagccatgaacaccgacatcgccgagctgtgcgacctgaaggaggaggagaagaaccccgagtggctgaaggacaagggcaacaagctgttcgccaccgagaactacctggccgccatcaacgcctacaacctggccatcagactgaacaacaagatgcccctgctgtacctgaacagagccgcctgccacctgaagctgaagaacctgcacaaggccatcgaggacagcagcaaggccctggagctgctgatgccccccgtgaccgacaacgccaacgccagaatgaaggcccacgtgagaagaggcaccgccttctgccagctggagctgtacgtggagggcctgcaggactacgaggccgccctgaagatcgaccccagcaacaagatcgtgcagatcgacgccgagaagatcagaaacgtgatccagggcaccgagctgaagagctag

SEQ ID NO: 9946 - DNA, 348 bp, synthetic construct
  source 1..348: mol_type = other DNA; note = Synthetic coding sequence
atgagatacgtggccagctacctgctggccgccctgggcggcaacagcagccccagcgccaaggacatcaagaagatcctggacagcgtgggcatcgaggccgacgacgacagactgaacaaggtgatcagcgagctgaacggcaagaacatcgaggacgtgatcgcccagggcatcggcaagctggccagcgtgcccgccggcggcgccgtggccgtgagcgccgcccccggcagcgccgcccccgccgccggcagcgcccccgccgccgccgaggagaagaaggacgagaagaaggaggagagcgaggagagcgacgacgacatgggcttcggcctgttcgactag

SEQ ID NO: 9947 - DNA, 1233 bp, synthetic construct
  source 1..1233: mol_type = other DNA; note = Synthetic coding sequence
ctgaacagagcctgcttctgcgtgaccggcgtgcccgagctggaggtgatctgcggcctgcagcaggccgagtggcccagactgggcctgagccacctgggcgccgtgggcggcggctggggcggcctgcccaccagcacctgggtgagcctgcacacccaggaggtggacctggccagcgaggtggccctggaggtggtgagaaccgccgagcccggcgtgtggctggaggcccaggcccccgtggccctggtggcccagcccgagcccctgcccgccaccgccggcgtgaagagagagagcgtgggcatggaggtggccgtgctgaccgacgaccccctgcccgtggtggaccagcagcaggtgctggccagactgcagctgctggagcagcaggtggtgggcggcgagcaggccaagaacaaggacctgaaggagaagcacaagagaagaaagagatacgccgacgagagaagaaagcagctggtggccgccctgcagaacagcgacgaggacagcggcgactgggtgctgctgaacgtgtacgacagcatccaggaggaggtgagagccaagagcaagctgctggagaagatgcagagaaagctgagagccgccgaggtggagatcaaggacctgcagagcgagttccagctggagaagatcgactacctggccaccatcagaagacaggagagagacagcatgctgctgcagcagctgctggagcaggtgcagcccctgatcagaagagactgcaactacagcaacctggagaagatcctgagagagagctgctgggacgaggacaacggcttctggaagatcccccaccccgtgatcaccaagaccagcctgcccgtggccgtgagcaccggcccccagaacaagcccgccagaaagaccagcgccgccgacaacggcgagcccaacatggaggacgacagatacagactgatgctgagcagaagcaacagcgagaacatcgccagcaactacttcagaagcaagagagccagccagatcctgagcaccgacgccagaaagagcctgacccaccacaacagcccccccggcctgagctgccccctgagcaacaacagcgccatcccccccacccaggcccccgagatgccccagcccagacccttcagactggagagcctggacatccccttcaccaaggccaagagaaagaagagcaagagcaacttcggcagcgagcccctgtag

SEQ ID NO: 9948 - DNA, 1353 bp, synthetic construct
  source 1..1353: mol_type = other DNA; note = Synthetic coding sequence
atgagagagtgcatcagcatccacgtgggccaggccggcgtgcagatcggcaacgcctgctgggagctgtactgcctggagcacggcatccagcccgacggccagatgcccagcgacaagaccatcggcggcggcgacgacagcttcaacaccttcttcagcgagaccggcgccggcaagcacgtgcccagagccgtgttcgtggacctggagcccaccgtggtggacgaggtgagaaccggcacctacagacagctgttccaccccgagcagctgatcaccggcaaggaggacgccgccaacaactacgccagaggccactacaccatcggcaaggagatcgtggacctggtgctggacagaatcagaaagctggccgacctgtgcaccggcctgcagggcttcctgatcttccacagcttcggcggcggcaccggcagcggcttcgccagcctgctgatggagagactgagcgtggactacggcaagaagagcaagctggagttcgccatctaccccgccccccaggtgagcaccgccgtggtggagccctacaacagcatcctgaccacccacaccaccctggagcacagcgactgcgccttcatggtggacaacgaggccatctacgacatctgcagaagaaacctggacatcgagagacccacctacaccaacctgaacagactgatcggccagatcgtgagcagcatcaccgccagcctgagattcgacggcgccctgaacgtggacctgaccgagttccagaccaacctggtgccctaccccagaatccacttccccctggccacctacgcccccgtgatcagcgccgagaaggcctaccacgagcagctgagcgtggccgagatcaccaacgcctgcttcgagcccgccaaccagatggtgaagtgcgaccccagacacggcaagtacatggcctgctgcatgctgtacagaggcgacgtggtgcccaaggacgtgaacgccgccatcgccaccatcaagaccaagagaaccatccagttcgtggactggtgccccaccggcttcaaggtgggcatcaactaccagccccccaccgtggtgcccggcggcgacctggccaaggtgcagagagccgtgtgcatgctgagcaacaccaccgccatcgccgaggcctgggccagactggaccacaagttcgacctgatgtacgccaagagagccttcgtgcactggtacgtgggcgagggcatggaggagggcgagttcagcgaggccagagaggacctggccgccctggagaaggactacgaggaggtgggcgtggacagcgtggaggccgaggccgaggagggcgaggagtactag

SEQ ID NO: 9949 - DNA, 471 bp, synthetic construct
  source 1..471: mol_type = other DNA; note = Synthetic coding sequence
atgagcggcggcctgctgaaggccctgagaagcgacagctacgtggagctgagccagtacagagaccagcacttcagaggcgacaacgaggagcaggagaagctgctgaagaagagctgcaccctgtacgtgggcaacctgagcttctacaccaccgaggagcagatctacgagctgttcagcaagagcggcgacatcaagaagatcatcatgggcctggacaagatgaagaagaccgcctgcggcttctgcttcgtggagtactacagcagagccgacgccgagaacgccatgagatacatcaacggcaccagactggacgacagaatcatcagaaccgactgggacgccggcttcaaggagggcagacagtacggcagaggcagaagcggcggccaggtgagagacgagtacagacaggactacgacgccggcagaggcggctacggcaagctggcccagaaccagtag

SEQ ID NO: 9950 - DNA, 996 bp, synthetic construct
  source 1..996: mol_type = other DNA; note = Synthetic coding sequence
atgggcggcgagcaggaggaggagagattcgacggcatgctgctggccatggcccagcagcacgagggcggcgtgcaggagctggtgaacaccttcttcagcttcctgagaagaaagaccgacttcttcatcggcggcgaggagggcatggccgagaagctgatcacccagaccttcagccaccacaaccagctggcccagaagaccagaagagagaagagagccagacaggaggccgagagaagagagaaggccgagagagccgccagactggccaaggaggccaagagcgagaccagcggcccccagatcaaggagctgaccgacgaggaggccgagagactgcagctggagatcgaccagaagaaggacgccgagaaccacgaggcccagctgaagaacggcagcctggacagccccggcaagcaggacaccgaggaggacgaggaggaggacgagaaggacaagggcaagctgaagcccaacctgggcaacggcgccgacctgcccaactacagatggacccagaccctgagcgagctggacctggccgtgcccttctgcgtgaacttcagactgaagggcaaggacatggtggtggacatccagagaagacacctgagagtgggcctgaagggccagcccgccatcatcgacggcgagctgtacaacgaggtgaaggtggaggagagcagctggctgatcgaggacggcaaggtggtgaccgtgcacctggagaagatcaacaagatggagtggtggagcagactggtgagcagcgaccccgagatcaacaccaagaagatcaaccccgagaacagcaagctgagcgacctggacagcgagaccagaagcatggtggagaagatgatgtacgaccagagacagaagagcatgggcctgcccaccagcgacgagcagaagaagcaggagatcctgaagaagttcatggaccagcaccccgagatggacttcagcaaggccaagttcaactag

SEQ ID NO: 9951 - DNA, 1860 bp, synthetic construct
  source 1..1860: mol_type = other DNA; note = Synthetic coding sequence
atggccggccccggcgtgcccggcgcccccgccgccagatggaagagacacatcgtgagacagctgagactgagagacagaacccagaaggccctgttcctggagctggtgcccgcctacaaccacctgctggagaaggccgagctgctggacaagttcagcaagaagctgcagcccgagcccaacagcgtgacccccaccacccaccagggcccctgggaggagagcgagctggacagcgaccaggtgcccagcctggtggccctgagagtgaagtggcaggaggaggaggagggcctgagactggtgtgcggcgagatggcctaccaggtggtggagaagggcgccgccctgggcaccctggagagcgagctgcagcagagacagagcagactggccgccctggaggccagagtggcccagctgagagaggccagagcccagcaggcccagcaggtggaggagtggagagcccagaacgccgtgcagagagccgcctacgaggccctgagagcccacgtgggcctgagagaggccgccctgagaagactgcaggaggaggccagagacctgctggagagactggtgcagagaaaggccagagccgccgccgagagaaacctgagaaacgagagaagagagagagccaagcaggccagagtgagccaggagctgaagaaggccgccaagagaaccgtgagcatcagcgagggccccgacaccctgggcgacggcatgagagagagaagagagaccctggccctggcccccgagcccgagcccctggagaaggaggcctgcgagaagtggaagagacccttcagaagcgccagcgccaccagcctgaccctgagccactgcgtggacgtggtgaagggcctgctggacttcaagaagagaagaggccacagcatcggcggcgcccccgagcagagataccagatcatccccgtgtgcgtggccgccagactgcccaccagagcccaggacgtgctggacgcccacctgagcgaggtgaacgccgtgagattcggccccaacagcagcctgctggccaccggcggcgccgacagactgatccacctgtggaacgtggtgggcagcagactggaggccaaccagaccctggagggcgccggcggcagcatcaccagcgtggacttcgaccccagcggctaccaggtgctggccgccacctacaaccaggccgcccagctgtggaaggtgggcgaggcccagagcaaggagaccctgagcggccacaaggacaaggtgaccgccgccaagttcaagctgaccagacaccaggccgtgaccggcagcagagacagaaccgtgaaggagtgggacctgggcagagcctactgcagcagaaccatcaacgtgctgagctactgcaacgacgtggtgtgcggcgaccacatcatcatcagcggccacaacgaccagaagatcagattctgggacagcagaggcccccactgcacccaggtgatccccgtgcagggcagagtgaccagcctgagcctgagccacgaccagctgcacctgctgagctgcagcagagacaacaccctgaaggtgatcgacctgagagtgagcaacatcagacaggtgttcagagccgacggcttcaagtgcggcagcgactggaccaaggccgtgttcagccccgacagaagctacgccctggccggcagctgcgacggcgccctgtacatctgggacgtggacaccggcaagctggagagcagactgcagggcccccactgcgccgccgtgaacgccgtggcctggtgctacagcggcagccacatggtgagcgtggaccagggcagaaaggtggtgctgtggcagtag

SEQ ID NO: 9952 - DNA, 5049 bp, synthetic construct
  source 1..5049: mol_type = other DNA; note = Synthetic coding sequence
atggagggcaacggcaccgagaacagctgcagcagaaccagaggctggctgcagcaggacaacgacgccaagccctggctgtggaagttcagcaactgcttcagcagacccgagcagaccctgccccacagcccccagaccaaggagtacatggagaacaagaaggtggccgtggagctgaaggacgtgcccagccccctgcacgccggcagcaagctgttccccgccgtgcccctgcccgacatcagaagcctgcagcagcccaagatccagctgagcagcgtgcccaaggtgagctgctgcgcccactgccccaacgagcccagcaccagccccatgagattcggcggcggcggcggcggcagcggcggcaccagcagcctgatccaccccggcgccctgctggacagccagagcaccagaaccatcacctgccaggtgggcagcggcttcgccttccagagcgccagcagcctgcagaacgccagcgccagaaacaacctggccggcatcgccagcgacttccccagcatgtgcctggagagcaacctgagcagctgcaagcacctgccctgctgcggcaagctgcacttccagagctgccacggcaacgtgcacaagctgcaccagttccccagcctgcagggctgcaccagcgccggctacttcccctgcagcgacttcaccagcggcgcccccggccacctggaggagcacatcagccagagcgagctgaccccccacctgtgcaccaacagcctgcacctgaacgtggtgccccccgtgtgcctgaagggcagcctgtactgcgaggactgcctgaacaagcccgccagaaacagcatcatcgacgccgccaaggtgtggcccaacatccccccccccaacacccagcccgcccccctggccgtgcccctgtgcaacggctgcggcaccaagggcaccggcaaggagaccaccctgctgctggccaccagcctgggcaaggccgccagcaagttcggcagccccgaggtggccgtggccggccaggtgctggagaacctgccccccatcggcgtgttctgggacatcgagaactgcagcgtgcccagcggcagaagcgccaccgccgtggtgcagagaatcagagagaagttcttcaagggccacagagaggccgagttcatctgcgtgtgcgacatcagcaaggagaacaaggaggtgatccaggagctgaacaactgccaggtgaccgtggcccacatcaacgccaccgccaagaacgccgccgacgacaagctgagacagagcctgagaagattcgccaacacccacaccgcccccgccaccgtggtgctggtgagcaccgacgtgaacttcgccctggagctgagcgacctgagacacagacacggcttccacatcatcctggtgcacaagaaccaggccagcgaggccctgctgcaccacgccaacgagctgatcagattcgaggagttcatcagcgacctgccccccagactgcccctgaagatgccccagtgccacaccctgctgtacgtgtacaacctgcccgccaacaaggacggcaagagcgtgagcaacagactgagaagactgagcgacaactgcggcggcaaggtgctgagcatcaccggctgcagcgccatcctgagattcatcaaccaggacagcgccgagagagcccagaagagaatggagaacgaggacgtgttcggcaacagaatcatcgtgagcttcacccccaagaacagagagctgtgcgagaccaagagcagcaacgccatcgccgacaaggtgaagagccccaagaagctgaagaaccccaagctgtgcctgatcaaggacgccagcgagcagagcagcagcgccaaggccacccccggcaagggcagccaggccaacagcggcagcgccaccaagaacaccaacgtgaagagcctgcaggagctgtgcagaatggagagcaagaccggccacagaaacagcgagcaccagcagggccacctgagactggtggtgcccacccacggcaacagcagcgccgccgtgagcacccccaagaacagcggcgtggccgagcccgtgtacaagaccagccagaagaaggagaacctgagcgccagaagcgtgaccagcagccccgtggagaagaaggacaaggaggagaccgtgttccaggtgagctaccccagcgccttcagcaagctggtggccagcagacaggtgagccccctgctggccagccagagctggagcagcagaagcatgagccccaacctgctgaacagagccagccccctggccttcaacatcgccaacagcagcagcgaggccgactgccccgaccccttcgccaacggcgccgacgtgcaggtgagcaacatcgactacagactgagcagaaaggagctgcagcagctgctgcaggaggccttcgccagacacggcaaggtgaagagcgtggagctgagcccccacaccgactaccagctgaaggccgtggtgcagatggagaacctgcaggacgccatcggcgccgtgaacagcctgcacagatacaagatcggcagcaagaagatcctggtgagcctggccaccggcgccgccagcaagagcctgagcctgctgagcgccgagaccatgagcgtgctgcaggacgcccccgcctgctgcctgcccctgttcaagttcaccgacatctacgagaagaagttcggccacaagctgaacgtgagcgacctgtacaagctgaccgacaccgtggccatcagagagcagggcaacggcagactggtgtgcctgctgcccagcagccaggccagacagagccccctgggcagcagccagagccacgacggcagcagcaccaactgcagccccatcatcttcgaggagctggagtaccacgagcccgtgtgcagacagcactgcagcaacaaggacttcagcgagcacgagttcgaccccgacagctacaagatccccttcgtgatcctgagcctgaagaccttcgccccccaggtgcacagcctgctgcagacccacgagggcaccgtgcccctgctggacccctggctgctgagaagcaagagccccgtgggcaacccccagctgatccagttcagcagagaggtgatcgacctgctgaagagccagcccagctgcgtgatccccatcagccacttcatccccagctaccaccaccacttcgccaagcagtgcagagtgagcgactacggctacagcaagctgatcgagctgctggaggccgtgccccacgtgctgcagatcctgggcatgggcagcaagagactgctgaccctgacccacagagcccaggtgaagagattcacccaggacctgctgaagctgctgaagagccaggccagcaagcaggtgatcgtgagagagttcagccaggcctaccactggtgcttcagcaaggactgggacgtgaccgagtacggcgtgtgcgagctgatcgacatcgtgagcgagatccccgacaccaccatctgcctgagccagcaggacaacgagatggtgatctgcatccccaagagagagagaacccaggacgagatcgagagaaccaagcagttcagcaaggacgtggtggacctgctgagacaccagccccacttcagaatgcccttcaacaagttcatccccagctaccaccaccacttcggcagacagtgcaagctggcctactacggcttcaccaagctgctggagctgttcgaggccatccccgacaccctgcaggtgctggagtgcggcgaggagaagatcctgaccctgaccgaggtggagagattcaaggccctggccgcccagttcgtgaagctgctgagaagccagaaggacaactgcctgatgatgaccgacctgctgaccgagtacgccaagaccttcggctacaccttcagactgcaggactacgacgtgagcagcatcagcgccctgacccagaagctgtgccacgtggtgaaggtggccgacatcgagagcggcagacagatccagctgatcaacagaaagagcctgagaagcctgaccgcccagctgctggtgctgctgatgagctgggagggcaccacccacctgagcgtggaggagctgaagagacactacgagagcacccacaacacccccctgaacccctgcgagtacggcttcatgaccctgaccgagctgctgaagagcctgccctacctggtggaggtgttcaccaacgacaagatggaggagtgcgtgaagctgaccagcctgtacctgttcgccaagaacgtgagaagcctgctgcacacctaccactaccagcagatcttcctgcacgagttcagcatggcctacaccaagtacgtgggcgagaccctgcagcccaagacctacggccacagcagcgtggaggagctgctgggcgccatcccccaggtggtgtggatcaagggccacggccacaagagaatcgtggtgctgaagaacgacatgaagagcagactgagcagcctgagcctgagccccgccaaccacgagaaccagcccagcgagggcgagagaatcctggaggtgcccgagagccacaccgccagcgagctgaagctgggcgccgacggcagcggccccagccacaccgagcaggagctgctgagactgaccgacgacagccccgtggacctgctgtgcgcccccgtgcccagctgcctgcccagcccccagctgagacccgaccccgtgatcctgcagagcgccgacctgatccagttcgaggagagaccccaggagcccagcgagatcatgatcctgaaccaggaggagaagatggagatccccatccccggcaagagcaagaccctgaccagcgacagcagcagcagctgcatcagcgccgccgtgcccgtgcccccctgccccagcagcgagaccagcgagagcctgctgagcaaggaccccgtggagagccccgccaagaagcagcccaagaacagagtgaagctggccgccaacttcagcctggcccccatcaccaagctgtag

SEQ ID NO: 9953 - DNA, 735 bp, synthetic construct
  source 1..735: mol_type = other DNA; note = Synthetic coding sequence
ggcggcggctacgacctgaacctgttcgccagcccccccgacagcaacttcgtgtgcagcgtgtgccacggcgtgctgaagagacccgccagactgccctgcagccacatcttctgcaagaagtgcatcctgagatggctggccagacagaagacctgcccctgctgcagaaaggaggtgaagagaaagaaggtggtgcacatgaacaagctgagaaagaccatcggcagactggaggtgaagtgcaagaacgccgacgccggctgcatcgtgacctgccccctggcccacagaaagggccaccaggacagctgccccttcgagctgaccgcctgccccaacgagggctgcaccagccaggtgcccagaggcaccctggccgagcacagacagcactgccagcagggcagccagcagagatgccccctgggctgcggcgccaccctggaccccgccgagagagccagacacaactgctacagagagctgcacaacgcctggagcgtgagacaggagagaagaagacccctgctgctgagcctgctgagaagagtgagatggctggaccaggccaccagcgtggtgagaagagagctggccgagctgagcaacttcctggaggaggacaccgccctgctggagggcgccccccaggaggaggccgaggccgcccccgagggcaacgtgggcgccgaggtggtgggcgagcccagagccaacatcccctgcaagtag

SEQ ID NO: 9954 - DNA, 705 bp, synthetic construct
  source 1..705: mol_type = other DNA; note = Synthetic coding sequence
ctgccctgcaagagatgcagacccagcgtgtacagcctgagctacatcaagagaggcaagaccagaaactacctgtaccccatctggagcccctacgcctactacctgtactgctacaagtacagaatcaccctgagagagaagatgctgcccagatgctacaagagcatcacctacaaggaggaggaggacctgaccctgcagcccagaagctgcctgcagtgcgagagcctggtgggcctgcaggagggcaagagcaccgagcagggcaaccacgaccagctgaaggagctgtacagcgccggcaacctgaccgtgctggccaccgaccccctgctgcaccaggaccccgtgcagctggacttccacttcagactgaccagccagaccagcgcccactggcacggcctgctgtgcgacagaagactgttcctggacatcccctaccaggccctggaccagggcaacagagagagcctgaccgccaccctggagtacgtggaggagaagaccaacgtggacagcgtgttcgtgaacttccagaacgacagaaacgacagaggcgccctgctgagagccttcagctacatgggcttcgaggtggtgagacccgaccaccccgccctgccccccctggacaacgtgatcttcatggtgtaccccctggagagagacgtgggccacctgcccagcgagcccccctag

SEQ ID NO: 9955 - DNA, 2403 bp, synthetic construct
  source 1..2403: mol_type = other DNA; note = Synthetic coding sequence
atggccgccgccgccagcgtgaccggcagagtgacctgggccgccagccccatgagaagcctgggcctgggcagaagactgagcctgcccggccccagactggacgccgtgaccgccgccgtgaaccccagcctgagcgaccacggcaacggcctgggcagaggcaccagaggcagcggctgcagcggcggcagcctggtggccgactggggcggcggcgccgccgccgccgccgccgtggccctggccctggcccccgccctgagcaccatgagaagaggcagcagcgagagcgagctggccgccagatgggaggccgaggccgtggccgccgccaaggccgccgccaaggccgaggccgaggccaccgccgagaccgtggccgagcaggtgagagtggacgccggcgccgccggcgagcccgagtgcaaggccggcgaggagcagcccaaggtgctggcccccgcccccgcccagcccagcgccgccgaggagggcaacacccaggtgctgcagagacccccccccaccctgccccccagcaagcccaagcccgtgcagggcctgtgcccccacggcaagcccagagacaagggcagaagctgcaagagaagcagcggccacggcagcggcgagaacggcagccagagacccgtgaccgtggacagcagcaaggccagaaccagcctggacgccctgaagatcagcatcagacagctgaagtggaaggagttccccttcggcagaagactgccctgcgacatctactggcacggcgtgagcttccacgacaacgacatcttcagcggccaggtgaacaagttccccggcatgaccgagatggtgagaaagatcaccctgagcagagccgtgagaaccatgcagaacctgttccccgaggagtacaacttctaccccagaagctggatcctgcccgacgagttccagctgttcgtggcccaggtgcagatggtgaaggacgacgaccccagctggaagcccaccttcatcgtgaagcccgacggcggctgccagggcgacggcatctacctgatcaaggaccccagcgacatcagactggccggcaccctgcagagcagacccgccgtggtgcaggagtacatctgcaagcccctgctgatcgacaagctgaagttcgacatcagactgtacgtgctgctgaagagcctggaccccctggagatctacatcgccaaggacggcctgagcagattctgcaccgagccctaccaggagcccacccccaagaacctgcacagaatcttcatgcacctgaccaactacagcctgaacatccacagcggcaacttcatccacagcgacagcgccagcaccggcagcaagagaaccttcagcagcatcctgtgcagactgagcagcaagggcgtggacatcaagaaggtgtggagcgacatcatcagcgtggtgatcaagaccgtgatcgccctgacccccgagctgaaggtgttctaccagagcgacatccccaccggcagacccggccccacctgcttccagatcctgggcttcgacatcctgctgatgaagaacctgaagcccatcctgctggaggtgaacgccaaccccagcatgagaatcgagcacgagcacgagctgagccccggcgtgttcgagaacgtgcccagcctggtggacgaggaggtgaaggtggccgtgatcagagacaccctgagactgatggaccccctgaagaagaagagagagaaccagagccagcagctggagaagcccttcgccggcaaggaggacgccctggacggcgagctgaccagcgcccccgactgcaacgccaaccccgaggcccacctgcccagcatctgcctgaagcaggtgttccccaagtacgccaagcagttcaactacctgagactggtggacagaatggccaacctgttcatcagattcctgggcatcaagggcaccatgaagctgggccccaccggcttcagaaccttcatcagaagctgcaagctgagcagcagcagcctgagcatggccgccgtggacatcctgtacatcgacatcaccagaagatggaacagcatgaccctggaccagagagacagcggcatgtgcctgcaggccttcgtggaggccttcttcttcctggcccagagaaagttcaagatgctgcccctgcacgagcaggtggccagcctgatcgacctgtgcgagtaccacctgagcctgctggacgagaagagactggtgtgcggcagaggcgtgcccagcggcggcagacccccccacagaggccccccccaggagcccagccccagcgcccagcccgccggcgacaaccccccccccagaaccagctgcgccaacaagctgagccaccccagacacaccctgagctag

SEQ ID NO: 9956 - DNA, 981 bp, synthetic construct
  source 1..981: mol_type = other DNA; note = Synthetic coding sequence
atgagagagtgcatcagcatccacgtgggccaggccggcgtgcagatcggcaacgcctgctgggagctgtactgcctggagcacggcatccagcccgacggccagatgcccagcgacaagaccatcggcggcggcgacgacagcttcaacaccttcttcagcgagaccggcgccggcaagcacgtgcccagagccgtgttcgtggacctggagcccaccgtgatcgacgaggtgagaaccggcacctacagacagctgttccaccccgagcagctgatcaccggcaaggaggacgccgccaacaactacgccagaggccactacaccatcggcaaggagatcatcgacctggtgctggacagaatcagaaagctgaagagcttcttcgccaccaagcccagaatccacttccccctggccacctacgcccccgtgatcagcgccgagaaggcctaccacgagcagctgaccgtggccgagatcaccaacgcctgcttcgagcccgccaaccagatggtgaagtgcgaccccagacacggcaagtacatggcctgctgcctgctgtacagaggcgacgtggtgcccaaggacgtgaacgccgccatcgccaccatcaagaccaagagaaccatccagttcgtggactggtgccccaccggcttcaaggtgggcatcaactaccagccccccaccgtggtgcccggcggcgacctggccaaggtgcagagagccgtgtgcatgctgagcaacaccaccgccgtggccgaggcctgggccagactggaccacaagttcgacctgatgcccctgagaagaatcatgagaagactggagcagatcgtgctgaccgagagaatgagagtgaagagcatcaacctgtgcgccgtgctgctgcacagcttcgtgctggagctgagctacttctgcagcgtgaacgtgtactgcagaaagctgctgatcaagctgaagttccccttctag

SEQ ID NO: 9957 - DNA, 1005 bp, synthetic construct
  source 1..1005: mol_type = other DNA; note = Synthetic coding sequence
atggtgggcagagagaaggagctgagcatccacttcgtgcccggcagctgcagactggtggaggaggaggtgaacatccccaacagaagagtgctggtgaccggcgccaccggcctgctgggcagagccgtgcacaaggagttccagcagaacaactggcacgccgtgggctgcggcttcagaagagccagacccaagttcgagcaggtgaacctgctggacagcaacgccgtgcaccacatcatccacgacttccagccccacgtgatcgtgcactgcgccgccgagagaagacccgacgtggtggagaaccagcccgacgccgccagccagctgaacgtggacgccagcggcaacctggccaaggaggccgccgccgtgggcgccttcctgatctacatcagcagcgactacgtgttcgacggcaccaaccccccctacagagaggaggacatccccgcccccctgaacctgtacggcaagaccaagctggacggcgagaaggccgtgctggagaacaacctgggcgccgccgtgctgagaatccccatcctgtacggcgaggtggagaagctggaggagagcgccgtgaccgtgatgttcgacaaggtgcagttcagcaacaagagcgccaacatggaccactggcagcagagattccccacccacgtgaaggacgtggccaccgtgtgcagacagctggccgagaagagaatgctggaccccagcatcaagggcaccttccactggagcggcaacgagcagatgaccaagtacgagatggcctgcgccatcgccgacgccttcaacctgcccagcagccacctgagacccatcaccgacagccccgtgctgggcgcccagagacccagaaacgcccagctggactgcagcaagctggagaccctgggcatcggccagagaacccccttcagaatcggcatcaaggagagcctgtggcccttcctgatcgacaagagatggagacagaccgtgttccactag

SEQ ID NO: 9958 - DNA, 513 bp, synthetic construct
  source 1..513: mol_type = other DNA; note = Synthetic coding sequence
atggccagcgaggccgagaagaccttccacagattcgccgccttcggcgagagcagcagcagcggcaccgagatgaacaacaagaacttcagcaagctgtgcaaggactgcggcatcatggacggcaagaccgtgaccagcaccgacgtggacatcgtgttcagcaaggtgaaggccaagaacgccagaaccatcaccttccagcagttcaaggaggccgtgaaggagctgggccagaagagattcaagggcaagagccccgacgaggtgctggagaacatctacggcctgatggagggcaaggaccccgccaccaccggcgccaccaaggccaccaccgtgggcgccgtggacagactgaccgacaccagcaagtacaccggcacccacaaggagagattcgacgagagcggcaagggcaagggcatcgccggcagagaggagatgaccgacaacaccggctacgtgagcggctacaagggcagcggcacctacgacaagaagaccaagtag

SEQ ID NO: 9959 - DNA, 3582 bp, synthetic construct
  source 1..3582: mol_type = other DNA; note = Synthetic coding sequence
atgtggagagtgaagaagctgagcctgagcctgagccccagcccccagaccggcaagcccagcatgagaacccccctgagagagctgaccctgcagcccggcgccctgaccaacagcggcaagagaagccccgcctgcagcagcctgacccccagcctgtgcaagctgggcctgcaggagggcagcaacaacagcagccccgtggacttcgtgaacaacaagagaaccgacctgagcagcgagcacttcagccacagcagcaagtggctggagacctgccagcacgagagcgacgagcagcccctggaccccatcccccagatcagcagcacccccaagaccagcgaggaggccgtggaccccctgggcaactacatggtgaagaccatcgtgctggtgcccagccccctgggccagcagcaggacatgatcttcgaggccagactggacaccatggccgagaccaacagcatcagcctgaacggccccctgagaaccgacgacctggtgagagaggaggtggccccctgcatgggcgacagattcagcgaggtggccgccgtgagcgagaagcccatcttccaggagagccccagccacctgctggaggagagcccccccaacccctgcagcgagcagctgcactgcagcaaggagagcctgagcagcagaaccgaggccgtgagagaggacctggtgcccagcgagagcaacgccttcctgcccagcagcgtgctgtggctgagccccagcaccgccctggccgccgacttcagagtgaaccacgtggaccccgaggaggagatcgtggagcacggcgccatggaggagagagagatgagattccccacccaccccaaggagagcgagaccgaggaccaggccctggtgagcagcgtggaggacatcctgagcacctgcctgacccccaacctggtggagatggagagccaggaggcccccggccccgccgtggaggacgtgggcagaatcctgggcagcgacaccgagagctggatgagccccctggcctggctggagaagggcgtgaacaccagcgtgatgctggagaacctgagacagagcctgagcctgcccagcatgctgagagacgccgccatcggcaccacccccttcagcacctgcagcgtgggcacctggttcacccccagcgccccccaggagaagagcaccaacaccagccagaccggcctggtgggcaccaagcacagcaccagcgagaccgagcagctgctgtgcggcagaccccccgacctgaccgccctgagcagacacgacctggaggacaacctgctgagcagcctggtgatcctggaggtgctgagcagacagctgagagactggaagagccagctggccgtgccccaccccgagacccaggacagcagcacccagaccgacaccagccacagcggcatcaccaacaagctgcagcacctgaaggagagccacgagatgggccaggccctgcagcaggccagaaacgtgatgcagagctgggtgctgatcagcaaggagctgatcagcctgctgcacctgagcctgctgcacctggaggaggacaagaccaccgtgagccaggagagcagaagagccgagaccctggtgtgctgctgcttcgacctgctgaagaagctgagagccaagctgcagagcctgaaggccgagagagaggaggccagacacagagaggagatggccctgagaggcaaggacgccgccgagatcgtgctggaggccttctgcgcccacgccagccagagaatcagccagctggagcaggacctggccagcatgagagagttcagaggcctgctgaaggacgcccagacccagctggtgggcctgcacgccaagcaggaggagctggtgcagcagaccgtgagcctgaccagcaccctgcagcaggactggagaagcatgcagctggactacaccacctggaccgccctgctgagcagaagcagacagctgaccgagaagctgaccgtgaagagccagcaggccctgcaggagagagacgtggccatcgaggagaagcaggaggtgagcagagtgctggagcaggtgagcgcccagctggaggagtgcaagggccagaccgagcagctggagctggagaacagcagactggccaccgacctgagagcccagctgcagatcctggccaacatggacagccagctgaaggagctgcagagccagcacacccactgcgcccaggacctggccatgaaggacgagctgctgtgccagctgacccagagcaacgaggagcaggccgcccagtggcagaaggaggagatggccctgaagcacatgcaggccgagctgcagcagcagcaggccgtgctggccaaggaggtgagagacctgaaggagaccctggagttcgccgaccaggagaaccaggtggcccacctggagctgggccaggtggagtgccagctgaagaccaccctggaggtgctgagagagagaagcctgcagtgcgagaacctgaaggacaccgtggagaacctgaccgccaagctggccagcaccatcgccgacaaccaggagcaggacctggagaagaccagacagtacagccagaagctgggcctgctgaccgagcagctgcagagcctgaccctgttcctgcagaccaagctgaaggagaagaccgagcaggagaccctgctgctgagcaccgcctgcccccccacccaggagcaccccctgcccaacgacagaaccttcctgggcagcatcctgaccgccgtggccgacgaggagcccgagagcacccccgtgcccctgctgggcagcgacaagagcgccttcaccagagtggccagcatggtgagcctgcagcccgccgagacccccggcatggaggagagcctggccgagatgagcatcatgaccaccgagctgcagagcctgtgcagcctgctgcaggagagcaaggaggaggccatcagaaccctgcagagaaagatctgcgagctgcaggccagactgcaggcccaggaggagcagcaccaggaggtgcagaaggccaaggaggccgacatcgagaagctgaaccaggccctgtgcctgagatacaagaacgagaaggagctgcaggaggtgatccagcagcagaacgagaagatcctggagcagatcgacaagagcggcgagctgatcagcctgagagaggaggtgacccacctgaccagaagcctgagaagagccgagaccgagaccaaggtgctgcaggaggccctggccggccagctggacagcaactgccagcccatggccaccaactggatccaggagaaggtgtggctgagccaggaggtggacaagctgagagtgatgttcctggagatgaagaacgagaaggagaagctgatgatcaagttccagagccacagaaacatcctggaggagaacctgagaagaagcgacaaggagctggagaagctggacgacatcgtgcagcacatctacaagaccctgctgagcatccccgaggtggtgagaggctgcaaggagctgcagggcctgctggagttcctgagctag

SEQ ID NO: 9960 - DNA, 9141 bp, synthetic construct
  source 1..9141: mol_type = other DNA; note = Synthetic coding sequence
atgagaggcagaagaggcagaccccccaagcagcccgccgcccccgccgccgagagatgcgcccccgccccccccccccccccccccccccccaccagcggccccatcggcggcctgagaagcagacacagaggcagcagcagaggcagatgggccgccgcccaggccgaggtggcccccaagaccagactgagcagccccagaggcggcagcagcagcagaagaaagccccccccccccccccccgccccccccagcaccagcgcccccggcagaggcggcagaggcggcggcggcggcagaaccggcggcggcggcggcggcggccacctggccagaaccaccgccgccagaagagccgtgaacaaggtggtgtacgacgaccacgagagcgaggaggaggaggaggaggaggacatggtgagcgaggaggaggaggaggaggacggcgacgccgaggagacccaggacagcgaggacgacgaggaggacgagatggaggaggacgacgacgacagcgactaccccgaggagatggaggacgacgacgacgacgccagctactgcaccgagagcagcttcagaagccacagcacctacagcagcacccccggcagaagaaagcccagagtgcacagacccagaagccccatcctggaggagaaggacatcccccccctggagttccccaagagcagcgaggacctgatggtgcccaacgagcacatcatgaacgtgatcgccatctacgaggtgctgagaaacttcggcaccgtgctgagactgagccccttcagattcgaggacttctgcgccgccctggtgagccaggagcagtgcaccctgatggccgagatgcacgtggtgctgctgaaggccgtgctgagagaggaggacaccagcaacaccaccttcggccccgccgacctgaaggacagcgtgaacagcaccctgtacttcatcgacggcatgacctggcccgaggtgctgagagtgtactgcgagagcgacaaggagtaccaccacgtgctgccctaccaggaggccgaggactacccctacggccccgtggagaacaagatcaaggtgctgcagttcctggtggaccagttcctgaccaccaacatcgccagagaggagctgatgagcgagggcgtgatccagtacgacgaccactgcagagtgtgccacaagctgggcgacctgctgtgctgcgagacctgcagcgccgtgtaccacctggagtgcgtgaagccccccctggaggaggtgcccgaggacgagtggcagtgcgaggtgtgcgtggcccacaaggtgcccggcgtgaccgactgcgtggccgagatccagaagaacaagccctacatcagacacgagcccatcggctacgacagaagcagaagaaagtactggttcctgaacagaagactgatcatcgaggaggacaccgagaacgagaacgagaagaagatctggtactacagcaccaaggtgcagctggccgagctgatcgactgcctggacaaggactactgggaggccgagctgtgcaagatcctggaggagatgagagaggagatccacagacacatggacatcaccgaggacctgaccaacaaggccagaggcagcaacaagagcttcctggccgccgccaacgaggagatcctggagagcatcagagccaagaagggcgacatcgacaacgtgaagagccccgaggagaccgagaaggacaagaacgagaccgagaacgacagcaaggacgccgagaagaacagagaggagttcgaggaccagagcctggagaaggacagcgacgacaagacccccgacgacgaccccgagcagggcaagagcgaggagcccaccgaggtgggcgacaagggcaacagcgtgagcgccaacctgggcgacaacaccaccaacgccaccagcgaggagaccagccccagcgagggcagaagccccgtgggctgcctgagcgagacccccgacagcagcaacatggccgagaagaaggtggccagcgagctgccccaggacgtgcccgaggagcccaacaagacctgcgagagcagcaacaccagcgccaccaccaccagcatccagcccaacctggagaacagcaacagcagcagcgagctgaacagcagccagagcgagagcgccaaggccgccgacgaccccgagaacggcgagagagagagccacacccccgtgagcatccaggaggagatcgtgggcgacttcaagagcgagaagagcaacggcgagctgagcgagagccccggcgccggcaagggcgccagcggcagcaccagaatcatcaccagactgagaaaccccgacagcaagctgagccagctgaagagccagcaggtggccgccgccgcccacgaggccaacaagctgttcaaggagggcaaggaggtgctggtggtgaacagccagggcgagatcagcagactgagcaccaagaaggaggtgatcatgaagggcaacatcaacaactacttcaagctgggccaggagggcaagtacagagtgtaccacaaccagtacagcaccaacagcttcgccctgaacaagcaccagcacagagaggaccacgacaagagaagacacctggcccacaagttctgcctgacccccgccggcgagttcaagtggaacggcagcgtgcacggcagcaaggtgctgaccatcagcaccctgagactgaccatcacccagctggagaacaacatccccagcagcttcctgcaccccaactgggccagccacagagccaactggatcaaggccgtgcagatgtgcagcaagcccagagagttcgccctggccctggccatcctggagtgcgccgtgaagcccgtggtgatgctgcccatctggagagagagcctgggccacaccagactgcacagaatgaccagcatcgagagagaggagaaggagaaggtgaagaagaaggagaagaagcaggaggaggaggagaccatgcagcaggccacctgggtgaagtacaccttccccgtgaagcaccaggtgtggaagcagaagggcgaggagtacagagtgaccggctacggcggctggagctggatcagcaagacccacgtgtacagattcgtgcccaagctgcccggcaacaccaacgtgaactacagaaagagcctggagggcaccaagaacaacatggacgagaacatggacgagagcgacaagagaaagtgcagcagaagccccaagaagatcaagatcgagcccgacagcgagaaggacgaggtgaagggcagcgacgccgccaagggcgccgaccagaacgagatggacatcagcaagatcaccgagaagaaggaccaggacgtgaaggagctgctggacagcgacagcgacaagccctgcaaggaggagcccatggaggtggacgacgacatgaagaccgagagccacgtgaactgccaggagagcagccaggtggacgtggtgaacgtgagcgagggcttccacctgagaaccagctacaagaagaagaccaagagcagcaagctggacggcctgctggagagaagaatcaagcagttcaccctggaggagaagcagagactggagaagatcaagctggagggcggcatcaagggcatcggcaagaccagcaccaacagcagcaagaacctgagcgagagccccgtgatcaccaaggccaaggagggctgccagagcgacagcatgagacaggagcagagccccaacgccaacaacgaccagcccgaggacctgatccagggctgcagcgagagcgacagcagcgtgctgagaatgagcgaccccagccacaccaccaacaagctgtaccccaaggacagagtgctggacgacgtgagcatcagaagccccgagaccaagtgccccaagcagaacagcatcgagaacgacatcgaggagaaggtgagcgacctggccagcagaggccaggagcccagcaagagcaagaccaagggcaacgacttcttcatcgacgacagcaagctggccagcgccgacgacatcggcaccctgatctgcaagaacaagaagcccctgatccaggaggagagcgacaccatcgtgagcagcagcaagagcgccctgcacagcagcgtgcccaagagcaccaacgacagagacgccacccccctgagcagagccatggacttcgagggcaagctgggctgcgacagcgagagcaacagcaccctggagaacagcagcgacaccgtgagcatccaggacagcagcgaggaggacatgatcgtgcagaacagcaacgagagcatcagcgagcagttcagaaccagagagcaggacgtggaggtgctggagcccctgaagtgcgagctggtgagcggcgagagcaccggcaactgcgaggacagactgcccgtgaagggcaccgaggccaacggcaagaagcccagccagcagaagaagctggaggagagacccgtgaacaagtgcagcgaccagatcaagctgaagaacaccaccgacaagaagaacaacgagaacagagagagcgagaagaagggccagagaaccagcaccttccagatcaacggcaaggacaacaagcccaagatctacctgaagggcgagtgcctgaaggagatcagcgagagcagagtggtgagcggcaacgtggagcccaaggtgaacaacatcaacaagatcatccccgagaacgacatcaagagcctgaccgtgaaggagagcgccatcagacccttcatcaacggcgacgtgatcatggaggacttcaacgagagaaacagcagcgagaccaagagccacctgctgagcagcagcgacgccgagggcaactacagagacagcctggagaccctgcccagcaccaaggagagcgacagcacccagaccaccacccccagcgccagctgccccgagagcaacagcgtgaaccaggtggaggacatggagatcgagaccagcgaggtgaagaaggtgaccagcagccccatcaccagcgaggaggagagcaacctgagcaacgacttcatcgacgagaacggcctgcccatcaacaagaacgagaacgtgaacggcgagagcaagagaaagaccgtgatcaccgaggtgaccaccatgaccagcaccgtggccaccgagagcaagaccgtgatcaaggtggagaagggcgacaagcagaccgtggtgagcagcaccgagaactgcgccaagagcaccgtgaccaccaccaccaccaccgtgaccaagctgagcacccccagcaccggcggcagcgtggacatcatcagcgtgaaggagcagagcaagaccgtggtgaccaccaccgtgaccgacagcctgaccaccaccggcggcaccctggtgaccagcatgaccgtgagcaaggagtacagcaccagagacaaggtgaagctgatgaagttcagcagacccaagaagaccagaagcggcaccgccctgcccagctacagaaagttcgtgaccaagagcagcaagaagagcatcttcgtgctgcccaacgacgacctgaagaagctggccagaaagggcggcatcagagaggtgccctacttcaactacaacgccaagcccgccctggacatctggccctaccccagccccagacccaccttcggcatcacctggagatacagactgcagaccgtgaagagcctggccggcgtgagcctgatgctgagactgctgtgggccagcctgagatgggacgacatggccgccaaggccccccccggcggcggcaccaccagaaccgagaccagcgagaccgagatcaccaccaccgagatcatcaagagaagagacgtgggcccctacggcatcagaagcgagtactgcatcagaaagatcatctgccccatcggcgtgcccgagacccccaaggagacccccaccccccagagaaagggcctgagaagcagcgccctgagacccaagagacccgagacccccaagcagaccggccccgtgatcatcgagacctgggtggccgaggaggagctggagctgtgggagatcagagccttcgccgagagagtggagaaggagaaggcccaggccgtggagcagcaggccaagaagagactggagcagcagaagcccaccgtgatcgccaccagcaccaccagccccaccagcagcaccaccagcaccatcagccccgcccagaaggtgatggtggcccccatcagcggcagcgtgaccaccggcaccaagatggtgctgaccaccaaggtgggcagccccgccaccgtgaccttccagcagaacaagaacttccaccagaccttcgccacctgggtgaagcagggccagagcaacagcggcgtggtgcaggtgcagcagaaggtgctgggcatcatccccagcagcaccggcaccagccagcagaccttcaccagcttccagcccagaaccgccaccgtgaccatcagacccaacaccagcggcagcggcggcaccaccagcaacagccaggtgatcaccggcccccagatcagacccggcatgaccgtgatcagaacccccctgcagcagagcaccctgggcaaggccatcatcagaacccccgtgatggtgcagcccggcgccccccagcaggtgatgacccagatcatcagaggccagcccgtgagcaccgccgtgagcgcccccaacaccgtgagcagcacccccggccagaagagcctgaccagcgccaccagcaccagcaacatccagagcagcgccagccagccccccagaccccagcagggccaggtgaagctgaccatggcccagctgacccagctgacccagggccacggcggcaaccagggcctgaccgtggtgatccagggccagggccagaccaccggccagctgcagctgatcccccagggcgtgaccgtgctgcccggccccggccagcagctgatgcaggccgccatgcccaacggcaccgtgcagagattcctgttcacccccctggccaccaccgccaccaccgccagcaccaccaccaccaccgtgagcaccaccgccgccggcaccggcgagcagagacagagcaagctgagcccccagatgcaggtgcaccaggacaagaccctgccccccgcccagagcagcagcgtgggccccgccgaggcccagccccagaccgcccagcccagcgcccagccccagccccagacccagccccagagccccgcccagcccgaggtgcagacccagcccgaggtgcagacccagaccaccgtgagcagccacgtgcccagcgaggcccagcccacccacgcccagagcagcaagccccaggtggccgcccagagccagccccagagcaacgtgcagggccagagccccgtgagagtgcagagccccagccagaccagaatcagacccagcacccccagccagctgagccccggccagcagagccaggtgcagaccaccaccagccagcccatccccatccagccccacaccagcctgcagatccccagccagggccagccccagagccagccccaggtgcagagcagcacccagaccctgagcagcggccagaccctgaaccaggtgaccgtgagcagccccagcagaccccagctgcagatccagcagccccagccccaggtgatcgccgtgccccagctgcagcagcaggtgcaggtgctgagccagatccagagccaggtggtggcccagatccaggcccagcagagcggcgtgccccagcagatcaagctgcagctgcccatccagatccagcagagcagcgccgtgcagacccaccagatccagaacgtggtgaccgtgcaggccgccagcgtgcaggagcagctgcagagagtgcagcagctgagagaccagcagcagaagaagaagcagcagcagatcgagatcaagagagagcacaccctgcaggccagcaaccagagcgagatcatccagaagcaggtggtgatgaagcacaacgccgtgatcgagcacctgaagcagaagaagagcatgacccccgccgagagagaggagaaccagagaatgatcgtgtgcaaccaggtgatgaagtacatcctggacaagatcgacaaggaggagaagcaggccgccaagaagagaaagagagaggagagcgtggagcagaagagaagcaagcagaacgccaccaagctgagcgccctgctgttcaagcacaaggagcagctgagagccgagatcctgaagaagagagccctgctggacaaggacctgcagatcgaggtgcaggaggagctgaagagagacctgaagatcaagaaggagaaggacctgatgcagctggcccaggccaccgccgtggccgccccctgcccccccgtgacccccgccccccccgccccccccgcccccccccccagccccccccccccccccgccgtgcagcacaccggcctgctgagcacccccaccctgcccgccgccagccagaagagaaagagagaggaggagaaggacagcagcagcaagagcaagaagaagaagatgatcagcaccaccagcaaggagaccaagaaggacaccaagctgtactgcatctgcaagaccccctacgacgagagcaagttctacatcggctgcgacagatgccagaactggtaccacggcagatgcgtgggcatcctgcagagcgaggccgagctgatcgacgagtacgtgtgcccccagtgccagagcaccgaggacgccatgaccgtgctgacccccctgaccgagaaggactacgagggcctgaagagagtgctgagaagcctgcaggcccacaagatggcctggcccttcctggagcccgtggaccccaacgacgcccccgactactacggcgtgatcaaggagcccatggacctggccaccatggaggagagagtgcagagaagatactacgagaagctgaccgagttcgtggccgacatgaccaagatcttcgacaactgcagatactacaaccccagcgacagccccttctaccagtgcgccgaggtgctggagagcttcttcgtgcagaagctgaagggcttcaaggccagcagaagccacaacaacaagctgcagagcaccgccagctag

SEQ ID NO: 9961 - DNA, 927 bp, synthetic construct
  source 1..927: mol_type = other DNA; note = Synthetic coding sequence
atggccagcagcaacaccgtgctgatgagactggtggccagcgcctacagcatcgcccagaaggccggcatgatcgtgagaagagtgatcgccgagggcgacctgggcatcgtggagaagacctgcgccaccgacctgcagaccaaggccgacagactggcccagatgagcatctgcagcagcctggccagaaagttccccaagctgaccatcatcggcgaggaggacctgcccagcgaggaggtggaccaggagctgatcgaggacagccagtgggaggagatcctgaagcagccctgccccagccagtacagcgccatcaaggaggaggacctggtggtgtgggtggaccccctggacggcaccaaggagtacaccgagggcctgctggacaacgtgaccgtgctgatcggcatcgcctacgagggcaaggccatcgccggcgtgatcaaccagccctactacaactacgaggccggccccgacgccgtgctgggcagaaccatctggggcgtgctgggcctgggcgccttcggcttccagctgaaggaggtgcccgccggcaagcacatcatcaccaccaccagaagccacagcaacaagctggtgaccgactgcgtggccgccatgaaccccgacgccgtgctgagagtgggcggcgccggcaacaagatcatccagctgatcgagggcaaggccagcgcctacgtgttcgccagccccggctgcaagaagtgggacacctgcgcccccgaggtgatcctgcacgccgtgggcggcaagctgaccgacatccacggcaacgtgctgcagtaccacaaggacgtgaagcacatgaacagcgccggcgtgctggccaccctgagaaactacgactactacgccagcagagtgcccgagagcatcaagaacgccctggtgccctag

SEQ ID NO: 9962 - DNA, 1212 bp, synthetic construct
  source 1..1212: mol_type = other DNA; note = Synthetic coding sequence
atgagcggcagcgacggcggcctggaggaggagcccgagctgagcatcaccctgaccctgagaatgctgatgcacggcaaggaggtgggcagcatcatcggcaagaagggcgagaccgtgaagagaatcagagagcagagcagcgccagaatcaccatcagcgagggcagctgccccgagagaatcaccaccatcaccggcagcaccgccgccgtgttccacgccgtgagcatgatcgccttcaagctggacgaggacctgtgcgccgcccccgccaacggcggcaacgtgagcagaccccccgtgaccctgagactggtgatccccgccagccagtgcggcagcctgatcggcaaggccggcaccaagatcaaggagatcagagagaccaccggcgcccaggtgcaggtggccggcgacctgctgcccaacagcaccgagagagccgtgaccgtgagcggcgtgcccgacgccatcatcctgtgcgtgagacagatctgcgccgtgatcctggagagcccccccaagggcgccaccatcccctaccaccccagcctgagcctgggcaccgtgctgctgagcgccaaccagggcttcagcgtgcagggccagtacggcgccgtgacccccgccgaggtgaccaagctgcagcagctgagcagccacgccgtgcccttcgccacccccagcgtggtgcccggcctggaccccggcacccagaccagcagccaggagttcctggtgcccaacgacctgatcggctgcgtgatcggcagacagggcagcaagatcagcgagatcagacagatgagcggcgcccacatcaagatcggcaaccaggccgagggcgccggcgagagacacgtgaccatcaccggcagccccgtgagcatcgccctggcccagtacctgatcaccgcctgcctggagaccgccaagagcaccagcggcggcacccccagcagcgcccccgccgacctgcccgcccccttcagcccccccctgaccgccctgcccaccgccccccccggcctgctgggcaccccctacgccatcagcctgagcaacttcatcggcctgaagcccatgcccttcctggccctgccccccgccagccccggccccccccccggcctggccgcctacaccgccaagatggccgccgccaacggcagcaagaaggccgagagacagaagttcagcccctactag

SEQ ID NO: 9963 - DNA, 654 bp, synthetic construct
  source 1..654: mol_type = other DNA; note = Synthetic coding sequence
atgagcagcaaggtgagcagagacaccctgtacgaggccgtgagagaggtgctgcacggcaaccagagaaagagaagaaagttcctggagaccgtggagctgcagatcagcctgaagaactacgacccccagaaggacaagagattcagcggcaccgtgagactgaagagcacccccagacccaagttcagcgtgtgcgtgctgggcgaccagcagcactgcgacgaggccaaggccgtggacatcccccacatggacatcgaggccctgaagaagctgaacaagaacaagaagctggtgaagaagctggccaagaagtacgacgccttcctggccagcgagagcctgatcaagcagatccccagaatcctgggccccggcctgaacaaggccggcaagttccccagcctgctgacccacaacgagaacatggtggccaaggtggacgaggtgaagagcaccatcaagttccagatgaagaaggtgctgtgcctggccgtggccgtgggccacgtgaagatgaccgacgacgagctggtgtacaacatccacctggccgtgaacttcctggtgagcctgctgaagaagaactggcagaacgtgagagccctgtacatcaagagcaccatgggcaagccccagagactgtactag

SEQ ID NO: 9964 - DNA, 3159 bp, synthetic construct
  source 1..3159: mol_type = other DNA; note = Synthetic coding sequence
atggagggcagcgagcccgtggccgcccaccagggcgaggaggccagctgcagcagctggggcaccggcagcaccaacaagaacctgcccatcatgagcaccgccagcgtggagatcgacgacgccctgtacagcagacagagatacgtgctgggcgacaccgccatgcagaagatggccaagagccacgtgttcctgagcggcatgggcggcctgggcctggagatcgccaagaacctggtgctggccggcatcaaggccgtgaccatccacgacaccgagaagtgccaggcctgggacctgggcaccaacttcttcctgagcgaggacgacgtggtgaacaagagaaacagagccgaggccgtgctgaagcacatcgccgagctgaacccctacgtgcacgtgaccagcagcagcgtgcccttcaacgagaccaccgacctgagcttcctggacaagtaccagtgcgtggtgctgaccgagatgaagctgcccctgcagaagaagatcaacgacttctgcagaagccagtgcccccccatcaagttcatcagcgccgacgtgcacggcatctggagcagactgttctgcgacttcggcgacgagttcgaggtgctggacaccaccggcgaggagcccaaggagatcttcatcagcaacatcacccaggccaaccccggcatcgtgacctgcctggagaaccacccccacaagctggagaccggccagttcctgaccttcagagagatcaacggcatgaccggcctgaacggcagcatccagcagatcaccgtgatcagccccttcagcttcagcatcggcgacaccaccgagctggagccctacctgcacggcggcatcgccgtgcaggtgaagacccccaagaccgtgttcttcgagagcctggagagacagctgaagcaccccaagtgcctgatcgtggacttcagcaaccccgaggcccccctggagatccacaccgccatgctggccctggaccagttccaggagaagtacagcagaaagcccaacgtgggctgccagcaggacagcgaggagctgctgaagctggccaccagcatcagcgagaccctggaggagaagcccgacgtgaacgccgacatcgtgcactggctgagctggaccgcccagggcttcctgagccccctggccgccgccgtgggcggcgtggccagccaggaggtgctgaaggccgtgaccggcaagttcagccccctgtgccagtggctgtacctggaggccgccgacatcgtggagagcctgggcaagcccgagtgcgaggagttcctgcccagaggcgacagatacgacgccctgagagcctgcatcggcgacaccctgtgccagaagctgcagaacctgaacatcttcctggtgggctgcggcgccatcggctgcgagatgctgaagaacttcgccctgctgggcgtgggcaccagcaaggagaagggcatgatcaccgtgaccgaccccgacctgatcgagaagagcaacctgaacagacagttcctgttcagaccccaccacatccagaagcccaagagctacaccgccgccgacgccaccctgaagatcaacagccagatcaagatcgacgcccacctgaacaaggtgtgccccaccaccgagaccatctacaacgacgagttctacaccaagcaggacgtgatcatcaccgccctggacaacgtggaggccagaagatacgtggacagcagatgcctggccaacctgagacccctgctggacagcggcaccatgggcaccaagggccacaccgaggtgatcgtgccccacctgaccgagagctacaacagccacagagacccccccgaggaggagatccccttctgcaccctgaagagcttccccgccgccatcgagcacaccatccagtgggccagagacaagttcgagagcagcttcagccacaagcccagcctgttcaacaagttctggcagacctacagcagcgccgaggaggtgctgcagaagatccagagcggccacagcctggagggctgcttccaggtgatcaagctgctgagcagaagacccagaaactggagccagtgcgtggagctggccagactgaagttcgagaagtacttcaaccacaaggccctgcagctgctgcactgcttccccctggacatcagactgaaggacggcagcctgttctggcagagccccaagagaccccccagccccatcaagttcgacctgaacgagcccctgcacctgagcttcctgcagaacgccgccaagctgtacgccaccgtgtactgcatccccttcgccgaggaggacctgagcgccgacgccctgctgaacatcctgagcgaggtgaagatccaggagttcaagcccagcaacaaggtggtgcagaccgacgagaccgccagaaagcccgaccacgtgcccatcagcagcgaggacgagagaaacgccatcttccagctggagaaggccatcctgagcaacgaggccaccaagagcgacctgcagatggccgtgctgagcttcgagaaggacgacgaccacaacggccacatcgacttcatcaccgccgccagcaacctgagagccaagatgtacagcatcgagcccgccgacagattcaagaccaagagaatcgccggcaagatcatccccgccatcgccaccaccaccgccaccgtgagcggcctggtggccctggagatgatcaaggtgaccggcggctaccccttcgaggcctacaagaactgcttcctgaacctggccatccccatcgtggtgttcaccgagaccaccgaggtgagaaagaccaagatcagaaacggcatcagcttcaccatctgggacagatggaccgtgcacggcaaggaggacttcaccctgctggacttcatcaacgccgtgaaggagaagtacggcatcgagcccaccatggtggtgcagggcgtgaagatgctgtacgtgcccgtgatgcccggccacgccaagagactgaagctgaccatgcacaagctggtgaagcccaccaccgagaagaagtacgtggacctgaccgtgagcttcgcccccgacatcgacggcgacgaggacctgcccggcccccccgtgagatactacttcagccacgacaccgactag

SEQ ID NO: 9965 - DNA, 1134 bp, synthetic construct
  source 1..1134: mol_type = other DNA; note = Synthetic coding sequence
atgctgagactggtgcccaccggcgccagagccatcgtggacatgagctacgccagacacttcctggacttccagggcagcgccatcccccaggccatgcagaagctggtggtgaccagactgagccccaacttcagagaggccgtgaccctgagcagagactgccccgtgcccctgcccggcgacggcgacctgctggtgagaaacagattcgtgggcgtgaacgccagcgacatcaactacagcgccggcagatacgaccccagcgtgaagccccccttcgacatcggcttcgagggcatcggcgaggtggtggccctgggcctgagcgccagcgccagatacaccgtgggccaggccgtggcctacatggcccccggcagcttcgccgagtacaccgtggtgcccgccagcatcgccacccccgtgcccagcgtgaagcccgagtacctgaccctgctggtgagcggcaccaccgcctacatcagcctgaaggagctgggcggcctgagcgagggcaagaaggtgctggtgaccgccgccgccggcggcaccggccagttcgccatgcagctgagcaagaaggccaagtgccacgtgatcggcacctgcagcagcgacgagaagagcgccttcctgaagagcctgggctgcgacagacccatcaactacaagaccgagcccgtgggcaccgtgctgaagcaggagtaccccgagggcgtggacgtggtgtacgagagcgtgggcggcgccatgttcgacctggccgtggacgccctggccaccaagggcagactgatcgtgatcggcttcatcagcggctaccagacccccaccggcctgagccccgtgaaggccggcaccctgcccgccaagctgctgaagaagagcgccagcgtgcagggcttcttcctgaaccactacctgagcaagtaccaggccgccatgagccacctgctggagatgtgcgtgagcggcgacctggtgtgcgaggtggacctgggcgacctgagccccgagggcagattcaccggcctggagagcatcttcagagccgtgaactacatgtacatgggcaagaacaccggcaagatcgtggtggagctgccccacagcgtgaacagcaagctgtag

SEQ ID NO: 9966 - DNA, 2538 bp, synthetic construct
  source 1..2538: mol_type = other DNA; note = Synthetic coding sequence
atgagcaacagcagacccagaagcagaagagacgccggcggcggcgccggcgccgccggcagagacgagctggtgagcagaagcctgcagagcgccgagcactgcctgggcgtgcaggacttcggcaccgcctacgcccactacctgctggtgctgagcctggcccccgagctgaagcacgacgtgaaggagaccttccagtacaccctgttcagatgggccgaggagctggacgccctgagcagaatccaggacctgctgggctgctacgagcaggccctggagctgttccccgacgacgaggtgatctgcaacagcatgggcgagcacctgttcagaatgggcttcagagacgaggccgccggctacttccacaaggccgtgaagctgaaccccgacttcagcgacgccaaggagaacttctacagagtggccaactggctggtggagagatggcacttcatcatgctgaacgacaccaagagaaacaccatctacaacgccgccatccagaaggccgtgtgcctgggcagcaagagcgtgctggacatcggcgccggcaccggcatcctgagcatgttcgccaagaaggccggcgcccacagcgtgtacgcctgcgagctgagcaagaccatgtacgagctggcctgcgacgtggtggccgccaacaagatggaggccggcatcaagctgctgcacaccaagagcctggacatcgagatccccaagcacatccccgagagagtgagcctggtggtgaccgagaccgtggacgccggcctgttcggcgagggcatcgtggagagcctgatccacgcctgggagcacctgctgctgcagcccaagaccaagggcgagagcgccaactgcgagaagtacggcaaggtgatccccgccagcgccgtgatcttcggcatggccgtggagtgcgccgagatcagaagacaccacagagtgggcatcaaggacatcgccggcatccacctgcccaccaacgtgaagttccagagccccgcctacagcagcgtggacaccgaggagaccatcgagccctacaccaccgagaagatgagcagagtgcccggcggctacctggccctgaccgagtgcttcgagatcatgaccgtggacttcaacaacctgcaggagctgaagagcctggccaccaagaagcccgacaagatcggcatccccgtgatcaaggagggcatcctggacgccatcatggtgtggttcgtgctgcagctggacgacgagcacagcctgagcaccagccccagcgaggagacctgctgggagcaggccgtgtaccccgtgcaggacctggccgactactggatcaagcccggcgaccacgtgatgatggaggtgagctgccaggactgctacctgagaatccagagcatcagcgtgctgggcctggagtgcgagatggacgtggccaagagcttcacccagaacaaggacctgctgagcctgggcaacgaggccgagctgtgcagcgccctggccaacctgcagaccagcaagcccgacgccgtggagcagacctgcatcctggagagcaccgagatcgccctgctgaacaacatcccctaccacgagggcttcaagatggccatgagcaaggtgctgagcagcctgacccccgagaagctgtaccagaccatggacacccactgccagaacgagatgagcagcggcaccggccagagcaacaccgtgcagaacatcctggagcccttctacgtgctggacgtgagcgagggcttcagcgtgctgcccgtgatcgccggcaccctgggccaggtgaagccctacagcagcgtggagaaggaccagcacagaatcgccctggacctgatcagcgaggccaaccacttccccaaggagaccctggagttctggctgagacacgtggaggacgagagcgccatgctgcagagacccaagagcgacaagctgtggagcatcatcatcctggacgtgatcgagcccagcggcctgatccagcaggagatcatggagaaggccgccatcagcagatgcctgctgcagagcggcggcaagatcttcccccagtacgtgctgatgttcggcctgctggtggagagccagaccctgctggaggagaacgccgtgcagggcaccgagagaaccctgggcctgaacatcgcccccttcatcaaccagttccaggtgcccatcagagtgttcctggacctgagcagcctgccctgcatccccctgagcaagcccgtggagctgctgagactggacctgatgaccccctacctgaacaccagcaacagagaggtgaaggtgtacgtgtgcaagagcggcagactgaccgccatccccttctggtaccacatgtacctggacgaggagatcagactggacaccagcagcgaggccagccactggaagcaggccgccgtggtgctggacaaccccatccaggtggagatgggcgaggagctggtgctgagcatccagcaccacaagagcaacgtgagcatcaccgtgaagcagtag

SEQ ID NO: 9967 - DNA, 756 bp, synthetic construct
  source 1..756: mol_type = other DNA; note = Synthetic coding sequence
atggccgacctgaccagcgtgctgaccagcgtgatgttcagccccagcagcaagatgttcatcggcggcctgagctggcagaccagccccgacagcctgagagactacttcagcaagttcggcgagatcagagagtgcatggtgatgagagaccccaccaccaagagaagcagaggcttcggcttcgtgaccttcgccgaccccgccagcgtggacaaggtgctgggccagccccaccacgagctggacagcaagaccatcgaccccaaggtggccttccccagaagagcccagcccaagatggtgaccagaaccaagaagatcttcgtgggcggcctgagcgccaacaccgtggtggaggacgtgaagcagtacttcgagcagttcggcaaggtggaggacgccatgctgatgttcgacaagaccaccaacagacacagaggcttcggcttcgtgaccttcgagaacgaggacgtggtggagaaggtgtgcgagatccacttccacgagatcaacaacaagatggtggagtgcaagaaggcccagcccaaggaggtgatgttcccccccggcaccagaggcagagccagaggcctgccctacaccatggacgccttcatgctgggcatgggcatgctgggctaccccaacttcgtggccacctacggcagaggctaccccggcttcgcccccagctacggctaccagttccccgactacctgcccgtgagccaggacatcatcttcatcaactag

SEQ ID NO: 9968 - DNA, 510 bp, synthetic construct
  source 1..510: mol_type = other DNA; note = Synthetic coding sequence
atggcccccaagagagccaagagaagaaccgtggagggcggcagcagcagcgtgttcagcatgttcgaccagacccagatccaggagttcaaggaggccttcaccgtgatcgaccagaacagagacggcatcatcgacaaggaggacctgagagacaccttcgccgccatgggcagactgaacgtgaagaacgaggagctggacgccatgatgaaggaggccagcggccccatcaacttcaccgtgttcctgaccatgttcggcgagaagctgaagggcgccgaccccgaggacgtgatcaccggcgccttcaaggtgctggaccccgagggcaagggcaccatcaagaagaagttcctggaggagctgctgaccacccagtgcgacagattcagccaggaggagatcaagaacatgtgggccgccttcccccccgacgtgggcggcaacgtggactacaagaacatctgctacgtgatcacccacggcgacgccaaggaccaggagtag

SEQ ID NO: 9969 - DNA, 546 bp, synthetic construct
  source 1..546: mol_type = other DNA; note = Synthetic coding sequence
atggccaccgagcccgaggccgccgagcccgtggtgcccagcctggtggacagatacttcaccagatggtacaagcccgacgtgaagggcaagttctgcgaggaccactgcatcctgcagcacagcaacagaatctgcgtgatcaccctggccgagagccaccccgtgctgcagagcggcaagaccatcaagagcatcagctaccagatcagcaccaactgcagcagactgcagaacaaggtgagcggcaagttcaagagaggcgcccagttcctgaccgagctggcccccctgtgcaagatctactgcagcgacggcgaggagtacaccgtgagcagctgcgtgagaggcagactgatggaggtgaacgagaacatcctgcacaagcccagcatcctgcaggagaagcccagcaccgagggctacatcgccgtggtgctgcccaagttcgaggagagcaagagcatcaccgagggcctgctgacccagaagcagtacgaggaggtgatggtgaagagaatcaacgccaccaccgccaccagctag

SEQ ID NO: 9970 - DNA, 2154 bp, synthetic construct
  source 1..2154: mol_type = other DNA; note = Synthetic coding sequence
atggagctgagatgcggcggcctgctgttcagcagcagattcgacagcggcaacctggcccacgtggagaaggtggagagcctgagcagcgacggcgagggcgtgggcggcggcgccagcgccctgaccagcggcatcgccagcagccccgactacgagttcaacgtgtggaccagacccgactgcgccgagaccgagttcgagaacggcaacagaagctggttctacttcagcgtgagaggcggcatgcccggcaagctgatcaagatcaacatcatgaacatgaacaagcagagcaagctgtacagccagggcatggcccccttcgtgagaaccctgcccaccagacccagatgggagagaatcagagacagacccaccttcgagatgaccgagacccagttcgtgctgagcttcgtgcacagattcgtggagggcagaggcgccaccaccttcttcgccttctgctaccccttcagctacagcgactgccaggagctgctgaaccagctggaccagagattccccgagaaccaccccacccacagcagccccctggacaccatctactaccacagagagctgctgtgctacagcctggacggcctgagagtggacctgctgaccatcaccagctgccacggcctgagagaggacagagagcccagactggagcagctgttccccgacaccagcacccccagacccttcagattcgccggcaagagaatcttcttcctgagcagcagagtgcaccccggcgagacccccagcagcttcgtgttcaacggcttcctggacttcatcctgagacccgacgaccccagagcccagaccctgagaagactgttcgtgttcaagctgatccccatgctgaaccccgacggcgtggtgagaggccactacagaaccgacagcagaggcgtgaacctgaacagacagtacctgaagcccgacgccgtgctgcaccccgccatctacggcgccaaggccgtgctgctgtaccaccacgtgcacagcagactgaacagccagagcagcagcgagcaccagcccagcagctgcctgccccccgacgcccccgtgagcgacctggagaaggccaacaacctgcagaacgaggcccagtgcggccacagcgccgacagacacaacgccgaggcctggaagcagaccgagcccgccgagcagaagctgaacagcgtgtggatcatgccccagcagagcgccggcctggaggagagcgcccccgacaccatcccccccaaggagagcggcgtggcctactacgtggacctgcacggccacgccagcaagagaggctgcttcatgtacggcaacagcttcagcgacgagagcacccaggtggagaacatgctgtaccccaagctgatcagcctgaacagcgcccacttcgacttccagggctgcaacttcagcgagaagaacatgtacgccagagacagaagagacggccagagcaaggagggcagcggcagagtggccatctacaaggccagcggcatcatccacagctacaccctggagtgcaactacaacaccggcagaagcgtgaacagcatccccgccgcctgccacgacaacggcagagccagccccccccccccccccgccttccccagcagatacaccgtggagctgttcgagcaggtgggcagagccatggccatcgccgccctggacatggccgagtgcaacccctggcccagaatcgtgctgagcgagcacagcagcctgaccaacctgagagcctggatgctgaagcacgtgagaaacagcagaggcctgagcagcaccctgaacgtgggcgtgaacaagaagagaggcctgagaaccccccccaagagccacaacggcctgcccgtgagctgcagcgagaacaccctgagcagagccagaagcttcagcaccggcaccagcgccggcggcagcagcagcagccagcagaacagcccccagatgaagaacagccccagcttccccttccacggcagcagacccgccggcctgcccggcctgggcagcagcacccagaaggtgacccacagagtgctgggccccgtgagaggcaagcccgtgtgggagcccctgcagcacgtgttcggctgcctgggccactgctggggcaagtag

SEQ ID NO: 9971 - DNA, 678 bp, synthetic construct
  source 1..678: mol_type = other DNA; note = Synthetic coding sequence
atggtgatggccgagggcaccgccgtgctgagaagaaacagacccggcaccaaggcccaggacttctacaactggcccgacgagagcttcgacgagatggacagcaccctggccgtgcagcagtacatccagcagaacatcagagccgactgcagcaacatcgacaagatcctggagccccccgagggccaggacgagggcgtgtggaagtacgagcacctgagacagttctgcctggagctgaacggcctggccgtgaagctgcagagcgagtgccaccccgacacctgcacccagatgaccgccaccgagcagtggatcttcctgtgcgccgcccacaagacccccaaggagtgccccgccatcgactacaccagacacaccctggacggcgccgcctgcctgctgaacagcaacaagtacttccccagcagagtgagcatcaaggagagcagcgtggccaagctgggcagcgtgtgcagaagaatctacagaatcttcagccacgcctacttccaccacagacagatcttcgacgagtacgagaacgagaccttcctgtgccacagattcaccaagttcgtgatgaagtacaacctgatgagcaaggacaacctgatcgtgcccatcctggaggaggaggtgcagaacagcgtgagcggcgagagcgaggcctag

SEQ ID NO: 9972 - DNA, 1173 bp, synthetic construct
  source 1..1173: mol_type = other DNA; note = Synthetic coding sequence
atggccgcccagaaggacctgtgggacgccatcgtgatcggcgccggcatccagggctgcttcaccgcctaccacctggccaagcacagaaagagaatcctgctgctggagcagttcttcctgccccacagcagaggcagcagccacggccagagcagaatcatcagaaaggcctacctggaggacttctacaccagaatgatgcacgagtgctaccagatctgggcccagctggagcacgaggccggcacccagctgcacagacagaccggcctgctgctgctgggcatgaaggagaaccaggagctgaagaccatccaggccaacctgagcagacagagagtggagcaccagtgcctgagcagcgaggagctgaagcagagattccccaacatcagactgcccagaggcgaggtgggcctgctggacaacagcggcggcgtgatctacgcctacaaggccctgagagccctgcaggacgccatcagacagctgggcggcatcgtgagagacggcgagaaggtggtggagatcaaccccggcctgctggtgaccgtgaagaccaccagcagaagctaccaggccaagagcctggtgatcaccgccggcccctggaccaaccagctgctgagacccctgggcatcgagatgcccctgcagaccctgagaatcaacgtgtgctactggagagagatggtgcccggcagctacggcgtgagccaggccttcccctgcttcctgtggctgggcctgtgcccccaccacatctacggcctgcccaccggcgagtaccccggcctgatgaaggtgagctaccaccacggcaaccacgccgaccccgaggagagagactgccccaccgccagaaccgacatcggcgacgtgcagatcctgagcagcttcgtgagagaccacctgcccgacctgaagcccgagcccgccgtgatcgagagctgcatgtacaccaacacccccgacgagcagttcatcctggacagacaccccaagtacgacaacatcgtgatcggcgccggcttcagcggccacggcttcaagctggcccccgtggtgggcaagatcctgtacgagctgagcatgaagctgacccccagctacgacctggcccccttcagaatcagcagattccccagcctgggcaaggcccacctgtag

SEQ ID NO: 9973 - DNA, 135 bp, synthetic construct
  source 1..135: mol_type = other DNA; note = Synthetic coding sequence
atgagcgacaagcccgacatggccgagatcgagaagttcgacaagagcaagctgaagaagaccgagatgcaggagaagaaccccctgcccagcaaggagaccatcgagcaggagaagcaggccagcgagagctag

SEQ ID NO: 9974 - DNA, 1323 bp, synthetic construct
  source 1..1323: mol_type = other DNA; note = Synthetic coding sequence
atgcccatcccccccccccccccccccccccccggccccccccccccccccaccttccaccaggccaacaccgagcagcccaagctgagcagagacgagcagagaggcagaggcgccctgctgcaggacatctgcaagggcaccaagctgaagaaggtgaccaacatcaacgacagaagcgcccccatcctggagaagcccaagggcagcagcggcggctacggcagcggcggcgccgccctgcagcccaagggcggcctgttccagggcggcgtgctgaagctgagacccgtgggcgccaaggacggcagcgagaacctggccggcaagcccgccctgcagatccccagcagcagagccgccgcccccagaccccccgtgagcgccgccagcggcagaccccaggacgacaccgacagcagcagagccagcctgcccgagctgcccagaatgcagagacccagcctgcccgacctgagcagacccaacaccaccagcagcaccggcatgaagcacagcagcagcgccccccccccccccccccccggcagaagagccaacgccccccccacccccctgcccatgcacagcagcaaggcccccgcctacaacagagagaagcccctgccccccacccccggccagagactgcaccccggcagagagggcccccccgcccccccccccgtgaagcccccccccagccccgtgaacatcagaaccggccccagcggccagagcctggccccccccccccccccctacagacagccccccggcgtgcccaacggccccagcagccccaccaacgagagcgcccccgagctgccccagagacacaacagcctgcacagaaagacccccggccccgtgagaggcctggccccccccccccccaccagcgccagccccagcctgctgagcaacagaccccccccccccgccagagacccccccagcagaggcgccgccccccccccccccccccccgtgatcagaaacggcgccagagacgcccccccccccccccccccctacagaatgcacggcagcgagccccccagcagaggcaagcccccccccccccccagcagaacccccgccggcccccccccccccccccccccccccctgagaaacggccacagagacagcatcaccaccgtgagaagcttcctggacgacttcgagagcaagtacagcttccaccccgtggaggacttccccgcccccgaggagtacaagcacttccagagaatctaccccagcaagaccaacagagccgccagaggcgccccccccctgccccccatcctgagatag

SEQ ID NO: 9975 - DNA, 2703 bp, synthetic construct
  source 1..2703: mol_type = other DNA; note = Synthetic coding sequence
atgaactaccccggcagaggcagccccagaagccccgagcacaacggcagaggcggcggcggcggcgcctgggagctgggcagcgacgccagacccgccttcggcggcggcgtgtgctgcttcgagcacctgcccggcggcgaccccgacgacggcgacgtgcccctggccctgctgagaggcgagcccggcctgcacctggcccccggcaccgacgaccacaaccaccacctggccctggacccctgcctgagcgacgagaactacgacttcagcagcgccgagagcggcagcagcctgagatactacagcgagggcgagagcggcggcggcggcagcagcctgagcctgcaccccccccagcagccccccctggtgcccaccaacagcggcggcggcggcgccaccggcggcagccccggcgagagaaagagaaccagactgggcggccccgccgccagacacagatacgaggtggtgaccgagctgggccccgaggaggtgagatggttctacaaggaggacaagaagacctggaagcccttcatcggctacgacagcctgagaatcgagctggccttcagaaccctgctgcagaccaccggcgccagaccccagggcggcgacagagacggcgaccacgtgtgcagccccaccggccccgccagcagcagcggcgaggacgacgacgaggacagagcctgcggcttctgccagagcaccaccggccacgagcccgagatggtggagctggtgaacatcgagcccgtgtgcgtgagaggcggcctgtacgaggtggacgtgacccagggcgagtgctaccccgtgtactggaaccaggccgacaagatccccgtgatgagaggccagtggttcatcgacggcacctggcagcccctggaggaggaggagagcaacctgatcgagcaggagcacctgaactgcttcagaggccagcagatgcaggagaacttcgacatcgaggtgagcaagagcatcgacggcaaggacgccgtgcacagcttcaagctgagcagaaaccacgtggactggcacagcgtggacgaggtgtacctgtacagcgacgccaccaccagcaagatcgccagaaccgtgacccagaagctgggcttcagcaaggccagcagcagcggcaccagactgcacagaggctacgtggaggaggccaccctggaggacaagcccagccagaccacccacatcgtgttcgtggtgcacggcatcggccagaagatggaccagggcagaatcatcaagaacaccgccatgatgagagaggccgccagaaagatcgaggagagacacttcagcaaccacgccacccacgtggagttcctgcccgtggagtggagaagcaagctgaccctggacggcgacaccgtggacagcatcacccccgacaaggtgagaggcctgagagacatgctgaacagcagcgccatggacatcatgtactacaccagccccctgtacagagacgagctggtgaagggcctgcagcaggagctgaacagactgtacagcctgttctgcagcagaaaccccgacttcgaggagaagggcggcaaggtgagcatcgtgagccacagcctgggctgcgtgatcacctacgacatcatgaccggctggaaccccgtgagactgtacgagcagctgctgcagaaggaggaggagctgcccgacgagagatggatgagctacgaggagagacacctgctggacgagctgtacatcaccaagagaagactgaaggagatcgaggagagactgcacggcctgaaggccagcagcatgacccagacccccgccctgaagttcaaggtggagaacttcttctgcatgggcagccccctggccgtgttcctggccctgagaggcatcagacccggcaacaccggcagccaggaccacatcctgcccagagagatctgcaacagactgctgaacatcttccaccccaccgaccccgtggcctacagactggagcccctgatcctgaagcactacagcaacatcagccccgtgcagatccactggtacaacaccagcaaccccctgccctacgagcacatgaagcccagcttcctgaaccccgccaaggagcccaccagcgtgagcgagaacgagggcatcagcaccatccccagccccgtgaccagccccgtgctgagcagaagacactacggcgagagcatcaccaacatcggcaaggccagcatcctgggcgccgccagcatcggcaagggcctgggcggcatgctgttcagcagattcggcagaagcagcaccacccagagcagcgagaccagcaaggacagcatggaggacgagaagaagcccgtggccagccccagcgccaccaccgtgggcacccagaccctgccccacagcagcagcggcttcctggacagcgcctacttcagactgcaggagagcttcttcaacctgccccagctgctgttccccgagaacgtgatgcagaacaaggacaacgccctggtggagctggaccacagaatcgacttcgagctgagagagggcctggtggagagcagatactggagcgccgtgaccagccacaccgcctactggagcagcctggacgtggccctgttcctgctgaccttcatgtacaagcacgagcacgacgacgacgccaagcccaacctggaccccatctag

SEQ ID NO: 9976 - DNA, 1278 bp, synthetic construct
  source 1..1278: mol_type = other DNA; note = Synthetic coding sequence
atgaacaagatgcccgccggcgagcaggagtgcgagtacaacaaggagggcaagtactacagcaagggcgtgaagctggtgagaaagaagaagaagatccccggctacagatggggcgacatcaagatcaacatcatcggcgagaaggacgacctgcccatccacttctgcgacaagtgcgacctgcccatcaagatctacggcagaatcatcccctgcaagcacgccttctgctaccactgcgccaacctgtacgacaaggtgggctacaaggtgtgccccagatgcagataccccgtgctgagaatcgaggcccacaagagaggcagcgtgttcatgtgcagcatcgtgcagcagtgcaagagaacctacctgagccagaagagcctgcaggcccacatcaagagaagacacaagagagccagaaagcaggtgaccagcgccagcctggagaaggtgagaccccacatcgcccccccccagaccgagatcagcgacatccccaagagactgcaggacagagaccacctgagctacatcccccccgagcagcacaccatggtgagcctgcccagcgtgcagcacatgctgcaggagcagcacaaccagccccacaaggacatccaggcccccccccccgagctgagcctgagcctgcccttccccatccagtgggagaccgtgagcatcttcaccagaaagcacggcaacctgaccgtggaccacatccagaacaacagcgacagcggcgccaagaagcccaccccccccgactactaccccgagtgccagagccagcccgccgtgagcagcccccaccacatcatcccccagaagcagcactacgcccccccccccagccccagcagccccgtgaaccaccagatgccctaccccccccaggacgtggtgacccccaacagcgtgagaagccaggtgcccgccctgaccaccacctacgaccccagcagcggctacatcatcgtgaaggtgccccccgacatgaacagcccccccctgagagccccccagagccagaacggcaaccccagcgccagcgagttcgccagccaccactacaacctgaacatcctgccccagttcaccgagaaccaggagaccctgagcccccagttcacccagaccgacgccatggaccacagaagatggcccgcctggaagagactgagcccctgcccccccaccagaagccccccccccagcaccctgcacggcagaagccaccacagccaccagagaagacacagaagatactag

SEQ ID NO: 9977 - DNA, 1926 bp, synthetic construct
  source 1..1926: mol_type = other DNA; note = Synthetic coding sequence
atgggcccccccctgaagctgttcaagaaccagaagtaccaggagctgaagcaggagtgcatcaaggacagcagactgttctgcgaccccaccttcctgcccgagaacgacagcctgttctacaacagactgctgcccggcaaggtggtgtggaagagaccccaggacatctgcgacgacccccacctgatcgtgggcaacatcagcaaccaccagctgacccagggcagactgggccacaagcccatggtgagcgccttcagctgcctggccgtgcaggagagccactggaccaagaccatccccaaccacaaggagcaggagtgggacccccagaagaccgagaagtacgccggcatcttccacttcagattctggcacttcggcgagtggaccgaggtggtgatcgacgacctgctgcccaccatcaacggcgacctggtgttcagcttcagcaccagcatgaacgagttctggaacgccctgctggagaaggcctacgccaagctgctgggctgctacgaggccctggacggcctgaccatcaccgacatcatcgtggacttcaccggcaccctggccgagaccgtggacatgcagaagggcagatacaccgagctggtggaggagaagtacaagctgttcggcgagctgtacaagaccttcaccaagggcggcctgatctgctgcagcatcgagagccccaaccaggaggagcaggaggtggagaccgactggggcctgctgaagggccacacctacaccatgaccgacatcagaaagatcagactgggcgagagactggtggaggtgttcagcgccgagaaggtgtacatggtgagactgagaaaccccctgggcagacaggagtggagcggcccctggagcgagatcagcgaggagtggcagcagctgaccgccagcgacagaaagaacctgggcctggtgatgagcgacgacggcgagttctggatgagcctggaggacttctgcagaaacttccacaagctgaacgtgtgcagaaacgtgaacaaccccatcttcggcagaaaggagctggagagcgtgctgggctgctggaccgtggacgacgaccccctgatgaacagaagcggcggctgctacaacaacagagacaccttcctgcagaacccccagtacatcttcaccgtgcccgaggacggccacaaggtgatcatgagcctgcagcagaaggacctgagaacctacagaagaatgggcagacccgacaactacatcatcggcttcgagctgttcaaggtggagatgaacagaaagttcagactgcaccacctgtacatccaggagagagccggcaccagcacctacatcgacaccagaaccgtgttcctgagcaagtacctgaagaagggcaactacgtgctggtgcccaccatgttccagcacggcagaaccagcgagttcctgctgagaatcttcagcgaggtgcccgtgcagctgagagagctgaccctggacatgcccaagatgagctgctggaacctggccagaggctaccccaaggtggtgacccagatcaccgtgcacagcgccgaggacctggagaagaagtacgccaacgagaccgtgaacccctacctggtgatcaagtgcggcaaggaggaggtgagaagccccgtgcagaagaacaccgtgcacgccatcttcgacacccaggccatcttctacagaagaaccaccgacatccccatcatcgtgcaggtgtggaacagcagaaagttctgcgaccagttcctgggccaggtgaccctggacgccgaccccagcgactgcagagacctgaagagcctgtacctgagaaagaagggcggccccaccgccaaggtgaagcagggccacatcagcttcaaggtgatcagcagcgacgacctgaccgagctgtag

SEQ ID NO: 9978 - DNA, 3180 bp, synthetic construct
  source 1..3180: mol_type = other DNA; note = Synthetic coding sequence
atggccgccgtggccggcagcggcgccgccgccgcccccagcagcctgctgctggtggtgggcagcgagttcggcagccccggcctgctgacctacgtgctggaggagctggagagaggcatcagaagctgggacgtggaccccggcgtgtgcaacctggacgagcagctgaaggtgttcgtgagcagacacagcgccaccttcagcagcatcgtgaagggccagagaagcctgcaccacagaggcgacaacctggagaccctggtgctgctgaaccccagcgacaagagcctgtacgacgagctgagaaacctgctgctggaccccgccagccacaagctgctggtgctggccggcccctgcctggaggagaccggcgagctgctgctgcagaccggcggcttcagcccccaccacttcctgcaggtgctgaaggacagagagatcagagacatcctggccaccacccccccccccgtgcagccccccatcctgaccatcacctgccccaccttcggcgactgggcccagctggcccccgccgtgcccggcctgcagggcgccctgagactgcagctgagactgaacccccccgcccagctgcccaacagcgagggcctgtgcgagttcctggagtacgtggccgagagcctggagccccccagccccttcgagctgctggagccccccaccagcggcggcttcctgagactgggcagaccctgctgctacatcttccccggcggcctgggcgacgccgccttcttcgccgtgaacggcttcaccgtgctggtgaacggcggcagcaaccccaagagcagcttctggaagctggtgagacacctggacagagtggacgccgtgctggtgacccaccccggcgccgacagcctgcccggcctgaacagcctgctgagaagaaagctggccgagagaagcgaggtggccgccggcggcggcagctgggacgacagactgagaagactgatcagccccaacctgggcgtggtgttcttcaacgcctgcgaggccgccagcagactggccagaggcgaggacgaggccgagctggccctgagcctgctggcccagctgggcatcacccccctgcccctgagcagaggccccgtgcccgccaagcccaccgtgctgttcgagaagatgggcgtgggcagactggacatgtacgtgctgcacccccccagcgccggcgccgagagaaccctggccagcgtgtgcgccctgctggtgtggcaccccgccggccccggcgagaaggtggtgagagtgctgttccccggctgcaccccccccgcctgcctgctggacggcctggtgagactgcagcacctgagattcctgagagagcccgtggtgaccccccaggacctggagggccccggcagagccgagagcaaggagagcgtgggcagcagagacagcagcaagagagagggcctgctggccacccaccccagacccggccaggagagacccggcgtggccagaaaggagcccgccagagccgaggcccccagaaagaccgagaaggaggccaagacccccagagagctgaagaaggaccccaagcccagcgtgagcagaacccagcccagagaggtgagaagagccgccagcagcgtgcccaacctgaagaagaccaacgcccaggccgcccccaagcccagaaaggcccccagcaccagccacagcggcttcccccccgtggccaacggccccagaagcccccccagcctgagatgcggcgaggccagcccccccagcgccgcctgcggcagccccgccagccagctggtggccacccccagcctggagctgggccccatccccgccggcgaggagaaggccctggagctgcccctggccgccagcagcatccccagacccagaacccccagccccgagagccacagaagccccgccgagggcagcgagagactgagcctgagccccctgagaggcggcgaggccggccccgacgccagccccaccgtgaccacccccaccgtgaccacccccagcctgcccgccgaggtgggcagcccccacagcaccgaggtggacgagagcctgagcgtgagcttcgagcaggtgctgccccccagcgcccccaccagcgaggccggcctgagcctgcccctgagaggccccagagccagaagaagcgccagcccccacgacgtggacctgtgcctggtgagcccctgcgagttcgagcacagaaaggccgtgcccatggcccccgcccccgccagccccggcagcagcaacgacagcagcgccagaagccaggagagagccggcggcctgggcgccgaggagaccccccccaccagcgtgagcgagagcctgcccaccctgagcgacagcgaccccgtgcccctggcccccggcgccgccgacagcgacgaggacaccgagggcttcggcgtgcccagacacgaccccctgcccgaccccctgaaggtgcccccccccctgcccgaccccagcagcatctgcatggtggaccccgagatgctgccccccaagaccgccagacagaccgagaacgtgagcagaaccagaaagcccctggccagacccaacagcagagccgccgcccccaaggccacccccgtggccgccgccaagaccaagggcctggccggcggcgacagagccagcagacccctgagcgccagaagcgagcccagcgagaagggcggcagagcccccctgagcagaaagagcagcacccccaagaccgccaccagaggccccagcggcagcgccagcagcagacccggcgtgagcgccaccccccccaagagccccgtgtacctggacctggcctacctgcccagcggcagcagcgcccacctggtggacgaggagttcttccagagagtgagagccctgtgctacgtgatcagcggccaggaccagagaaaggaggagggcatgagagccgtgctggacgccctgctggccagcaagcagcactgggacagagacctgcaggtgaccctgatccccaccttcgacagcgtggccatgcacacctggtacgccgagacccacgccagacaccaggccctgggcatcaccgtgctgggcagcaacagcatggtgagcatgcaggacgacgccttccccgcctgcaaggtggagttctag

SEQ ID NO: 9979 - DNA, 4734 bp, synthetic construct
  source 1..4734: mol_type = other DNA; note = Synthetic coding sequence
atggaggccggcagcgtggtgagagccatcttcgacttctgccccagcgtgagcgaggagctgcccctgttcgtgggcgacatcatcgaggtgctggccgtggtggacgagttctggctgctgggcaagaaggaggacgtgaccggccagttccccagcagcttcgtggagatcgtgaccatccccagcctgaaggagggcgagagactgttcgtgtgcatctgcgagttcaccagccaggagctggacaacctgcccctgcacagaggcgacctggtgatcctggacggcatccccaccgccggctggctgcagggcagaagctgctggggcgccagaggcttcttccccagcagctgcgtgagagagctgtgcctgagcagccagagcagacagtggcacagccagagcgccctgttccagatccccgagtacagcatgggccaggccagagccctgatgggcctgagcgcccagctggacgaggagctggacttcagagagggcgacgtgatcaccatcatcggcgtgcccgagcccggctggttcgagggcgagctggagggcagaagaggcatcttccccgagggcttcgtggagctgctgggccccctgagaaccgtggacgagagcgtgagcagcggcaaccaggacgactgcatcgtgaacggcgaggtggacacccccgtgggcgaggaggagatcggccccgacgaggacgaggaggagcccggcacctacggcgtggccctgtacagattccaggccctggagcccaacgagctggacttcgaggtgggcgacaagatcagaatcctggccaccctggaggacggctggctggagggcagcctgaagggcagaaccggcatcttcccctacagattcgtgaagctgtgccccgacaccagagtggaggagaccatggccctgccccaggagggcagcctggccagaatccccgagaccagcctggactgcctggagaacaccctgggcgtggaggagcagagacacgagaccagcgaccacgaggccgaggagcccgactgcatcatcagcgaggcccccaccagccccctgggccacctgaccagcgagtacgacaccgacagaaacagctaccaggacgaggacaccgccggcggcccccccagaagccccggcgtggagtgggagatgcccctggccaccgacagccccaccagcgaccccaccgaggtggtgaacggcatcagcagccagccccaggtgcccttccaccccaacctgcagaagagccagtactacagcaccgtgggcggcagccacccccacagcgagcagtaccccgacctgctgcccctggaggccagaaccagagactacgccagcctgccccccaagagaatgtacagccagctgaagaccctgcagaagcccgtgctgcccctgtacagaggcagcagcgtgagcgccagcagagtggtgaagcccagacagagcagcccccagctgcacaacctggccagctacaccaagaagcaccacaccagcagcgtgtacagcatcagcgagagactggagatgaagcccggcccccaggcccagggcctggtgatggaggccgccacccacagccagggcgacggcagcaccgacctggacagcaagctgacccagcagctgatcgagttcgagaagagcctggccggccccggcaccgagcccgacaagatcctgagacacttcagcatcatggacttcaacagcgagaaggacatcgtgagaggcagcagcaagctgatcaccgagcaggagctgcccgagagaagaaaggccctgagaccccccccccccagaccctgcacccccgtgagcaccagcccccacctgctggtggaccagaacctgaagcccgccccccccctggtggtgagacccagcagacccgcccccctgccccccagcgcccagcagagaaccaacgccgtgagccccaagctgctgagcagacacagacccacctgcgagaccctggagaaggagggccccggccacatgggcagaagcctggaccagaccagcccctgccccctggtgctggtgagaatcgaggagatggagagagacctggacatgtacagcagagcccaggaggagctgaacctgatgctggaggagaagcaggacgagagcagcagagccgagaccctggaggacctgaagttctgcgagagcaacatcgagagcctgaacatggagctgcagcagctgagagagatgaccctgctgagcagccagagcagcagcctggtggcccccagcggcagcgtgagcgccgagaaccccgagcagagaatgctggagaagagagccaaggtgatcgaggagctgctgcagaccgagagagactacatcagagacctggagatgtgcatcgagagaatcatggtgcccatgcagcaggcccaggtgcccaacatcgacttcgagggcctgttcggcaacatgcagatggtgatcaaggtgagcaagcagctgctggccgccctggagatcagcgacgccgtgggccccgtgttcctgggccacagagacgagctggagggcacctacaagatctactgccagaaccacgacgaggccatcgccctgctggagatctacgagaaggacgagaagatccagaagcacctgcaggacagcctggccgacctgaagagcctgtacaacgagtggggctgcaccaactacatcaacctgggcagcttcctgatcaagcccgtgcagagagtgatgagataccccctgctgctgatggagctgctgaacagcacccccgagagccaccccgacaaggtgcccctgaccaacgccgtgctggccgtgaaggagatcaacgtgaacatcaacgagtacaagagaagaaaggacctggtgctgaagtacagaaagggcgacgaggacagcctgatggagaagatcagcaagctgaacatccacagcatcatcaagaagagcaacagagtgagcagccacctgaagcacctgaccggcttcgccccccagatcaaggacgaggtgttcgaggagaccgagaagaacttcagaatgcaggagagactgatcaagagcttcatcagagacctgagcctgtacctgcagcacatcagagagagcgcctgcgtgaaggtggtggccgccgtgagcatgtgggacgtgtgcatggagagaggccacagagacctggagcagttcgagagagtgcacagatacatcagcgaccagctgttcaccaacttcaaggagagaaccgagagactggtgatcagccccctgaaccagctgctgagcatgttcaccggcccccacaagctggtgcagaagagattcgacaagctgctggacttctacaactgcaccgagagagccgagaagctgaaggacaagaagaccctggaggagctgcagagcgccagaaacaactacgaggccctgaacgcccagctgctggacgagctgcccaagttccaccagtacgcccagggcctgttcaccaactgcgtgcacggctacgccgaggcccactgcgacttcgtgcaccaggccctggagcagctgaagcccctgctgagcctgctgaaggtggccggcagagagggcaacctgatcgccatcttccacgaggagcacagcagagtgctgcagcagctgcaggtgttcaccttcttccccgagagcctgcccgccaccaagaagcccttcgagagaaagaccatcgacagacagagcgccagaaagcccctgctgggcctgcccagctacatgctgcagagcgaggagctgagagccagcctgctggccagatacccccccgagaagctgttccaggccgagagaaacttcaacgccgcccaggacctggacgtgagcctgctggagggcgacctggtgggcgtgatcaagaagaaggaccccatgggcagccagaacagatggctgatcgacaacggcgtgaccaagggcttcgtgtacagcagcttcctgaagccctacaaccccagaagaagccacagcgacgccagcgtgggcagccacagcagcaccgagagcgagcacggcagcagcagccccagattccccagacagaacagcggcagcaccctgaccttcaaccccagcagcatggccgtgagcttcaccagcggcagctgccagaagcagccccaggacgccagccccccccccaaggagtgcgaccagggcaccctgagcgccagcctgaaccccagcaacagcgagagcagccccagcagatgccccagcgaccccgacagcaccagccagcccagaagcggcgacagcgccgacgtggccagagacgtgaagcagcccaccgccacccccagaagctacagaaacttcagacaccccgagatcgtgggctacagcgtgcccggcagaaacggccagagccaggacctggtgaagggctgcgccagaaccgcccaggcccccgaggacagaagcaccgagcccgacggcagcgaggccgagggcaaccaggtgtacttcgccgtgtacaccttcaaggccagaaaccccaacgagctgagcgtgagcgccaaccagaagctgaagatcctggagttcaaggacgtgaccggcaacaccgagtggtggctggccgaggtgaacggcaagaagggctacgtgcccagcaactacatcagaaagaccgagtacacctag

SEQ ID NO: 9980 - DNA, 3186 bp, synthetic construct
  source 1..3186: mol_type = other DNA; note = Synthetic coding sequence
atgctgagaaccgccggcagagacggcctgtgcagactgagcacctacctggaggagctggaggccgtggagctgaagaagttcaagctgtacctgggcaccgccaccgagctgggcgagggcaagatcccctggggcagcatggagaaggccggccccctggagatggcccagctgctgatcacccacttcggccccgaggaggcctggagactggccctgagcaccttcgagagaatcaacagaaaggacctgtgggagagaggccagagagaggacctggtgagagacaccccccccggcggccccagcagcctgggcaaccagagcacctgcctgctggaggtgagcctggtgacccccagaaaggacccccaggagacctacagagactacgtgagaagaaagttcagactgatggaggacagaaacgccagactgggcgagtgcgtgaacctgagccacagatacaccagactgctgctggtgaaggagcacagcaaccccatgcaggtgcagcagcagctgctggacaccggcagaggccacgccagaaccgtgggccaccaggccagccccatcaagatcgagaccctgttcgagcccgacgaggagagacccgagccccccagaaccgtggtgatgcagggcgccgccggcatcggcaagagcatgctggcccacaaggtgatgctggactgggccgacggcaagctgttccagggcagattcgactacctgttctacatcaactgcagagagatgaaccagagcgccaccgagtgcagcatgcaggacctgatcttcagctgctggcccgagcccagcgcccccctgcaggagctgatcagagtgcccgagagactgctgttcatcatcgacggcttcgacgagctgaagcccagcttccacgacccccagggcccctggtgcctgtgctgggaggagaagagacccaccgagctgctgctgaacagcctgatcagaaagaagctgctgcccgagctgagcctgctgatcaccaccagacccaccgccctggagaagctgcacagactgctggagcaccccagacacgtggagatcctgggcttcagcgaggccgagagaaaggagtacttctacaagtacttccacaacgccgagcaggccggccaggtgttcaactacgtgagagacaacgagcccctgttcaccatgtgcttcgtgcccctggtgtgctgggtggtgtgcacctgcctgcagcagcagctggagggcggcggcctgctgagacagaccagcagaaccaccaccgccgtgtacatgctgtacctgctgagcctgatgcagcccaagcccggcgcccccagactgcagcccccccccaaccagagaggcctgtgcagcctggccgccgacggcctgtggaaccagaagatcctgttcgaggagcaggacctgagaaagcacggcctggacggcgaggacgtgagcgccttcctgaacatgaacatcttccagaaggacatcaactgcgagagatactacagcttcatccacctgagcttccaggagttcttcgccgccatgtactacatcctggacgagggcgagggcggcgccggccccgaccaggacgtgaccagactgctgaccgagtacgccttcagcgagagaagcttcctggccctgaccagcagattcctgttcggcctgctgaacgaggagaccagaagccacctggagaagagcctgtgctggaaggtgagcccccacatcaagatggacctgctgcagtggatccagagcaaggcccagagcgacggcagcaccctgcagcagggcagcctggagttcttcagctgcctgtacgagatccaggaggaggagttcatccagcaggccctgagccacttccaggtgatcgtggtgagcaacatcgccagcaagatggagcacatggtgagcagcttctgcctgaagagatgcagaagcgcccaggtgctgcacctgtacggcgccacctacagcgccgacggcgaggacagagccagatgcagcgccggcgcccacaccctgctggtgcagctgcccgagagaaccgtgctgctggacgcctacagcgagcacctggccgccgccctgtgcaccaaccccaacctgatcgagctgagcctgtacagaaacgccctgggcagcagaggcgtgaagctgctgtgccagggcctgagacaccccaactgcaagctgcagaacctgagactgaagagatgcagaatcagcagcagcgcctgcgaggacctgagcgccgccctgatcgccaacaagaacctgaccagaatggacctgagcggcaacggcgtgggcttccccggcatgatgctgctgtgcgagggcctgagacacccccagtgcagactgcagatgatccagctgagaaagtgccagctggagagcggcgcctgccaggagatggccagcgtgctgggcaccaacccccacctggtggagctggacctgaccggcaacgccctggaggacctgggcctgagactgctgtgccagggcctgagacaccccgtgtgcagactgagaaccctgtggctgaagatctgcagactgaccgccgccgcctgcgacgagctggccagcaccctgagcgtgaaccagagcctgagagagctggacctgagcctgaacgagctgggcgacctgggcgtgctgctgctgtgcgagggcctgagacaccccacctgcaagctgcagaccctgagactgggcatctgcagactgggcagcgccgcctgcgagggcctgagcgtggtgctgcaggccaaccacaacctgagagagctggacctgagcttcaacgacctgggcgactggggcctgtggctgctggccgagggcctgcagcaccccgcctgcagactgcagaagctgtggctggacagctgcggcctgaccgccaaggcctgcgagaacctgtacttcaccctgggcatcaaccagaccctgaccgacctgtacctgaccaacaacgccctgggcgacaccggcgtgagactgctgtgcaagagactgagccaccccggctgcaagctgagagtgctgtggctgttcggcatggacctgaacaagatgacccacagcagactggccgccctgagagtgaccaagccctacctggacatcggctgctag

SEQ ID NO: 9981 - DNA, 3963 bp, synthetic construct
  source 1..3963: mol_type = other DNA; note = Synthetic coding sequence
atggccaacgacagccccgccaagagcctggtggacatcgacctgagcagcctgagagaccccgccggcatcttcgagctggtggaggtggtgggcaacggcacctacggccaggtgtacaagggcagacacgtgaagaccggccagctggccgccatcaaggtgatggacgtgaccgaggacgaggaggaggagatcaagctggagatcaacatgctgaagaagtacagccaccacagaaacatcgccacctactacggcgccttcatcaagaagagcccccccggccacgacgaccagctgtggctggtgatggagttctgcggcgccggcagcatcaccgacctggtgaagaacaccaagggcaacaccctgaaggaggactggatcgcctacatcagcagagagatcctgagaggcctggcccacctgcacatccaccacgtgatccacagagacatcaagggccagaacgtgctgctgaccgagaacgccgaggtgaagctggtggacttcggcgtgagcgcccagctggacagaaccgtgggcagaagaaacaccttcatcggcaccccctactggatggcccccgaggtgatcgcctgcgacgagaaccccgacgccacctacgactacagaagcgacctgtggagctgcggcatcaccgccatcgagatggccgagggcgccccccccctgtgcgacatgcaccccatgagagccctgttcctgatccccagaaaccccccccccagactgaagagcaagaagtggagcaagaagttcttcagcttcatcgagggctgcctggtgaagaactacatgcagagacccagcaccgagcagctgctgaagcaccccttcatcagagaccagcccaacgagagacaggtgagaatccagctgaaggaccacatcgacagaaccagaaagaagagaggcgagaaggacgagaccgagtacgagtacagcggcagcgaggaggaggaggaggaggtgcccgagcaggagggcgagcccagcagcatcgtgaacgtgcccggcgagagcaccctgagaagagacttcctgagactgcagcaggagaacaaggagagaagcgaggccctgagaagacagcagctgctgcaggagcagcagctgagagagcaggaggagtacaagagacagctgctggccgagagacagaagagaatcgagcagcagaaggagcagagaagaagactggaggagcagcagagaagagagagagaggccagaagacagcaggagagagagcagagaagaagagagcaggaggagaagagaagactggaggagctggagagaagaagaaaggaggaggaggagagaagaagagccgaggaggagaagagaagagtggagagagagcaggagtacatcagaagacagctggaggaggagcagagacacctggaggtgctgcagcagcagctgctgcaggagcaggccatgctgctggagtgcagatggagagagatggaggagcacagacaggccgagagactgcagagacagctgcagcaggagcaggcctacctgctgagcctgcagcacgaccacagaagaccccacccccagcacagccagcagcccccccccccccagcaggagagaagcaagcccagcttccacgcccccgagcccaaggcccactacgagcccgccgacagagccagagaggtggaggacagattcagaaagaccaaccacagcagccccgaggcccagagcaagcagaccggcagagtgctggagccccccgtgcccagcagaagcgagagcttcagcaacggcaacagcgagagcgtgcaccccgccctgcagagacccgccgagccccaggtgcagtggagccacctggccagcctgaagaacaacgtgagccccgtgagcagaagccacagcttcagcgaccccagccccaagttcgcccaccaccacctgagaagccaggacccctgcccccccagcagaagcgaggtgctgagccagagcagcgacagcaagagcgaggcccccgaccccacccagaaggcctggagcagaagcgacagcgacgaggtgccccccagagtgcccgtgagaaccaccagcagaagccccgtgctgagcagaagagacagccccctgcagggcagcggccagcagaacagccaggccggccagagaaacagcaccagcagcatcgagcccagactgctgtgggagagagtggagaagctggtgcccagacccggcagcggcagcagcagcggcagcagcaacagcggcagccagcccggcagccaccccggcagccagagcggcagcggcgagagattcagagtgagaagcagcagcaagagcgagggcagccccagccagagactggagaacgccgtgaagaagcccgaggacaagaaggaggtgttcagacccctgaagcccgccgtgagaatcgacctgaccgccctggccaaggagctgagagccgtggaggacgtgagacccccccacaaggtgaccgactacagcagcagcagcgaggagagcggcaccaccgacgaggaggacgacgacgtggagcaggagggcgccgacgagagcaccagcggccccgaggacaccagagccgccagcagcctgaacctgagcaacggcgagaccgagagcgtgaagaccatgatcgtgcacgacgacgtggagagcgagcccgccatgacccccagcaaggagggcaccctgatcgtgagacagacccagagcgccagcagcaccctgcagaagcacaagagcagcagcagcttcacccccttcatcgaccccagactgctgcagatcagccccagcagcggcaccaccgtgaccagcgtggtgggcttcagctgcgacggcatgagacccgaggccatcagacaggaccccaccagaaagggcagcgtggtgaacgtgaaccccaccaacaccagaccccagagcgacacccccgagatcagaaagtacaagaagagattcaacagcgagatcctgtgcgccgccctgtggggcgtgaacctgctggtgggcaccgagagcggcctgatgctgctggacagaagcggccagggcaaggtgtaccccctgatcaacagaagaagattccagcagatggacgtgctggagggcctgaacgtgctggtgaccatcagcggcaagaaggacaagctgagagtgtactacctgagctggctgagaaacaagatcctgcacaacgaccccgaggtggagaagaagcagggctggaccaccgtgggcgacctggagggctgcgtgcactacaaggtggtgaagtacgagagaatcaagttcctggtgatcgccctgaagagcagcgtggaggtgtacgcctgggcccccaagccctaccacaagttcatggccttcaagagcttcggcgagctggtgcacaagcccctgctggtggacctgaccgtggaggagggccagagactgaaggtgatctacggcagctgcgccggcttccacgccgtggacgtggacagcggcagcgtgtacgacatctacctgcccacccacatccagtgcagcatcaagccccacgccatcatcatcctgcccaacaccgacggcatggagctgctggtgtgctacgaggacgagggcgtgtacgtgaacacctacggcagaatcaccaaggacgtggtgctgcagtggggcgagatgcccaccagcgtggcctacatcagaagcaaccagaccatgggctggggcgagaaggccatcgagatcagaagcgtggagaccggccacctggacggcgtgttcatgcacaagagagcccagagactgaagttcctgtgcgagagaaacgacaaggtgttcttcgccagcgtgagaagcggcggcagcagccaggtgtacttcatgaccctgggcagaaccagcctgctgagctggtag

SEQ ID NO: 9982 - DNA, 606 bp, synthetic construct
  source 1..606: mol_type = other DNA; note = Synthetic coding sequence
atgtacaccctgctgagcggcctgtacaagtacatgttccagaaggacgagtactgcatcctgatcctgggcctggacaacgccggcaagaccaccttcctggagcagagcaagaccagattcaacaagaactacaagggcatgagcctgagcaagatcaccaccaccgtgggcctgaacatcggcaccgtggacgtgggcaaggccagactgatgttctgggacctgggcggccaggaggagctgcagagcctgtgggacaagtactacgccgagtgccacggcgtgatctacgtgatcgacagcaccgacgaggagagactggccgagagcaagcaggccttcgagaaggtggtgaccagcgaggccctgtgcggcgtgcccgtgctggtgctggccaacaagcaggacgtggagacctgcctgagcatccccgacatcaagaccgccttcagcgactgcaccagcaagatcggcagaagagactgcctgacccaggcctgcagcgccctgaccggcaagggcgtgagagagggcatcgagtggatggtgaagtgcgtggtgagaaacgtgcacagaccccccagacagagagacatcacctag

SEQ ID NO: 9983 - DNA, 1329 bp, synthetic construct
  source 1..1329: mol_type = other DNA; note = Synthetic coding sequence
atgagaggcgccatggagctggagcccgagctgctgctgcaggaggccagagagaacgtggaggccgcccagagctacagaagagagctgggccacagactggagggcctgagagaggccagaagacagatcaaggagagcgccagccagaccagagacgtgctgaagcagcacttcaacgacctgaagggcaccctgggcaagctgctggacgagagactggtgaccctgctgcaggaggtggacaccatcgagcaggagaccatcaagcccctggacgactgccagaagctgatcgagcacggcgtgaacaccgccgaggacctggtgagagagggcgagatcgccatgctgggcggcgtgggcgaggagaacgagaagctgtggagcttcaccaagaaggccagccacatccagctggacagcctgcccgaggtgcccctgctggtggacgtgccctgcctgagcgcccagctggacgacagcatcctgaacatcgtgaaggaccacatcttcaagcacggcaccgtggccagcagaccccccgtgcagatcgaggagctgatcgagaagcccggcggcatcatcgtgagatggtgcaaggtggacgacgacttcaccgcccaggactacagactgcagttcagaaagtgcaccagcaaccacttcgaggacgtgtacgtgggcagcgagaccgagttcatcgtgctgcacatcgaccccaacgtggactaccagttcagagtgtgcgccagaggcgacggcagacaggagtggagcccctggagcgtgccccagatcggccacagcaccctggtgccccacgagtggaccgccggcttcgagggctacagcctgagcagcagaagaaacatcgccctgagaaacgacagcgagagcagcggcgtgctgtacagcagagcccccacctacttctgcggccagaccctgaccttcagagtggagaccgtgggccagcccgacagaagagacagcatcggcgtgtgcgccgagaagcaggacggctacgacagcctgcagagagaccaggccgtgtgcatcagcaccaacggcgccgtgttcgtgaacggcaaggagatgaccaaccagctgcccgccgtgaccagcggcagcaccgtgaccttcgacatcgaggccgtgaccctgggcaccaccagcaacaacgagggcggccacttcaagctgagagtgaccatcagcagcaacaacagagaggtggtgttcgactggctgctggaccagagctgcggcagcctgtacttcggctgcagcttcttctaccccggctggaaggtgctggtgttctag

SEQ ID NO: 9984 - DNA, 1428 bp, synthetic construct
  source 1..1428: mol_type = other DNA; note = Synthetic coding sequence
atggccgccctgaccaccctgttcaagtacatcgacgagaaccaggacagatacatcaagaagctggccaagtgggtggccatccagagcgtgagcgcctggcccgagaagagaggcgagatcagaagaatgatggaggtggccgccgccgacgtgaagcagctgggcggcagcgtggagctggtggacatcggcaagcagaagctgcccgacggcagcgagatccccctgccccccatcctgctgggcagactgggcagcgacccccagaagaagaccgtgtgcatctacggccacctggacgtgcagcccgccgccctggaggacggctgggacagcgagcccttcaccctggtggagagagacggcaagctgtacggcagaggcagcaccgacgacaagggccccgtggccggctggatcaacgccctggaggcctaccagaagaccggccaggagatccccgtgaacgtgagattctgcctggagggcatggaggagagcggcagcgagggcctggacgagctgatcttcgccagaaaggacaccttcttcaaggacgtggactacgtgtgcatcagcgacaactactggctgggcaagaagaagccctgcatcacctacggcctgagaggcatctgctacttcttcatcgaggtggagtgcagcaacaaggacctgcacagcggcgtgtacggcggcagcgtgcacgaggccatgaccgacctgatcctgctgatgggcagcctggtggacaagagaggcaacatcctgatccccggcatcaacgaggccgtggccgccgtgaccgaggaggagcacaagctgtacgacgacatcgacttcgacatcgaggagttcgccaaggacgtgggcgcccagatcctgctgcacagccacaagaaggacatcctgatgcacagatggagataccccagcctgagcctgcacggcatcgagggcgccttcagcggcagcggcgccaagaccgtgatccccagaaaggtggtgggcaagttcagcatcagactggtgcccaacatgacccccgaggtggtgggcgagcaggtgaccagctacctgaccaagaagttcgccgagctgagaagccccaacgagttcaaggtgtacatgggccacggcggcaagccctgggtgagcgacttcagccacccccactacctggccggcagaagagccatgaagaccgtgttcggcgtggagcccgacctgaccagagagggcggcagcatccccgtgaccctgaccttccaggaggccaccggcaagaacgtgatgctgctgcccgtgggcagcgccgacgacggcgcccacagccagaacgagaagctgaacagatacaactacatcgagggcaccaagatgctggccgcctacctgtacgaggtgagccagctgaaggactag

SEQ ID NO: 9985 - DNA, 6291 bp, synthetic construct
  source 1..6291: mol_type = other DNA; note = Synthetic coding sequence
atggccgaggtgaccgtgcccagagtgtacgtggtgttcggcatccactgcatcatggccaaggccagcagcgacgtgcaggtgagcggcttccacagaaagatccagcacgtgaagaacgagctgtgccacatgctgagcctggaggaggtggcccccgtgctgcagcagaccctgctgcaggacaacctgctgggcagagtgcacttcgaccagttcaaggaggccctgatcctgatcctgagcagaaccctgagcaacgaggagcacttccaggagcccgactgcagcctggaggcccagcccaagtacgtgagaggcggcaagagatacggcagaagaagcctgcccgagttccaggagagcgtggaggagttccccgaggtgaccgtgatcgagcccctggacgaggaggccagacccagccacatccccgccggcgactgcagcgagcactggaagacccagagaagcgaggagtacgaggccgagggccagctgagattctggaaccccgacgacctgaacgccagccagagcggcagcagccccccccaggactggatcgaggagaagctgcaggaggtgtgcgaggacctgggcatcaccagagacggccacctgaacagaaagaagctggtgagcatctgcgagcagtacggcctgcagaacgtggacggcgagatgctggaggaggtgttccacaacctggaccccgacggcaccatgagcgtggaggacttcttctacggcctgttcaagaacggcaagagcctgacccccagcgccagcaccccctacagacagctgaagagacacctgagcatgcagagcttcgacgagagcggcagaagaaccaccaccagcagcgccatgaccagcaccatcggcttcagagtgttcagctgcctggacgacggcatgggccacgccagcgtggagagaatcctggacacctggcaggaggagggcatcgagaacagccaggagatcctgaaggccctggacttcagcctggacggcaacatcaacctgaccgagctgaccctggccctggagaacgagctgctggtgaccaagaacagcatccaccaggccgccctggccagcttcaaggccgagatcagacacctgctggagagagtggaccaggtggtgagagagaaggagaagctgagaagcgacctggacaaggccgagaagctgaagagcctgatggccagcgaggtggacgaccaccacgccgccatcgagagaagaaacgagtacaacctgagaaagctggacgaggagtacaaggagagaatcgccgccctgaagaacgagctgagaaaggagagagagcagatcctgcagcaggccggcaagcagagactggagctggagcaggagatcgagaaggccaagaccgaggagaactacatcagagacagactggccctgagcctgaaggagaacagcagactggagaacgagctgctggagaacgccgagaagctggccgagtacgagaacctgaccaacaagctgcagagaaacctggagaacgtgctggccgagaagttcggcgacctggaccccagcagcgccgagttcttcctgcaggaggagagactgacccagatgagaaacgagtacgagagacagtgcagagtgctgcaggaccaggtggacgagctgcagagcgagctggaggagtacagagcccagggcagagtgctgagactgcccctgaagaacagccccagcgaggaggtggaggccaacagcggcggcatcgagcccgagcacggcctgggcagcgaggagtgcaaccccctgaacatgagcatcgaggccgagctggtgatcgagcagatgaaggagcagcaccacagagacatctgctgcctgagactggagctggaggacaaggtgagacactacgagaagcagctggacgagaccgtggtgagctgcaagaaggcccaggagaacatgaagcagagacacgagaacgagacccacaccctggagaagcagatcagcgacctgaagaacgagatcgccgagctgcagggccaggccgccgtgctgaaggaggcccaccacgaggccacctgcagacacgaggaggagaagaagcagctgcaggtgaagctggaggaggagaagacccacctgcaggagaagctgagactgcagcacgagatggagctgaaggccagactgacccaggcccaggccagcttcgagagagagagagagggcctgcagagcagcgcctggaccgaggagaaggtgagaggcctgacccaggagctggagcagttccaccaggagcagctgaccagcctggtggagaagcacaccctggagaaggaggagctgagaaaggagctgctggagaagcaccagagagagctgcaggagggcagagagaagatggagaccgagtgcaacagaagaaccagccagatcgaggcccagttccagagcgactgccagaaggtgaccgagagatgcgagagcgccctgcagagcctggagggcagatacagacaggagctgaaggacctgcaggagcagcagagagaggagaagagccagtgggagttcgagaaggacgagctgacccaggagtgcgccgaggcccaggagctgctgaaggagaccctgaagagagagaagaccaccagcctggtgctgacccaggagagagagatgctggagaagacctacaaggagcacctgaacagcatggtggtggagagacagcagctgctgcaggacctggaggacctgagaaacgtgagcgagacccagcagagcctgctgagcgaccagatcctggagctgaagagcagccacaagagagagctgagagagagagaggaggtgctgtgccaggccggcgccagcgagcagctggccagccagagactggagagactggagatggagcacgaccaggagagacaggagatgatgagcaagctgctggccatggagaacatccacaaggccacctgcgagaccgccgacagagagagagccgagatgagcaccgagatcagcagactgcagagcaagatcaaggagatgcagcaggccaccagccccctgagcatgctgcagagcggctgccaggtgatcggcgaggaggaggtggagggcgacggcgccctgagcctgctgcagcagggcgagcagctgctggaggagaacggcgacgtgctgctgagcctgcagagagcccacgagcaggccgtgaaggagaacgtgaagatggccaccgagatcagcagactgcagcagagactgcagaagctggagcccggcctggtgatgagcagctgcctggacgagcccgccaccgagttcttcggcaacaccgccgagcagaccgagcagttcctgcagcagaacagaaccaagcaggtggagggcgtgaccagaagacacgtgctgagcgacctggaggacgacgaggtgagagacctgggcagcaccggcaccagcagcgtgcagagacaggaggtgaagatcgaggagagcgaggccagcgtggagggcttcagcgagctggagaacagcgaggagaccagaaccgagagctgggagctgaagaaccagatcagccagctgcaggagcagctgatgatgctgtgcgccgactgcgacagagccagcgagaagaagcaggacctgctgttcgacgtgagcgtgctgaagaagaagctgaagatgctggagagaatccccgaggccagccccaagtacaagctgctgtacgaggacgtgagcagagagaacgactgcctgcaggaggagctgagaatgatggagaccagatacgacgaggccctggagaacaacaaggagctgaccgccgaggtgttcagactgcaggacgagctgaagaagatggaggaggtgaccgagaccttcctgagcctggagaagagctacgacgaggtgaagatcgagaacgagggcctgaacgtgctggtgctgagactgcagggcaagatcgagaagctgcaggagagcgtggtgcagagatgcgactgctgcctgtgggaggccagcctggagaacctggagatcgagcccgacggcaacatcctgcagctgaaccagaccctggaggagtgcgtgcccagagtgagaagcgtgcaccacgtgatcgaggagtgcaagcaggagaaccagtacctggagggcaacacccagctgctggagaaggtgaaggcccacgagatcgcctggctgcacggcaccatccagacccaccaggagagacccagagtgcagaaccaggtgatcctggaggagaacaccaccctgctgggcttccaggacaagcacttccagcaccaggccaccatcgccgagctggagctggagaagaccaagctgcaggagctgaccagaaagctgaaggagagagtgaccatcctggtgaagcagaaggacgtgctgagccacggcgagaaggaggaggagctgaaggccatgatgcacgacctgcagatcacctgcagcgagatgcagcagaaggtggagctgctgagatacgagagcgagaagctgcagcaggagaacagcatcctgagaaacgagatcaccaccctgaacgaggaggacagcatcagcaacctgaagctgggcaccctgaacggcagccaggaggagatgtggcagaagaccgagaccgtgaagcaggagaacgccgccgtgcagaagatggtggagaacctgaagaagcagatcagcgagctgaagatcaagaaccagcagctggacctggagaacaccgagctgagccagaagaacagccagaaccaggagaagctgcaggagctgaaccagagactgaccgagatgctgtgccagaaggagaaggagcccggcaacagcgccctggaggagagagagcaggagaagttcaacctgaaggaggagctggagagatgcaaggtgcagagcagcaccctggtgagcagcctggaggccgagctgagcgaggtgaagatccagacccacatcgtgcagcaggagaaccacctgctgaaggacgagctggagaagatgaagcagctgcacagatgccccgacctgagcgacttccagcagaagatcagcagcgtgctgagctacaacgagaagctgctgaaggagaaggaggccctgagcgaggagctgaacagctgcgtggacaagctggccaagagcagcctgctggagcacagaatcgccaccatgaagcaggagcagaagagctgggagcaccagagcgccagcctgaagagccagctggtggccagccaggagaaggtgcagaacctggaggacaccgtgcagaacgtgaacctgcagatgagcagaatgaagagcgacctgagagtgacccagcaggagaaggaggccctgaagcaggaggtgatgagcctgcacaagcagctgcagaacgccggcggcaagagctgggcccccgagatcgccacccaccccagcggcctgcacaaccagcagaagagactgagctgggacaagctggaccacctgatgaacgaggagcagcagctgctgtggcaggagaacgagagactgcagaccatggtgcagaacaccaaggccgagctgacccacagcagagagaaggtgagacagctggagagcaacctgctgcccaagcaccagaagcacctgaaccccagcggcaccatgaaccccaccgagcaggagaagctgagcctgaagagagagtgcgaccagttccagaaggagcagagccccgccaacagaaaggtgagccagatgaacagcctggagcaggagctggagaccatccacctggagaacgagggcctgaagaagaagcaggtgaagctggacgagcagctgatggagatgcagcacctgagaagcaccgccacccccagccccagcccccacgcctgggacctgcagctgctgcagcagcaggcctgccccatggtgcccagagagcagttcctgcagctgcagagacagctgctgcaggccgagagaatcaaccagcacctgcaggaggagctggagaacagaaccagcgagaccaacaccccccagggcaaccaggagcagctggtgaccgtgatggaggagagaatgatcgaggtggagcagaagctgaagctggtgaagagactgctgcaggagaaggtgaaccagctgaaggagcaggtgagcctgcccggccacctgtgcagccccaccagccacagcagcttcaacagcagcttcaccagcctgtactgccactag

SEQ ID NO: 9986 - DNA, 1176 bp, synthetic construct
  source 1..1176: mol_type = other DNA; note = Synthetic coding sequence
atggccgccctgaccaccctgttcaagtacatcgacgagaaccaggacagatacatcaagaagctggccaagtgggtggccatccagagcgtgagcgcctggcccgagaagagaggcgagatcagaagaatgatggaggtggccgccgccgacgtgaagcagctgggcggcagcgtggagctggtggacatcggcaagcagaaggagatccccgtgaacgtgagattctgcctggagggcatggaggagagcggcagcgagggcctggacgagctgatcttcgccagaaaggacaccttcttcaaggacgtggactacgtgtgcatcagcgacaactactggctgggcaagaagaagccctgcatcacctacggcctgagaggcatctgctacttcttcatcgaggtggagtgcagcaacaaggacctgcacagcggcgtgtacggcggcagcgtgcacgaggccatgaccgacctgatcctgctgatgggcagcctggtggacaagagaggcaacatcctgatccccggcatcaacgaggccgtggccgccgtgaccgaggaggagcacaagctgtacgacgacatcgacttcgacatcgaggagttcgccaaggacgtgggcgcccagatcctgctgcacagccacaagaaggacatcctgatgcacagatggagataccccagcctgagcctgcacggcatcgagggcgccttcagcggcagcggcgccaagaccgtgatccccagaaaggtggtgggcaagttcagcatcagactggtgcccaacatgacccccgaggtggtgggcgagcaggtgaccagctacctgaccaagaagttcgccgagctgagaagccccaacgagttcaaggtgtacatgggccacggcggcaagccctgggtgagcgacttcagccacccccactacctggccggcagaagagccatgaagaccgtgttcggcgtggagcccgacctgaccagagagggcggcagcatccccgtgaccctgaccttccaggaggccaccggcaagaacgtgatgctgctgcccgtgggcagcgccgacgacggcgcccacagccagaacgagaagctgaacagatacaactacatcgagggcaccaagatgctggccgcctacctgtacgaggtgagccagctgaaggactag

SEQ ID NO: 9987 - DNA, 5970 bp, synthetic construct
  source 1..5970: mol_type = other DNA; note = Synthetic coding sequence
atggacgaggtggagcaggaccagcacgaggccagactgaaggagctgttcgacagcttcgacaccaccggcaccggcagcctgggccaggaggagctgaccgacctgtgccacatgctgagcctggaggaggtggcccccgtgctgcagcagaccctgctgcaggacaacctgctgggcagagtgcacttcgaccagttcaaggaggccctgatcctgatcctgagcagaaccctgagcaacgaggagcacttccaggagcccgactgcagcctggaggcccagcccaagtacgtgagaggcggcaagagatacggcagaagaagcctgcccgagttccaggagagcgtggaggagttccccgaggtgaccgtgatcgagcccctggacgaggaggccagacccagccacatccccgccggcgactgcagcgagcactggaagacccagagaagcgaggagtacgaggccgagggccagctgagattctggaaccccgacgacctgaacgccagccagagcggcagcagccccccccaggactggatcgaggagaagctgcaggaggtgtgcgaggacctgggcatcaccagagacggccacctgaacagaaagaagctggtgagcatctgcgagcagtacggcctgcagaacgtggacggcgagatgctggaggaggtgttccacaacctggaccccgacggcaccatgagcgtggaggacttcttctacggcctgttcaagaacggcaagagcctgacccccagcgccagcaccccctacagacagctgaagagacacctgagcatgcagagcttcgacgagagcggcagaagaaccaccaccagcagcgccatgaccagcaccatcggcttcagagtgttcagctgcctggacgacggcatgggccacgccagcgtggagagaatcctggacacctggcaggaggagggcatcgagaacagccaggagatcctgaaggccctggacttcagcctggacggcaacatcaacctgaccgagctgaccctggccctggagaacgagctgctggtgaccaagaacagcatccaccaggccgccctggccagcttcaaggccgagatcagacacctgctggagagagtggaccaggtggtgagagagaaggagaagctgagaagcgacctggacaaggccgagaagctgaagagcctgatggccagcgaggtggacgaccaccacgccgccatcgagagaagaaacgagtacaacctgagaaagctggacgaggagtacaaggagagaatcgccgccctgaagaacgagctgagaaaggagagagagcagatcctgcagcaggccggcaagcagagactggagctggagcaggagatcgagaaggccaagaccgaggagaactacatcagagacagactggccctgagcctgaaggagaacagcagactggagaacgagctgctggagaacgccgagaagctggccgagtacgagaacctgaccaacaagctgcagagaaacctggagaacgtgctggccgagaagttcggcgacctggaccccagcagcgccgagttcttcctgcaggaggagagactgacccagatgagaaacgagtacgagagacagtgcagagtgctgcaggaccaggtggacgagctgcagagcgagctggaggagtacagagcccagggcagagtgctgagactgcccctgaagaacagccccagcgaggaggtggaggccaacagcggcggcatcgagcccgagcacggcctgggcagcgaggagtgcaaccccctgaacatgagcatcgaggccgagctggtgatcgagcagatgaaggagcagcaccacagagacatctgctgcctgagactggagctggaggacaaggtgagacactacgagaagcagctggacgagaccgtggtgagctgcaagaaggcccaggagaacatgaagcagagacacgagaacgagacccacaccctggagaagcagatcagcgacctgaagaacgagatcgccgagctgcagggccaggccgccgtgctgaaggaggcccaccacgaggccacctgcagacacgaggaggagaagaagcagctgcaggtgaagctggaggaggagaagacccacctgcaggagaagctgagactgcagcacgagatggagctgaaggccagactgacccaggcccaggccagcttcgagagagagagagagggcctgcagagcagcgcctggaccgaggagaaggtgagaggcctgacccaggagctggagcagttccaccaggagcagctgaccagcctggtggagaagcacaccctggagaaggaggagctgagaaaggagctgctggagaagcaccagagagagctgcaggagggcagagagaagatggagaccgagtgcaacagaagaaccagccagatcgaggcccagttccagagcgactgccagaaggtgaccgagagatgcgagagcgccctgcagagcctggagggcagatacagacaggagctgaaggacctgcaggagcagcagagagaggagaagagccagtgggagttcgagaaggacgagctgacccaggagtgcgccgaggcccaggagctgctgaaggagaccctgaagagagagaagaccaccagcctggtgctgacccaggagagagagatgctggagaagacctacaaggagcacctgaacagcatggtggtggagagacagcagctgctgcaggacctggaggacctgagaaacgtgagcgagacccagcagagcctgctgagcgaccagatcctggagctgaagagcagccacaagagagagctgagagagagagaggaggtgctgtgccaggccggcgccagcgagcagctggccagccagagactggagagactggagatggagcacgaccaggagagacaggagatgatgagcaagctgctggccatggagaacatccacaaggccacctgcgagaccgccgacagagagagagccgagatgagcaccgagatcagcagactgcagagcaagatcaaggagatgcagcaggccaccagccccctgagcatgctgcagagcggctgccaggtgatcggcgaggaggaggtggagggcgacggcgccctgagcctgctgcagcagggcgagcagctgctggaggagaacggcgacgtgctgctgagcctgcagagagcccacgagcaggccgtgaaggagaacgtgaagatggccaccgagatcagcagactgcagcagagactgcagaagctggagcccggcctggtgatgagcagctgcctggacgagcccgccaccgagttcttcggcaacaccgccgagcagaccgagcagttcctgcagcagaacagaaccaagcaggtggagggcgtgaccagaagacacgtgctgagcgacctggaggacgacgaggtgagagacctgggcagcaccggcaccagcagcgtgcagagacaggaggtgaagatcgaggagagcgaggccagcgtggagggcttcagcgagctggagaacagcgaggagaccagaaccgagagctgggagctgaagaaccagatcagccagctgcaggagcagctgatgatgctgtgcgccgactgcgacagagccagcgagaagaagcaggacctgctgttcgacgtgagcgtgctgaagaagaagctgaagatgctggagagaatccccgaggccagccccaagtacaagctgctgtacgaggacgtgagcagagagaacgactgcctgcaggaggagctgagaatgatggagaccagatacgacgaggccctggagaacaacaaggagctgaccgccgaggtgttcagactgcaggacgagctgaagaagatggaggaggtgaccgagaccttcctgagcctggagaagagctacgacgaggtgaagatcgagaacgagggcctgaacgtgctggtgctgagactgcagggcaagatcgagaagctgcaggagagcgtggtgcagagatgcgactgctgcctgtgggaggccagcctggagaacctggagatcgagcccgacggcaacatcctgcagctgaaccagaccctggaggagtgcgtgcccagagtgagaagcgtgcaccacgtgatcgaggagtgcaagcaggagaaccagtacctggagggcaacacccagctgctggagaaggtgaaggcccacgagatcgcctggctgcacggcaccatccagacccaccaggagagacccagagtgcagaaccaggtgatcctggaggagaacaccaccctgctgggcttccaggacaagcacttccagcaccaggccaccatcgccgagctggagctggagaagaccaagctgcaggagctgaccagaaagctgaaggagagagtgaccatcctggtgaagcagaaggacgtgctgagccacggcgagaaggaggaggagctgaaggccatgatgcacgacctgcagatcacctgcagcgagatgcagcagaaggtggagctgctgagatacgagagcgagaagctgcagcaggagaacagcatcctgagaaacgagatcaccaccctgaacgaggaggacagcatcagcaacctgaagctgggcaccctgaacggcagccaggaggagatgtggcagaagaccgagaccgtgaagcaggagaacgccgccgtgcagaagatggtggagaacctgaagaagcagatcagcgagctgaagatcaagaaccagcagctggacctggagaacaccgagctgagccagaagaacagccagaaccaggagaagctgcaggagctgaaccagagactgaccgagatgctgtgccagaaggagaaggagcccggcaacagcgccctggaggagagagagcaggagaagttcaacctgaaggaggagctggagagatgcaaggtgcagagcagcaccctggtgagcagcctggaggccgagctgagcgaggtgaagatccagacccacatcgtgcagcaggagaaccacctgctgaaggacgagctggagaagatgaagcagctgcacagatgccccgacctgagcgacttccagcagaagatcagcagcgtgctgagctacaacgagaagctgctgaaggagaaggaggccctgagcgaggagctgaacagctgcgtggacaagctggccaagagcagcctgctggagcacagaatcgccaccatgaagcaggagcagaagagctgggagcaccagagcgccagcctgaagagccagctggtggccagccaggagaaggtgcagaacctggaggacaccgtgcagaacgtgaacctgcagatgagcagaatgaagagcgacctgagagtgacccagcaggagaaggaggccctgaagcaggaggtgatgagcctgcacaagcagctgcagaacgccggcggcaagagctgggcccccgagatcgccacccaccccagcggcctgcacaaccagcagaagagactgagctgggacaagctggaccacctgatgaacgaggagcagcagctgctgtggcaggagaacgagagactgcagaccatggtgcagaacaccaaggccgagctgacccacagcagagagaaggtgagacagctggagagcaacctgctgcccaagcaccagaagcacctgaaccccagcggcaccatgaaccccaccgagcaggagaagctgagcctgaagagagagtgcgaccagttccagaaggagcagagccccgccaacagaaaggtgagccagatgaacagcctggagcaggagctggagaccatccacctggagaacgagggcctgaagaagaagcaggtgaagctggacgagcagctgatggagaacagcgtggtgggcagcagcagagagggctgcagcagcctgcccgagatcgtgtgcgaggacgccgcccccgaggtgcactgcgacgcctag

SEQ ID NO: 9988 - DNA, 915 bp, synthetic construct
  source 1..915: mol_type = other DNA; note = Synthetic coding sequence
atgggccagtgcgtgaccaagtgcaagaaccccagcagcaccctgggcagcaagaacggcgacagagagcccagcaacaagagccacagcagaagaggcgccggccacagagaggagcaggtgcccccctgcggcaagcccggcggcgacatcctggtgaacggcaccaagaaggccgaggccgccaccgaggcctgccagctgcccaccagcagcggcgacgccggcagagagagcaagagcaacgccgaggagagcagcctgcagagactggaggagctgttcagaagatacaaggacgagagagaggacgccatcctggaggagggcatggagagattctgcaacgacctgtgcgtggaccccaccgagttcagagtgctgctgctggcctggaagttccaggccgccaccatgtgcaagttcaccagaaaggagttcttcgacggctgcaaggccatcagcgccgacagcatcgacggcatctgcgccagattccccagcctgctgaccgaggccaagcaggaggacaagttcaaggacctgtacagattcaccttccagttcggcctggacagcgaggagggccagagaagcctgcacagagagatcgccatcgccctgtggaagctggtgttcacccagaacaacccccccgtgctggaccagtggctgaacttcctgaccgagaaccccagcggcatcaagggcatcagcagagacacctggaacatgttcctgaacttcacccaggtgatcggccccgacctgagcaactacagcgaggacgaggcctggcccagcctgttcgacaccttcgtggagtgggagatggagagaagaaagagagagggcgagggcagaggcgccctgagcagcggccccgagggcctgtgccccgaggagcagacctag

SEQ ID NO: 9989 - DNA, 1914 bp, synthetic construct
  source 1..1914: mol_type = other DNA; note = Synthetic coding sequence
atggccgccatggccgtgggcggcgccggcggcagcagagtgagcagcggcagagacctgaactgcgtgcccgagatcgccgacaccctgggcgccgtggccaagcagggcttcgacttcctgtgcatgcccgtgttccaccccagattcaagagagagttcatccaggagcccgccaagaacagacccggcccccagaccagaagcgacctgctgctgagcggcagagactggaacaccctgatcgtgggcaagctgagcccctggatcagacccgacagcaaggtggagaagatcagaagaaacagcgaggccgccatgctgcaggagctgaacttcggcgcctacctgggcctgcccgccttcctgctgcccctgaaccaggaggacaacaccaacctggccagagtgctgaccaaccacatccacaccggccaccacagcagcatgttctggatgagagtgcccctggtggcccccgaggacctgagagacgacatcatcgagaacgcccccaccacccacaccgaggagtacagcggcgaggagaagacctggatgtggtggcacaacttcagaaccctgtgcgactacagcaagagaatcgccgtggccctggagatcggcgccgacctgcccagcaaccacgtgatcgacagatggctgggcgagcccatcaaggccgccatcctgcccaccagcatcttcctgaccaacaagaagggcttccccgtgctgagcaagatgcaccagagactgatcttcagactgctgaagctggaggtgcagttcatcatcaccggcaccaaccaccacagcgagaaggagttctgcagctacctgcagtacctggagtacctgagccagaacagacccccccccaacgcctacgagctgttcgccaagggctacgaggactacctgcagagccccctgcagcccctgatggacaacctggagagccagacctacgaggtgttcgagaaggaccccatcaagtacagccagtaccagcaggccatctacaagtgcctgctggacagagtgcccgaggaggagaaggacaccaacgtgcaggtgctgatggtgctgggcgccggcagaggccccctggtgaacgccagcctgagagccgccaagcaggccgacagaagaatcaagctgtacgccgtggagaagaaccccaacgccgtggtgaccctggagaactggcagttcgaggagtggggcagccaggtgaccgtggtgagcagcgacatgagagagtgggtggcccccgagaaggccgacatcatcgtgagcgagctgctgggcagcttcgccgacaacgagctgagccccgagtgcctggacggcgcccagcacttcctgaaggacgacggcgtgagcatccccggcgagtacaccagcttcctggcccccatcagcagcagcaagctgtacaacgaggtgagagcctgcagagagaaggacagagaccccgaggcccagttcgagatgccctacgtggtgagactgcacaacttccaccagctgagcgccccccagccctgcttcaccttcagccaccccaacagagaccccatgatcgacaacaacagatactgcaccctggagttccccgtggaggtgaacaccgtgctgcacggcttcgccggctacttcgagaccgtgctgtaccaggacatcaccctgagcatcagacccgagacccacagccccggcatgttcagctggttccccatcctgttccccatcaagcagcccatcaccgtgagagagggccagaccatctgcgtgagattctggagatgcagcaacagcaagaaggtgtggtacgagtgggccgtgaccgcccccgtgtgcagcgccatccacaaccccaccggcagaagctacaccatcggcctgtag

SEQ ID NO: 9990 - DNA, 1041 bp, synthetic construct
  source 1..1041: mol_type = other DNA; note = Synthetic coding sequence
atggcccccggcagcgtgaccagcgacatcagccccagcagcaccagcaccgccggcagcagcagaagccccgagagcgagaagcccggccccagccacggcggcgtgccccccggcggccccagccacagcagcctgcccgtgggcagaagacacccccccgtgctgagaatggtgctggaggccctgcaggccggcgagcagagaagaggcaccagcgtggccgccatcaagctgtacatcctgcacaagtaccccaccgtggacgtgctgagattcaagtacctgctgaagcaggccctggccaccggcatgagaagaggcctgctggccagacccctgaacagcaaggccagaggcgccaccggcagcttcaagctggtgcccaagcacaagaagaagatccagcccagaaagatggcccccgccaccgcccccagaagagccggcgaggccaagggcaagggccccaagaagcccagcgaggccaaggaggacccccccaacgtgggcaaggtgaagaaggccgccaagagacccgccaaggtgcagaagcccccccccaagcccggcgccgccaccgagaaggccagaaagcagggcggcgccgccaaggacaccagagcccagagcggcgaggccagaaaggtgccccccaagcccgacaaggccatgagagcccccagcagcgccggcggcctgagcagaaaggccaaggccaagggcagcagaagcagccagggcgacgccgaggcctacagaaagaccaaggccgagagcaagagcagcaagcccaccgccagcaaggtgaagaacggcgccgccagccccaccaagaagaaggtggtggccaaggccaaggcccccaaggccggccagggccccaacaccaaggccgccgcccccgccaagggcagcggcagcaaggtggtgcccgcccacctgagcagaaagaccgaggcccccaagggccccagaaaggccggcctgcccatcaaggccagcagcagcaaggtgagcagccagagagccgaggcctag

SEQ ID NO: 9991 - DNA, 1869 bp, synthetic construct
  source 1..1869: mol_type = other DNA; note = Synthetic coding sequence
atggccatggcccccagccccagcctggtgcaggtgtacaccagccccgccgccgtggccgtgtgggagtggcaggacggcctgggcacctggcacccctacagcgccaccgtgtgcagcttcatcgagcagcagttcgtgcagcagaagggccagagattcggcctgggcagcctggcccacagcatccccctgggccaggccgaccccagcctggccccctacatcatcgacctgcccagctggacccagttcagacaggacaccggcaccatgagagccgtgagaagacacctgttcccccagcacagcgcccccggcagaggcgtggtgtgggagtggctgagcgacgacggcagctggaccgcctacgaggccagcgtgtgcgactacctggagcagcaggtggccagaggcaaccagctggtggacctggcccccctgggctacaactacaccgtgaactacaccacccacacccagaccaacaagaccagcagcttctgcagaagcgtgagaagacaggccggccccccctaccccgtgaccaccatcatcgccccccccggccacaccggcgtggcctgcagctgccaccagtgcctgagcggcagcagaaccggccccgtgagcggcagatacagacacagcatgaccaacctgcccgcctaccccgtgccccagcaccccccccacagaaccgccagcgtgttcggcacccaccaggccttcgccccctacaacaagcccagcctgagcggcgccagaagcgcccccagactgaacaccaccaacgcctggggcgccgccccccccagcctgggcagccagcccctgtacagaagcagcctgagccacctgggcccccagcacctgccccccggcagcagcaccagcggcgccgtgagcgccagcctgcccagcggccccagcagcagccccggcagcgtgcccgccaccgtgcccatgcagatgcccaagcccagcagagtgcagcaggccctggccggcatgaccagcgtgctgatgagcgccatcggcctgcccgtgtgcctgagcagagccccccagcccaccagcccccccgccagcagactggccagcaagagccacggcagcgtgaagagactgagaaagatgagcgtgaagggcgccacccccaagcccgagcccgagcccgagcaggtgatcaagaactacaccgaggagctgaaggtgccccccgacgaggactgcatcatctgcatggagaagctgagcaccgccagcggctacagcgacgtgaccgacagcaaggccatcggcagcctggccgtgggccacctgaccaagtgcagccacgccttccacctgctgtgcctgctggccatgtactgcaacggcaacaaggacggcagcctgcagtgccccagctgcaagaccatctacggcgagaagaccggcacccagccccagggcaagatggaggtgctgagattccagatgagcctgcccggccacgaggactgcggcaccatcctgatcgtgtacagcatcccccacggcatccagggccccgagcaccccaaccccggcaagcccttcaccgccagaggcttccccagacagtgctacctgcccgacaacgcccagggcagaaaggtgctggagctgctgaaggtggcctggaagagaagactgatcttcaccgtgggcaccagcagcaccaccggcgagaccgacaccgtggtgtggaacgagatccaccacaagaccgagatggacagaaacatcaccggccacggctaccccgaccccaactacctgcagaacgtgctggccgagctggccgcccagggcgtgaccgaggactgcctggagcagcagtag

SEQ ID NO: 9992 - DNA, 786 bp, synthetic construct
  source 1..786: mol_type = other DNA; note = Synthetic coding sequence
atggccgccaccgccagagaggacggcgccagcggccaggagagaggccagagaggctgcgagcactacgacagaggctgcctgctgaaggccccctgctgcgacaagctgtacacctgcagactgtgccacgacaacaacgaggaccaccagctggacagattcaaggtgaaggaggtgcagtgcatcaactgcgagaagatccagcacgcccagcagacctgcgaggagtgcagcaccctgttcggcgagtactactgcgacatctgccacctgttcgacaaggacaagaagcagtaccactgcgagaactgcggcatctgcagaatcggccccaaggaggacttcttccactgcctgaagtgcaacctgtgcctggccatgaacctgcagggcagacacaagtgcatcgagaacgtgagcagacagaactgccccatctgcctggaggacatccacaccagcagagtggtggcccacgtgctgccctgcggccacctgctgcacagaacctgctacgaggagatgctgaaggagggctacagatgccccctgtgcatgcacagcgccctggacatgaccagatactggagacagctggacgacgaggtggcccagacccccatgcccagcgagtaccagaacatgaccgtggacatcctgtgcaacgactgcaacggcagaagcaccgtgcagttccacatcctgggcatgaagtgcaagatctgcgagagctacaacaccgcccaggccggcggcagaagaatcagcctggaccagcagtag

SEQ ID NO: 9993 - DNA, 1983 bp, synthetic construct
  source 1..1983: mol_type = other DNA; note = Synthetic coding sequence
ctgagcctgcccagcgtgacctacctgctgctggaggtgatccccgacagcatgagaaagcaggaggtgagaaccggcagagaggccggccagggccacggcaccggcagccccgccgagcaggtgaaggccctgatggacctgctggccggcaagggcagccagggcagccaggccccccaggccctggacagaacccccgacgcccccctgggcccctgcagcaacgacagcagaatccagagacacagaaaggccctgctgagcaaggtggaggccaccagaggcggcggccaccccgccagaaccgtggccctggacagactgttcctgcccctgagcagagtgagcgtgccccccagagtgagcatcaccatcggcgtggccggcatgggcaagaccaccctggtgagacacttcgtgagactgtgggcccacggccaggtgggcaaggacttcagcctggtgctgcccctgaccttcagagacctgaacacccacgagaagctgtgcgccgacagactgatctgcagcgtgttcccccacgtgggcgagcccagcctggccgtggccgtgcccgccagagccctgctgatcctggacggcctggacgagtgcagaacccccctggacttcagcaacaccgtggcctgcaccgaccccaagaaggagatccccgtggaccacctgatcaccaacatcatcagaggcaacctgttccccgaggtgagcatctggatcaccagcagacccagcgccagcggccagatccccggcggcctggtggacagaatgaccgagatcagaggcttcaacgaggaggagatcaaggtgtgcctggagcagatgttccccgaggaccaggccctgctgggctggatgctgagccaggtgcaggccgacagagccctgtacctgatgtgcaccgtgcccgccttctgcagactgaccggcatggccctgggccacctgtggagaagcagaaccggcccccaggacgccgagctgtggccccccagaaccctgtgcgagctgtacagctggtacttcagaatggccctgagcggcgagggccaggagaagggcaaggccagccccagaatcgagcaggtggcccacggcggcagaaagatggtgggcaccctgggcagactggccttccacggcctgctgaagaagaagtacgtgttctacgagcaggacatgaaggccttcggcgtggacctggccctgctgcagggcgccccctgcagctgcttcctgcagagagaggagaccctggccagcagcgtggcctactgcttcacccacctgagcctgcaggagttcgtggccgccgcctactactacggcgccagcagaagagccatcttcgacctgttcaccgagagcggcgtgagctggcccagactgggcttcctgacccacttcagaagcgccgcccagagagccatgcaggccgaggacggcagactggacgtgttcctgagattcctgagcggcctgctgagccccagagtgaacgccctgctggccggcagcctgctggcccagggcgagcaccaggcctacagaacccaggtggccgagctgctgcagggctgcctgagacccgacgccgccgtgtgcgccagagccatcaacgtgctgcactgcctgcacgagctgcagcacaccgagctggccagaagcgtggaggaggccatggagagcggcgccctggccagactgaccggccccgcccacagagccgccctggcctacctgctgcaggtgagcgacgcctgcgcccaggaggccaacctgagcctgagcctgagccagggcgtgctgcagagcctgctgccccagctgctgtactgcagaaagctgagatggatccccggccagggcgccggcgccggcgagggcgccgaggagagagccgaggccgtgcccagccccccccccagcttcagcgtgagcctgctgggcctgccctag

SEQ ID NO: 9994 - DNA, 1152 bp, synthetic construct
  source 1..1152: mol_type = other DNA; note = Synthetic coding sequence
atgctgagcagaaagaagaccaagaacgaggtgagcaagcccgccgaggtgcagggcaagtacgtgaagaaggagaccagccccctgctgagaaacctgatgcccagcttcatcagacacggccccaccatccccagaagaaccgacatctgcctgcccgacagcagccccaacgccttcagcaccagcggcgacgtggtgagcagaaaccagagcttcctgagaacccccatccagagaaccccccacgagatcatgagaagagagagcaacagactgagcgcccccagctacctggccagaagcctggccgacgtgcccagagagtacggcagcagccagagcttcgtgaccgaggtgagcttcgccgtggagaacggcgacagcggcagcagatactactacagcgacaacttcttcgacggccagagaaagagacccctgggcgacagagcccacgaggactacagatactacgagtacaaccacgacctgttccagagaatgccccagaaccagggcagacacgccagcggcatcggcagagtggccgccaccagcctgggcaacctgaccaaccacggcagcgaggacctgcccctgccccccggctggagcgtggactggaccatgagaggcagaaagtactacatcgaccacaacaccaacaccacccactggagccaccccctggagagagagggcctgccccccggctgggagagagtggagagcagcgagttcggcacctactacgtggaccacaccaacaagaaggcccagtacagacacccctgcgcccccagcgtgcccagatacgaccagcccccccccgtgacctaccagccccagcagaccgagagaaaccagagcctgctggtgcccgccaacccctaccacaccgccgagatccccgactggctgcaggtgtacgccagagcccccgtgaagtacgaccacatcctgaagtgggagctgttccagctggccgacctggacacctaccagggcatgctgaagctgctgttcatgaaggagctggagcagatcgtgaagatgtacgaggcctacagacaggccctgctgaccgagctggagaacagaaagcagagacagcagtggtacgcccagcagcacggcaagaacttctag

SEQ ID NO: 9995 - DNA, 2376 bp, synthetic construct
  source 1..2376: mol_type = other DNA; note = Synthetic coding sequence
atgagcaaccagcaggagaagtacgaggcccagaacatcgtgaacagcaccgaggagagcgacgacgccttcgacaccgtgaccatccccgtgcccagcgaggagccccaggagagcgaccagaccgaggagcacgagagcggcatcgagcagttcagcgagagccacgccatccacgtggaggagcagagcgaccagagcttcagcagcctggagcccgacaacgagcagctgatggaggaggtgatcagccccagacaggtgagctacaccccccagcaccacgagaagcagtacgccatgcagagacccaacgacgacagcctggccttcctggacaagatcaagagcgtgaaggagagcctgcaggagagcgtggaggacagcctggccaccgtgaaggtggtgctgatccccgtgggccaggagatcgtgatccccttcaaggtggacaccatcctgaagtacctgaaggaccacttcagccacctgctgggcatcccccacagcgtgctgcagatcagatacagcggcaagatcctgaagaacaacgagaccctggtgcagcacggcgtgaagccccaggagatcgtgcaggtggagatcttcagcaccaaccccgacctgtaccccgtgagaagaatcgacggcctgaccgacgtgagccagatcatcaccgtgaccgtgcagaccggcctggaccagtaccagcaggtgcccgtggagatcgtgaagagcgacttccacaagcccttcctgggcggcttcagacacaaggtgaccggcgtggagtaccacaacgccggcacccagaccgtgcccaagagaatccccgagagactgagcatcttctgcagagacacccagaccgtgttccagaagaagaacctgcagcagaccaccaacaccaccagcacccagatgaccaacatcggcgtgtacgtgagcaacatgaccgacaagctggtgacccccggcaagtacttcagcgccgccgagtaccacgcccagagactgaaggccgtgatcgtgatccagacctactacagacagtggcacgccaagatcttcgtggagaacctgagaagacagaagagcctgagactggagtgggagacccagcaggagctgagaaagatcagagagaaggaggagtggatcaagctggactaccacagaagacacaaccccaagaccaacgaggacttcgagttcctgtacaacgccctggagttctggagacaggaggagctgaccagaatcaaccagagcttcaccggcgccgagagaaaggccgccctgtgcgagctgctggagaaggagacccagatcatcgccagcatcggcagacacagatacatcgcctacatggccaaccaggaggccgccatccaggccttcctggacaagtgcagcgcccccaagatctggagaacccccaacggcaagaccatcgagatggacacccagttcaccatcagagccagagagctgcagaacatctacaagtgcatcatgctgaagaacatcagccaggacgagagactggacgtgctgctgaccctgaagcacaccgtgaaggagcacgagtgcaagctgacccaggagatcctggagctgatcgacagagaggtggacctgatgatgagaggcgtgaagcaccacaacctggagggcctgagaaagagaatcgccaccctgttcttccactacatcaagacccccctgttcaaccccgaggtggccaagtacctgaaggtgccccaggaccccctgaagttctacaagaagatctacttctgccacagctgccagctgtacctgcccagcaccgagttcagcgtgagcagcaccagcagaagaatctacagatgcagaaactgcatcaacctgcagaacgaggcccagaagagagagagcttcctgaagtacaagtgcctgctgcagcagctgtactacaccgaggccgactacgaggacgacagcaagatcgccttcctgatgcagctgcaggacatccagtacctgaccgagaacatctgggccagccagagcgtgctgagcgcctgcgacaacctgagcgacctggtgatggtgagatggaacaagagcctggagtggagcccctggaactgcatcctgctgaccaaggacgaggccgccgcccacctgaagctgaccagcatcgaggagggctacgagagaagcttcatccacaagatcaagcacaagcacatcctggccaagaactacttcagccaggtgcccgtgctggccagcttcatcctggacgacggcgagatcgacgagatcagatggaagtaccacagcgacaccacccccaagatcatcgagagccagagacccccccactag

SEQ ID NO: 9996 - DNA, 1767 bp, synthetic construct
  source 1..1767: mol_type = other DNA; note = Synthetic coding sequence
atgagcagctgcgtgagcagccagcccagcagcaacagagccgccccccaggacgagctgggcggcagaggcagcagcagcagcgagagccagaagccctgcgaggccctgagaggcctgagcagcctgagcatccacctgggcatggagagcttcatcgtggtgaccgagtgcgagcccggctgcgccgtggacctgggcctggccagagacagacccctggaggccgacggccaggaggtgcccctggacaccagcggcagccaggccagaccccacctgagcggcagaaagctgagcctgcaggagagaagccagggcggcctggccgccggcggcagcctggacatgaacggcagatgcatctgccccagcctgccctacagccccgtgagcagcccccagagcagccccagactgcccagaagacccaccgtggagagccaccacgtgagcatcaccggcatgcaggactgcgtgcagctgaaccagtacaccctgaaggacgagatcggcaagggcagctacggcgtggtgaagctggcctacaacgagaacgacaacacctactacgccatgaaggtgctgagcaagaagaagctgatcagacaggccggcttccccagaagacccccccccagaggcaccagacccgcccccggcggctgcatccagcccagaggccccatcgagcaggtgtaccaggagatcgccatcctgaagaagctggaccaccccaacgtggtgaagctggtggaggtgctggacgaccccaacgaggaccacctgtacatggtgttcgagctggtgaaccagggccccgtgatggaggtgcccaccctgaagcccctgagcgaggaccaggccagattctacttccaggacctgatcaagggcatcgagtacctgcactaccagaagatcatccacagagacatcaagcccagcaacctgctggtgggcgaggacggccacatcaagatcgccgacttcggcgtgagcaacgagttcaagggcagcgacgccctgctgagcaacaccgtgggcacccccgccttcatggcccccgagagcctgagcgagaccagaaagatcttcagcggcaaggccctggacgtgtgggccatgggcgtgaccctgtactgcttcgtgttcggccagtgccccttcatggacgagagaatcatgtgcctgcacagcaagatcaagagccaggccctggagttccccgaccagcccgacatcgccgaggacctgaaggacctgatcaccagaatgctggacaagaaccccgagagcagaatcgtggtgcccgagatcaagctgcacccctgggtgaccagacacggcgccgagcccctgcccagcgaggacgagaactgcaccctggtggaggtgaccgaggaggaggtggagaacagcgtgaagcacatccccagcctggccaccgtgatcctggtgaagaccatgatcagaaagagaagcttcggcaaccccttcgagggcagcagaagagaggagagaagcctgagcgcccccggcaacctgctgaccaagaagcccaccagagagtgcgagagcctgagcgagctgaaggaggccagacagagaagacagccccccggccacagacccgcccccagaggcggcggcggcagcgccctggtgagaggcagcccctgcgtggagagctgctgggcccccgcccccggcagccccgccagaatgcaccccctgagacccgaggaggccatggagcccgagtag

SEQ ID NO: 9997 - DNA, 2052 bp, synthetic construct
  source 1..2052: mol_type = other DNA; note = Synthetic coding sequence
atggccctgagcaagagagagctggacgagctgaagccctggatcgagaagaccgtgaagagagtgctgggcttcagcgagcccaccgtggtgaccgccgccctgaactgcgtgggcaagggcatggacaagaagaaggccgccgaccacctgaagcccttcctggacgacagcaccctgagattcgtggacaagctgttcgaggccgtggaggagggcagaagcagcagacacagcaagagcagcagcgacagaagcagaaagagagagctgaaggaggtgttcggcgacgacagcgagatcagcaaggagagcagcggcgtgaagaagagaagaatccccagattcgaggaggtggaggaggagcccgaggtgatccccggcccccccagcgagagccccggcatgctgaccaagctgcagatcaagcagatgatggaggccgccaccagacagatcgaggagagaaagaagcagctgagcttcatcagcccccccaccccccagcccaagacccccagcagcagccagcccgagagactgcccatcggcaacaccatccagcccagccaggccgccaccttcatgaacgacgccatcgagaaggccagaaaggccgccgagctgcaggccagaatccaggcccagctggccctgaagcccggcctgatcggcaacgccaacatggtgggcctggccaacctgcacgccatgggcatcgccccccccaaggtggagctgaaggaccagaccaagcccacccccctgatcctggacgagcagggcagaaccgtggacgccaccggcaaggagatcgagctgacccacagaatgcccaccctgaaggccaacatcagagccgtgaagagagagcagttcaagcagcagctgaaggagaagcccagcgaggacatggagagcaacaccttcttcgaccccagagtgagcatcgcccccagccagagacagagaagaaccttcaagttccacgacaagggcaagttcgagaagatcgcccagagactgagaaccaaggcccagctggagaagctgcaggccgagatcagccaggccgccagaaagaccggcatccacaccagcaccagactggccctgatcgcccccaagaaggagctgaaggagggcgacatccccgagatcgagtggtgggacagctacatcatccccaacggcttcgacctgaccgaggagaaccccaagagagaggactacttcggcatcaccaacctggtggagcaccccgcccagctgaacccccccgtggacaacgacacccccgtgaccctgggcgtgtacctgaccaagaaggagcagaagaagctgagaagacagaccagaagagaggcccagaaggagctgcaggagaaggtgagactgggcctgatgcccccccccgagcccaaggtgagaatcagcaacctgatgagagtgctgggcaccgaggccgtgcaggaccccaccaaggtggaggcccacgtgagagcccagatggccaagagacagaaggcccacgaggaggccaacgccgccagaaagctgaccgccgagcagagaaaggtgaagaagatcaagaagctgaaggaggacatcagccagggcgtgcacatcagcgtgtacagagtgagaaacctgagcaaccccgccaagaagttcaagatcgaggccaacgccggccagctgtacctgaccggcgtggtggtgctgcacaaggacgtgaacgtggtggtggtggagggcggccccaaggcccagaagaagttcaagagactgatgctgcacagaatcaagtgggacgagcagaccagcaacaccaagggcgacgacgacgaggagagcgacgaggaggccgtgaagaagaccaacaagtgcgtgctggtgtgggagggcaccgccaaggacagaagcttcggcgagatgaagttcaagcagtgccccaccgagaacatggccagagagcacttcaagaagcacggcgccgagcactactgggacctggccctgagcgagagcgtgctggagagcaccgactag

SEQ ID NO: 9998 - DNA, 1938 bp, synthetic construct
  source 1..1938: mol_type = other DNA; note = Synthetic coding sequence
atgagcgacaagagcgacctgaaggccgagctggagagaaagaagcagagactggcccagatcagagaggagaagaagagaaaggaggaggagagaaagaagaaggaggccgacatgcagcagaagaaggagcccgtgcaggacgacagcgacctggacagaaagagaagagagaccgaggccctgctgcagagcatcggcatcagccccgagccccccctggtgcagcccctgcacttcctgacctgggacacctgctacttccactacctggtgcccacccccatgagccccagcagcaagagcgtgagcacccccagcgaggccggcagccaggacagcggcgacctgggccccctgaccagaaccctgcagtgggacaccgaccccagcgtgctgcagctgcagagcgacagcgagctgggcagaagactgcacaagctgggcgtgagcaaggtgacccaggtggacttcctgcccagagaggtggtgagctacagcaaggagacccagacccccctggccacccaccagagcgaggaggacgaggaggacgaggagatggtggagagcaaggtgggccaggacagcgagctggagaaccaggacaagaagcaggaggtgaaggaggccccccccagagagctgaccgaggaggagaagcagcagatcctgcacagcgaggagttcctgatcttcttcgacagaaccatcagagtgatcgagagagccctggccgaggacagcgacatcttcttcgactacagcggcagagagctggaggagaaggacggcgacgtgcaggccggcgccaacctgagcttcaacagacagttctacgacgagcactggagcaagcacagagtggtgacctgcatggactggagcctgcagtaccccgagctgatggtggccagctacaacaacaacgaggacgccccccacgagcccgacggcgtggccctggtgtggaacatgaagttcaagaagaccacccccgagtacgtgttccactgccagagcagcgtgatgagcgtgtgcttcgccagattccaccccaacctggtggtgggcggcacctacagcggccagatcgtgctgtgggacaacagaagccacagaagaacccccgtgcagagaacccccctgagcgccgccgcccacacccaccccgtgtactgcgtgaacgtggtgggcacccagaacgcccacaacctgatcaccgtgagcaccgacggcaagatgtgcagctggagcctggacatgctgagcaccccccaggagagcatggagctggtgtacaacaagagcaagcccgtggccgtgaccggcatggccttccccaccggcgacgtgaacaacttcgtggtgggcagcgaggagggcaccgtgtacaccgcctgcagacacggcagcaaggccggcatcggcgaggtgttcgagggccaccagggccccgtgaccggcatcaactgccacatggccgtgggccccatcgacttcagccacctgttcgtgaccagcagcttcgactggaccgtgaagctgtggaccaccaagcacaacaagcccctgtacagcttcgaggacaacgccgactacgtgtacgacgtgatgtggagccccgtgcaccccgccctgttcgcctgcgtggacggcatgggcagactggacctgtggaacctgaacaacgacaccgaggtgcccaccgccagcgtggccatcgagggcgccagcgccctgaacagagtgagatgggcccaggccggcaaggaggtggccgtgggcgacagcgagggcagaatctgggtgtacgacgtgggcgagctggccgtgccccacaacgacgagtggaccagattcgccagaaccctggtggagatcagagccaacagagccgacagcgaggaggagggcaccgtggagctgagcgcctag

SEQ ID NO: 9999 - DNA, 7806 bp, synthetic construct
  source 1..7806: mol_type = other DNA; note = Synthetic coding sequence
atgaagagaaaggtggtgaacacccacaagctgagactgagccccaacgaggaggccttcatcctgaaggaggactacgagagaagaagaaagctgagactgctgcaggtgagagagcaggagagagacatcgccctgcagatcagagaggacatcaagcagagaagaaaccagcagttcaccagactggccgaggagctgagagccgagtgggaggagagccagacccagaagatccagaacctggagaagctgtacctggccagcctgagaagcatgggcgagggccacagacaggccaaggagaacgagcccgacctggacgccctggcccagagagccgccgagagaaagagaaaggccgacctgagacacaaggaggccctgaaggtgcagaagaaccagaaggagatcctgctgaagcagaagacctggcacatcaaggccagaaaggaggccctgctggtggagaaggagagaagcgccaagatcaccagcctgcccccccccccccccaccctgttcgagaacatcgaggtgaagagaatcagcgccgtgaagaccaacagcagcacctaccaccacctgcacaccttcgtgaacagagagaccgacaccaagagacccgacgccagactggccgccgaggaggaggccaagagactggaggagctgcagaagcaggccgcccaggagagaatggagagattcgagaaggcccacgtgagaggcttccaggccatgaagaagatccacctggcccagaaccaggagaagctgatgaaggagctgaagcagctgcagcaggaggacctggccagaagaagacagaccgtggcccagatgcccccccagctggtggagctgccctacaagagaagcgagatgaaggaggactggcagagagagctggagttcgccttcgaggacatgtacaacgccgacagaaaggtgaagggcaacctgatcctgcacctggagcccgagcccctgcccaccgtgaccaaccagatccaggacgaggagctggacctgagcatggagcaggagaacctgggcgccgccgaggacctgcccgtgaccgaggccgagatctgcagcagcgagaccgacgtgcccctggtgatgaagacccagcagatccccagcaaggtgctgttcaagaagctgctgaacaagatcagaagccagaagagcctgtggaccatcaagagcatgagcgaggacgagagcgagatgatcaccaccgtgagcgagatcgagagcaaggcccccaccgtggagagcggcaccatcgccagcaaggagagaaccctgagcagcggccaggagcaggtggtggagagcgacaccctgaccatcgagagcggccccctggccagcgaggacaagcccctgagctgcggcaccaacagcggcaaggagcaggagatcaacgagaccctgcccatcaccaccgtggcccagagcagcgtgctgctgcacccccaggaggccgccgccagaatcagaatgagcgccagacagaagcagatcatggagatcgaggagcagaagcagaagcagctggagctgctggagcagatcgagcagcagaagctgagactggagaccgactgcttcagagcccagctggaggaggagaagagaaagaagacccagcccaccggcgtgggcatcgcccccgccagctgccccgtgatcagcgacgaggacagccacagacagatgatcagaaactaccagcaccagctgctgcagcagaacagactgcacagacagagcgtggagaccgccagaaagcagctgctggagtaccagaccatgctgaagggcagatgccccagcgtgagcgcccccagcctgatcaccgacagcgtgatcagcgtgcccagctggaagagcgagagacccaccgccatcagcgagcactgggaccagggccagagactgaagctgagccccaacaagtaccagcccatccagcccatccagaccagcaagctggagcaggaccacttccaggtggccagacagaaccacttcccccagagacaggtggagaccaccgagaccctgagagccagcgacatcctgaccaaccaggccctggagagccaggagcacctgagacagttcagccagaccgagacccagcagagagactacaagctggtgcccaaggacagcgagaccctgagcagagccctgagccacgacagacagctgatcagccaggacgccagaaagatcagcgagaccttcggcgccaccaccttccagagcctggagagccagcagctgttcagcgagaacagcgagaacatcagctaccacctgaccgagcccagcagcttcgtgcccctggtgccccagcacagcttcagcagcctgcccgtgaaggtggagagcggcaagatccaggagcccttcagcgccatgagcaagagcaccgtgagcaccagccacagcatcatcagccagatgcacgacagacccctgctgcccagcgagaacatcaccgcccagcagggcaacatgaaggccctgcaggagcagctggacctgcagaagaaggtgctgcaggccacccaggaggcccaggagcagctgctgctgtgcaagcagaaggaggtggagcagcagaccggcctgagcgtgttcctgcccctggtgacccccgacagcagcgccctgctgcccagcgccaaggccgacctgggcagaatccaggagagcagccccaccaagaacaacatcgccgtgagcagcgaccaccacgtgatcagccagctgcaggacaagagactgagcctgagccagcccatcctgagccagcagaacaacttcaagttcctgcaggagcagctgaacatccagaaggacagcctgcaggccagaagagaggcccaggaggtgctgtacgtgcacaagcagagcgagctggacagaagagtgtgcagcgagcaggccgagcccagcttccccttccaggtggcccagcacaccttcaccagcctgcccagcgccgacaccaagagcggcaagatccaggagcagcacagcagcaagagcgagaagggcctggtgagctgccagagcgacatccccatcagccaggacggcagcctgagcttcctgcagcagttcctgcccctgcacgacagcctgaagctgctgcaggagcagctgaccaagcagagagacaccctgcaggccagacacgaggcccaggtggagctgctgctgcacagacagagagacctgggcgacagcaagagcggcctggtgagcagcagcagcagccccgtggtggtgcagcacagcgtggccagccaggccagcgccaaggccgagcccagaagaatccaggagctgtacctgagcgagaaggagaacgtgggccccagctgccacctgatcatccccaccttccaggacaagagcctgagcttcccccagcacagcctggcccagcaggagaacctgaccatcctgcaggagcagagccagatccagagagtgatcctgggcgccaaggagggcacccaggagttcgtgcacaccgagagcgagctggagaagagaatcagcagcgagcagaccggcaccagcagcagcctgagccaggtggacgagagcgagagattccaggagtgcatcagcatcaagagcgacagcaccatccccctgagccaccccaagatccccagatgccaggagagactgctgagagtgagccagcacatgctgcccctgcaggacaacctggaggagcaccaggcctggctggacaccgagaaggaggccttccacttcagccagaagacccaggagaacaccagcagcgagcagaccggcagcagcagcttcatcccccagctggtgcagctgagcttcaccagcctggccagcgccgagagcggcaccatcctggagcccctgttcaccgagagcgagagcaagatcttcagcagccacctgcagatcccccagctgcaggacagactgctgagaatcagccagctgatccagccccagcaggacaacctgaaggccctgcaggagcagctggccacccagagagaggccatcatcctggccagacaggaggccagagaggagctgctgctgcaccagagcgagtgggagggcagaatcagccccgagcaggtggacaccagcagcctgcccctggtgccccagcacagcttcgccagcctgcccctgaacgagagcgagagaaaccaggagccctgcagcatcaacagcgacaacatcgtgagcagcggccacagcgagatccccaccctgcccgacggcctgctgggcctgagccacctggtgctgccccagcaggacaacctgatcgccctggaggagcacctgcacgcccagaccgacttcctgcccagcatcgagaagacccagaaggagctggtgctgagcaagccctgcaagttcgaggagaaggtgagcagcgagcacttcatccagagccaccacggcgacctgcaggccctgcagcagcagctggacacccagaagaaggccatcagaagcatccaggaggtgcaggaggagctgctgctgcagagactgagcgagctggagaagagagtgagcagcgagcaggtgtgcagcagcagcttcgtgagccaggtgcccgtggccgacagcgagagaacccagaagagcttccccaccaagagcaacgacaccctgcccagcagccacagagagatccccagactgcaggacagactgctgagcctgagcaagcccatcctgccccagcaggacaacatgaccgcccagctggacgcccagagagaggtgatgtacagctacgagaagccccaggaggagctgagcctgaacaagcagagaaagctgaacaagagcgagagcgccgagcacaccatccccagcctgttcctgcccaaggagaccgagcacagcttcatccccctgcccttcgccgaggccaagcccaagagcacctgcgagctgtacagcagccagaacgagcacgccgccccccccagcaaccccgtgatccccggcttccaggacagactgctgagcttcagccagagcgtgctgacccagcaggacaacctgggcctgcagaagcagctggacctgcagagagaggtgctgcactacagccagaaggcccaggagaagctgctggtgcagagacagaccgccctgcagcagcagatccagaagcacgaggagaccctgaaggacttcttcaaggacagccagatcagcaagcccaccgtggagaacgacctgaagacccagaagatgggccagctgagagactggttccccaacacccaggacctggccggcaacgaccaggagaacatcagacacgccgacagaaacaacagcgacgacaaccacctggccagcgaggacaccagcgccaagcagagcggcgagcacctggagaaggacctgggcagaagaagcagcaagccccccgtggccaaggtgaagtgcggcctggacctgaaccagcacgagctgagcgccatccaggaggtggagagccccgccatcggcagaaccagcatcctgggcaagcccggcatctacgaggacagagaccccctgagagtgagcatcagcagagagcagagcttcttcggcagccccctggcccacgaccccttcagctgcctgcagctggtgggccaggagaacgtgtgcggcgacgactacgacgaggccgtgaagctgaaggagagcgtggtggagaaccacgccgtgctgagctacgccgtggaggaggagcacgcctacctgggccccaccgtgaagcccgacgacaaggccaagaccctgagctacgagcccctgagcagcgccaccgtgagcaccggcagcctgctgagctacgagaacaccgacctgagcctgaccgaccccgagagcttcagcgagcacatggacgacagcaagcaggagagcaccaccagcaaggaggaggagaccaacatcatcagcagcatcgtgcccagcacccaggacatctaccagagacagaacagcagcgacgtgcacaagagcctgctgcccgccgtggacgagaccacctgcggccacacccacttccagcagatgatcgacaagtacatcaacgaggccaacctgatccccgagaagaccgacctgcaggagctggagcacatcttccccaacctgcaccaccagctgttcaagcccctggagccccaccccgacttcgacctgagcagcagcagcagcggcatcagccccgacaacagagacttctaccagagaagcgacagcagcagcgagagccactgcgccaccggcctgagcaagagcaccgtgtacttcaccgccctgagaagaaccagcatgcacagcagcctgaacaccagccccaaccagcagcccgacaccaacctggcccacgtgggcgcccacagcttcgccaccgagaacatcatcggcggcagcgagcagtgcttcgagcagctgcagcccgagtacagcagccaggaggagagccagcacgccgacctgcccagcatcttcagcatcgaggccagagacagcagccagggcatgaagaaccagaactaccccagcgaggagcacaccgagatcctgcagaacaagaagaagatcgtgcacttccagctgagcatcggcaacctgagcagcgtgtacagcagcagcgacgaggccaacgtgttcgaccagctgaacgtgcagcacagcaccccctgcggcagcaacagcagcgagtgcagcaccaagcaccagctggagagcagaaaggagagcatgggcttcgaggagctgagcaagagaggcgtggtgaccatgctgcagagccagggcctgatcgaggacaacaagaacgagacctgcagagtgctggacatcaacccccaggtggaggagaccgacagcagactgtgcgtgagaaccgtggagatgggcaccagcatccaggccccctacagcctgaccacccagaacgagaagtacttcgagaacagcgccgagaccgacatccccaagatcaccaagaagctgagccagctgggcgagagcgagctgttcgccagcagcggcagcttcagcctgcagagcagcatccccgtgtgggagaccgagaccggccacggcatcatggaggagcccgagctgaccctgatcagcaccaccgacaccagcatcgccgagatggacttcgccaacctgaccctggaggagaagagcgagaacgaggccaagtgcttcttccaggtgagcgagttcctgcccctggtgagcgccaccgaggccagcgactaccccgccgtgagcgagctgagcatcgagaagcccagaaccgccagcaccgagacccccagaagactgacccccgtgcccggcagcctgcaggaggccttcatcaagagaaagaagagcttcatggagagaagccaccagagacagaaggagatcagaaacaagatccacgtgagcgagaacagccagatcaagaccgtgaaggagaagcccagcatcagcagcagcgtgagcagactgaagggcgtgaacaaggtgagagccagcttccccgaggacagaaagaccacccaggccctgagacaccagagaggcctgagactgtacaaccagctggccgaggtgaagcagcagaaggaggagaagaccaagcaggaggcctacgcccagaacagagccagagccaaggagttccacaagaagaccctggagaagctgagagccaagaacacctgctag

SEQ ID NO: 10000 - DNA, 2397 bp, synthetic construct
  source 1..2397: mol_type = other DNA; note = Synthetic coding sequence
atggccgccagcctgcccggccccggcagcagactgttcagaacctacggcgccgccgacggcagaagacagagaagacccggcagagaggccgcccagtggttccccccccaggacagaagaagattcttcaacagcagcggcagcagcgacgccagcatcggcgaccccagccagagcgacgaccccgacgaccccgacgaccccgacttccccggcagccccgtgagaagaagaagaagaagacccggcggcagagtgcccaaggacagacccagcctgaccgtgacccccaagagatggaagctgagagccagacccagcctgaccgtgacccccagaagactgggcctgagagccagacccccccagaagtgcagcaccccctgcggccccctgagactgccccccttccccagcagagacagcggcagactgagccccgacctgagcgtgtgcggccagcccagagacggcgacgagctgggcatcagcgccagcctgttcagcagcctggccagcccctgccccggcagccccacccccagagacagcgtgatcagcatcggcaccagcgcctgcctggtggccgccagcgccgtgcccagcggcctgcacctgcccgaggtgagcctggacagagccagcctgccctgcagccaggaggaggccaccggcggcgccaaggacaccagaatggtgcaccagaccagagccagcctgagaagcgtgctgttcggcctgatgaacagcggcacccccgaggacagcgagttcagagccgacggcaagaacatgagagagagctgctgcaagagaaagctggtggtgggcaacggccccgagggccccggcctgagcagcaccggcaagagaagagccaccggccaggacagctgccaggagagaggcctgcaggaggccgtgagaagagagcaccaggaggccagcgtgcccaagggcagaatcgtgcccagaggcatcgacagactggagagaaccagaagcagcagaaagagcaagcaccaggaggccaccgagaccagcctgctgcacagccacagattcaagaagggccagaagctgggcaaggacagcttccccacccaggacctgacccccctgcagaacgtgtgcttctggaccaagaccagagccagcttcagcttccacaagaagaagatcgtgaccgacgtgagcgaggtgtgcagcatctacaccaccgccaccagcctgagcggcagcctgctgagcgagtgcagcaacagacccgtgatgaacagaaccagcggcgcccccagcagctggcacagcagcagcatgtacctgctgagccccctgaacaccctgagcatcagcaacaagaaggccagcgacgccgagaaggtgtacggcgagtgcagccagaagggccccgtgcccttcagccactgcctgcccaccgagaagctgcagagatgcgagaagatcggcgagggcgtgttcggcgaggtgttccagaccatcgccgaccacacccccgtggccatcaagatcatcgccatcgagggccccgacctggtgaacggcagccaccagaagaccttcgaggagatcctgcccgagatcatcatcagcaaggagctgagcctgctgagcggcgaggtgtgcaacagaaccgagggcttcatcggcctgaacagcgtgcactgcgtgcagggcagctacccccccctgctgctgaaggcctgggaccactacaacagcaccaagggcagcgccaacgacagacccgacttcttcaaggacgaccagctgttcatcgtgctggagttcgagttcggcggcatcgacctggagcagatgagaaccaagctgagcagcctggccaccgccaagagcatcctgcaccagctgaccgccagcctggccgtggccgaggccagcctgagattcgagcacagagacctgcactggggcaacgtgctgctgaagaagaccagcctgaagaagctgcactacaccctgaacggcaagagcagcaccatccccagctgcggcctgcaggtgagcatcatcgactacaccctgagcagactggagagagacggcatcgtggtgttctgcgacgtgagcatggacgaggacctgttcaccggcgacggcgactaccagttcgacatctacagactgatgaagaaggagaacaacaacagatggggcgagtaccacccctacagcaacgtgctgtggctgcactacctgaccgacaagatgctgaagcagatgaccttcaagaccaagtgcaacacccccgccatgaagcagatcaagagaaagatccaggagttccacagaaccatgctgaacttcagcagcgccaccgacctgctgtgccagcacagcctgttcaagtag

SEQ ID NO: 10001 - DNA, 765 bp, synthetic construct
  source 1..765: mol_type = other DNA; note = Synthetic coding sequence
atggtgagagaggccaacatcaagcaggccaccgccgagaagcagctgaaggaggcccagggcaagatcgacgtgctgcaggccgaggtggccgccctgaagaccctggtgctgagcagcagccccaccagccccacccaggagcccctgcccggcggcaagacccccttcaagaagggccacaccagaaacaagagcaccagcagcgccatgagcggcagccaccaggacctgagcgtgatccagcccatcgtgaaggactgcaaggaggccgacctgagcctgtacaacgagttcagactgtggaaggacgagcccaccatggacagaacctgccccttcctggacaagatctaccaggaggacatcttcccctgcctgaccttcagcaagagcgagctggccagcgccgtgctggaggccgtggagaacaacaccctgagcatcgagcccgtgggcctgcagcccatcagattcgtgaaggccagcgccgtggagtgcggcggccccaagaagtgcgccctgaccggccagagcaagagctgcaagcacagaatcaagctgggcgacagcagcaactactactacatcagccccttctgcagatacagaatcaccagcgtgtgcaacttcttcacctacatcagatacatccagcagggcctggtgaagcagcaggacgtggaccagatgttctgggaggtgatgcagctgagaaaggagatgagcctggccaagctgggctacttcaaggaggagctgtag

SEQ ID NO: 10002 - DNA, 1077 bp, synthetic construct
  source 1..1077: mol_type = other DNA; note = Synthetic coding sequence
atgtacgccagccagtggttcctgaccctgttcaccgccaagttccccctgtgcatggtgttccacatcatcgacctgctgctgtgcgagggcctgaacatcatcttccacgtggccctggccctgctgaagaccagcaaggaggacctgctgcaggccgacttcgagggcgccctgaagttcttcagagtgcagctgcccaagagatacagagccgaggagaacgccagaagactgatggagcaggcctgcaacatcaaggtgcccaccaagaagctgaagaagtacgagaaggagtaccagaccatgagagagagccagctgcagcaggaggaccccatggacagatacaagagagagaacagaagactgcaggaggccagcatgagactggagcaggagaacgacgacctggcccacgagctggtgaccagcaagatcgccctgagaaacgacctggaccaggccgaggacaaggccgacgtgctgaacaaggagctgctgctgaccaagcagagactggtggagaccgaggaggagaagagaaagcaggaggaggagaccgcccagctgaaggaggtgttcagaaagcagctggagaaggccgagtacgagatcaagaagaccaccgccatcatcgccgagtacaagcagatctgcagccagctgagcaccagactggagaagcagcaggccgccagcaaggaggagctggaggtggtgaagggcaagatgatggcctgcaagcactgcagcgacatcttcagcaaggagggcgccctgaagctggccgccaccggcagagaggaccagggcatcgagaccgacgacgagaaggacagcctgaagaagcagctgagagagatggagctggagctggcccagaccaagctgcagctggtggaggccaagtgcaagatccaggagctggagcaccagagaggcgccctgatgaacgagatccaggccgccaagaacagctggttcagcaagaccctgaacagcatcaagaccgccaccggcacccagcccctgcagcccgcccccgtgacccagccccccaaggagagcacctag

SEQ ID NO: 10003 - DNA, 2436 bp, synthetic construct
  source 1..2436: mol_type = other DNA; note = Synthetic coding sequence
atgcccctgagcagccccaacgccgccgccaccgccagcgacatggacaagaacagcggcagcaacagcagcagcgccagcagcggcagcagcaagggccagcagccccccagaagcgccagcgccggccccgccggcgagagcaagcccaagagcgacggcaagaacagcagcggcagcaagagatacaacagaaagagagagctgagctaccccaagaacgagagcttcaacaaccagagcagaagaagcagcagccagaagagcaagaccttcaacaagatgcccccccagagaggcggcggcagcagcaagctgttcagcagcagcttcaacggcggcagaagagacgaggtggccgaggcccagagagccgagttcagccccgcccagttcagcggccccaagaagatcaacctgaaccacctgctgaacttcaccttcgagcccagaggccagaccggccacttcgagggcagcggccacggcagctggggcaagagaaacaagtggggccacaagcccttcaacaaggagctgttcctgcaggccaactgccagttcgtggtgagcgaggaccaggactacaccgcccacttcgccgaccccgacaccctggtgaactgggacttcgtggagcaggtgagaatctgcagccacgaggtgcccagctgccccatctgcctgtacccccccaccgccgccaagatcaccagatgcggccacatcttctgctgggcctgcatcctgcactacctgagcctgagcgagaagacctggagcaagtgccccatctgctacagcagcgtgcacaagaaggacctgaagagcgtggtggccaccgagagccaccagtacgtggtgggcgacaccatcaccatgcagctgatgaagagagagaagggcgtgctggtggccctgcccaagagcaagtggatgaacgtggaccaccccatccacctgggcgacgagcagcacagccagtacagcaagctgctgctggccagcaaggagcaggtgctgcacagagtggtgctggaggagaaggtggccctggagcagcagctggccgaggagaagcacacccccgagagctgcttcatcgaggccgccatccaggagctgaagaccagagaggaggccctgagcggcctggccggcagcagaagagaggtgaccggcgtggtggccgccctggagcagctggtgctgatggcccccctggccaaggagagcgtgttccagcccagaaagggcgtgctggagtacctgagcgccttcgacgaggagaccaccgaggtgtgcagcctggacacccccagcagacccctggccctgcccctggtggaggaggaggaggccgtgagcgagcccgagcccgagggcctgcccgaggcctgcgacgacctggagctggccgacgacaacctgaaggagggcaccatctgcaccgagagcagccagcaggagcccatcaccaagagcggcttcaccagactgagcagcagcccctgctactacttctaccaggccgaggacggccagcacatgttcctgcaccccgtgaacgtgagatgcctggtgagagagtacggcagcctggagagaagccccgagaagatcagcgccaccgtggtggagatcgccggctacagcatgagcgaggacgtgagacagagacacagatacctgagccacctgcccctgacctgcgagttcagcatctgcgagctggccctgcagccccccgtggtgagcaaggagaccctggagatgttcagcgacgacatcgagaagagaaagagacagagacagaagaaggccagagaggagagaagaagagagagaagaatcgagatcgaggagaacaagaagcagggcaagtaccccgaggtgcacatccccctggagaacctgcagcagttccccgccttcaacagctacacctgcagcagcgacagcgccctgggccccaccagcaccgagggccacggcgccctgagcatcagccccctgagcagaagccccggcagccacgccgacttcctgctgacccccctgagccccaccgccagccagggcagccccagcttctgcgtgggcagcctggaggaggacagccccttccccagcttcgcccagatgctgagagtgggcaaggccaaggccgacgtgtggcccaagaccgcccccaagaaggacgagaacagcctggtgccccccgcccccgtggacagcgacggcgagagcgacaacagcgacagagtgcccgtgcccagcttccagaacagcttcagccaggccatcgaggccgccttcatgaagctggacacccccgccaccagcgaccccctgagcgaggagaagggcggcaagaagagaaagaagcagaagcagaagctgctgttcagcaccagcgtggtgcacaccaagtag

SEQ ID NO: 10004 - DNA, 5826 bp, synthetic construct
  source 1..5826: mol_type = other DNA; note = Synthetic coding sequence
atgaagaccagcgacctggtgcccagcttcggctacttcatcagaagccccgagaagagagagcccatcgccctgatcagaaagagcgacgtgagcagaggcaacctggagaaggagatggcccacctgaaccacgacctgtacagcggcgacctgaacgagcagagccaggcccagctgagcgagggcagcatcaccctgcaggtggaggccgtggagagcaccagccaggtggacgagaacgacgtgaccctgaccgccgacaagggcaagaccgaggacaccttcttcatgagcaacaagccccagagatacaaggacaagctgcccgacagcggcgacagcatgctgagaatcagcaccatcgccagcgccatcgccgaggccagcgtgaacaccgaccccagccagctggccgccatgatcaaggccctgagcaacaagaccagagacaagaccttccaggaggacgagaagcagaaggactacagccacgtgagacacttcctgcccaacgacctggagaagagcaacggcagcaacgccctggacatggagaagtacctgaagaagaccgaggtgagcagatacgagagcgccctggagaacttcagcagagccagcatgagcgacacctgggacctgagcctgcccaaggagcagaccacccaggacatccaccccgtggacctgagcgccaccagcgtgagcgtgagagcccccgaggagaacaccgccgccatcgtgtacgtggagaacggcgagagcgagaaccaggagagcttcagaaccatcaacagcagcaacagcgtgaccaacagagagaacaacagcgccgtggtggacgtgaagacctgcagcatcgacaacaagctgcaggacgtgggcaacgacgagaaggccaccagcatcagcacccccagcgacagctacagcagcgtgagaaaccccagaatcaccagcctgtgcctgctgaaggactgcgaggagatcagagacaacagagagaaccagagacagaacgagtgcgtgagcgagatcagcaacagcgagaagcacgtgaccttcgagaaccacagaatcgtgagccccaagaacagcgacctgaagaacaccagccccgagcacggcggcagaggcagcgaggacgagcaggagagcttcagacccagcaccagccccctgagccacagcagccccagcgagatcagcggcaccagcagcagcggctgcgccctggagagcttcggcagcgccgcccagcagcagcagcccccctgcgagcaggagctgagccccctggtgtgcagccccgccggcgtgagcagactgacctacgtgagcgagcccgagagcagctaccccaccaccgccaccgacgacgccctggaggacagaaagagcgacatcaccagcgagctgagcaccaccatcatccagggcagccccgccgccctggaggagagagccatggagaagctgagagagaaggtgcccttccagaacagaggcaagggcaccctgagcagcatcatccagaacaacagcgacaccagaaaggccaccgagaccaccagcctgagcagcaagcccgagtacgtgaagcccgacttcagatggagcaaggaccccagcagcaagagcggcaacctgctggagaccagcgaggtgggctggaccagcaaccccgaggagctggaccccatcagactggccctgctgggcaagagcggcctgagctgccaggtgggcagcgccaccagccaccccgtgagctgccaggagcccatcgacgaggaccagagaatcagccccaaggacaagagcaccgccggcagagagttcagcggccaggtgagccaccagaccaccagcgagaaccagtgcacccccatccccagcagcaccgtgcacagcagcgtggccgacatgcagaacatgcccgccgccgtgcacgccctgctgacccagcccagcctgagcgccgcccccttcgcccagagatacctgggcaccctgcccagcaccggcagcaccaccctgccccagtgccacgccggcaacgccaccgtgtgcggcttcagcggcggcctgccctaccccgccgtggccggcgagcccgtgcagaacagcgtggccgtgggcatctgcctgggcagcaacatcggcagcggctggatgggcaccagcagcctgtgcaacccctacagcaacaccctgaaccagaacctgctgagcaccaccaagcccttccccgtgcccagcgtgggcaccaactgcggcatcgagccctgggacagcggcgtgaccagcggcctgggcagcgtgagagtgcccgaggagctgaagctgccccacgcctgctgcgtgggcatcgccagccagaccctgctgagcgtgctgaaccccaccgacagatggctgcaggtgagcatcggcgtgctgagcatcagcgtgaacggcgagaaggtggacctgagcacctacagatgcctggtgttcaagaacaaggccatcatcagaccccacgccaccgaggagatcaaggtgctgttcatccccagcagccccggcgtgttcagatgcaccttcagcgtggccagctggccctgcagcaccgacgccgagaccatcgtgcaggccgaggccctggccagcaccgtgaccctgaccgccatcgccgagagccccgtgatcgaggtggagaccgagaagaaggacgtgctggacttcggcgacctgacctacggcggctggaaggccctgcccctgaagctgatcaacagaacccacgccaccgtgcccatcagactgatcatcaacgccaacgccgtggcctggagatgcttcaccttcagcaaggagagcgtgagagcccccgtggaggtggccccctgcgccgacgtggtgaccagactggccggccccagcgtggtgaaccacatgatgcccgccagctacgacggccaggaccccgagttcctgatgatctgggtgctgttccacagccccaagaagcagatcagcagcagcgacatcctggacagcgccgaggagttcagcgccaaggtggacatcgaggtggacagccccaaccccacccccgtgctgagaagcgtgagcctgagagccagagccggcatcgccagaatccacgcccccagagacctgcagaccatgcacttcctggccaaggtggccagcagcagaaagcagcacctgcccctgaagaacgccggcaacatcgaggtgtacctggacatcaaggtgcccgagcagggcagccacttcagcgtggaccccaagaacctgctgctgaagcccggcgaggagcacgaggtgatcgtgagcttcacccccaaggaccccgaggcctgcgaggagagaatcctgaagatcttcgtgcagcccttcggcccccagtacgaggtggtgctgaagggcgaggtgatcagcagcggcagcaagcccctgagccccggcccctgcctggacatccccagcatcctgagcaacaagcagttcctggcctggggcggcgtgcccctgggcagaacccagctgcagaagctggccctgagaaacaacagcgccagcaccacccagcacctgagactgctgatcagaggccaggaccaggactgcttccagctgcagaacaccttcggcagcgagcagagactgaccagcaactgcgagatcagaatccaccccaaggaggacatcttcatcagcgtgctgttcgcccccaccagactgagctgcatgctggccagactggagatcaagcagctgggcaacagaagccagcccggcatcaagttcaccatccccctgagcggctacggcggcaccagcaacctgatcctggagggcgtgaagaagctgagcgacagctacatggtgaccgtgaacggcctggtgcccggcaaggagagcaagatcgtgttcagcgtgagaaacaccggcagcagagccgccttcgtgaaggccgtgggcttcaaggacagccagaagaaggtgctgctggaccccaaggtgctgagaatcttccccgacaagttcgtgctgaaggagagaacccaggagaacgtgaccctgatctacaaccccagcgacagaggcatcaacaacaagaccgccaccgagctgagcaccgtgtacctgttcggcggcgacgagatcagcagacagcagtacagaagagccctgctgcacaagcccgagatgatcaagcagatcctgcccgagcacagcgtgctgcagaacatcaacttcgtggaggccttccaggacgagctgctggtgaccgaggtgtacgacctgccccagagacccaacgacgtgcagctgttctacggcagcatgtgcaagatcatcctgagcgtgatcggcgagttcagagactgcatcagcagcagagagttcctgcagcccagcagcaaggccagcctggagagcaccagcgacctgggcgccagcggcaagcacggcggcaacgtgagcctggacgtgctgcccgtgaagggcccccagggcagccccctgctgagcagagccgccagaccccccctggaccagctggccagcgaggagccctggaccgtgctgcccgagcacctgatcctggtggcccccagcccctgcgacatggccaagaccggcagattccagatcgtgaacaacagcgtgagactgctgagattcgagctgtgctggcccgcccactgcctgaccgtgaccccccagcacggctgcgtggcccccgagagcaagctgcagatcctggtgagccccaacagcagcctgagcaccaagcagagcatgttcccctggagcggcctgatctacatccactgcgacgacggccagaagaagatcgtgaaggtgcagatcagagaggacctgacccaggtggagctgctgaccagactgaccagcaagcccttcggcatcctgagccccgtgagcgagcccagcgtgagccacctggtgaagcccatgaccaagccccccagcaccaaggtggagatcagaaacaagagcatcaccttccccaccaccgagcccggcgagaccagcgagagctgcctggagctggagaaccacggcaccaccgacgtgaagtggcacctgagcagcctggcccccccctacgtgaagggcgtggacgagagcggcgacgtgttcagagccacctacgccgccttcagatgcagccccatcagcggcctgctggagagccacggcatccagaaggtgagcatcaccttcctgcccagaggcagaggcgactacgcccagttctgggacgtggagtgccaccccctgaaggagccccacatgaagcacaccctgagattccagctgagcggccagagcatcgaggccgagaacgagcccgagaacgcctgcctgagcaccgacagcctgatcaagatcgaccacctggtgaagcccagaagacaggccgtgagcgaggccagcgccagaatccccgagcagctggacgtgaccgccagaggcgtgtacgcccccgaggacgtgtacagattcagacccaccagcgtgggcgagagcagaaccctgaaggtgaacctgagaaacaacagcttcatcacccacagcctgaagttcctgagccccagagagcccttctacgtgaagcacagcaagtacagcctgagagcccagcactacatcaacatgcccgtgcagttcaagcccaagagcgccggcaagttcgaggccctgctggtgatccagaccgacgagggcaagagcatcgccatcagactgatcggcgaggccctgggcaagaactag

SEQ ID NO: 10005 - DNA, 4167 bp, synthetic construct
  source 1..4167: mol_type = other DNA; note = Synthetic coding sequence
atggcccccggctgcaagaccgagctgagaagcgtgaccaacggccagagcaaccagcccagcaacgagggcgacgccatcaaggtgttcgtgagaatcagaccccccgccgagagaagcggcagcgccgacggcgagcagaacctgtgcctgagcgtgctgagcagcaccagcctgagactgcacagcaaccccgagcccaagaccttcaccttcgaccacgtggccgacgtggacaccacccaggagagcgtgttcgccaccgtggccaagagcatcgtggagagctgcatgagcggctacaacggcaccatcttcgcctacggccagaccggcagcggcaagaccttcaccatgatgggccccagcgagagcgacaacttcagccacaacctgagaggcgtgatccccagaagcttcgagtacctgttcagcctgatcgacagagagaaggagaaggccggcgccggcaagagcttcctgtgcaagtgcagcttcatcgagatctacaacgagcagatctacgacctgctggacagcgccagcgccggcctgtacctgagagagcacatcaagaagggcgtgttcgtggtgggcgccgtggagcaggtggtgaccagcgccgccgaggcctaccaggtgctgagcggcggctggagaaacagaagagtggccagcaccagcatgaacagagagagcagcagaagccacgccgtgttcaccatcaccatcgagagcatggagaagagcaacgagatcgtgaacatcagaaccagcctgctgaacctggtggacctggccggcagcgagagacagaaggacacccacgccgagggcatgagactgaaggaggccggcaacatcaacagaagcctgagctgcctgggccaggtgatcaccgccctggtggacgtgggcaacggcaagcagagacacgtgtgctacagagacagcaagctgaccttcctgctgagagacagcctgggcggcaacgccaagaccgccatcatcgccaacgtgcaccccggcagcagatgcttcggcgagaccctgagcaccctgaacttcgcccagagagccaagctgatcaagaacaaggccgtggtgaacgaggacacccagggcaacgtgagccagctgcaggccgaggtgaagagactgaaggagcagctggccgagctggccagcggccagaccccccccgagagcttcctgaccagagacaagaagaagaccaactacatggagtacttccaggaggccatgctgttcttcaagaagagcgagcaggagaagaagagcctgatcgagaaggtgacccagctggaggacctgaccctgaagaaggagaagttcatccagagcaacaagatgatcgtgaagttcagagaggaccagatcatcagactggagaagctgcacaaggagagcagaggcggcttcctgcccgaggagcaggacagactgctgagcgagctgagaaacgagatccagaccctgagagagcagatcgagcaccaccccagagtggccaagtacgccatggagaaccacagcctgagagaggagaacagaagactgagactgctggagcccgtgaagagagcccaggagatggacgcccagaccatcgccaagctggagaaggccttcagcgagatcagcggcatggagaagagcgacaagaaccagcagggcttcagccccaaggcccagaaggagccctgcctgttcgccaacaccgagaagctgaaggcccagctgctgcagatccagaccgagctgaacaacagcaagcaggagtacgaggagttcaaggagctgaccagaaagagacagctggagctggagagcgagctgcagagcctgcagaaggccaacctgaacctggagaacctgctggaggccaccaaggcctgcaagagacaggaggtgagccagctgaacaagatccacgccgagaccctgaagatcatcaccacccccaccaaggcctaccagctgcacagcagacccgtgcccaagctgagccccgagatgggcagcttcggcagcctgtacacccagaacagcagcatcctggacaacgacatcctgaacgagcccgtgccccccgagatgaacgagcaggccttcgaggccatcagcgaggagctgagaaccgtgcaggagcagatgagcgccctgcaggccaagctggacgaggaggagcacaagaacctgaagctgcagcagcacgtggacaagctggagcaccacagcacccagatgcaggagctgttcagcagcgagagaatcgactggaccaagcagcaggaggagctgctgagccagctgaacgtgctggagaagcagctgcaggagacccagaccaagaacgacttcctgaagagcgaggtgcacgacctgagagtggtgctgcacagcgccgacaaggagctgagcagcgtgaagctggagtacagcagcttcaagaccaaccaggagaaggagttcaacaagctgagcgagagacacatgcacgtgcagctgcagctggacaacctgagactggagaacgagaagctgctggagagcaaggcctgcctgcaggacagctacgacaacctgcaggagatcatgaagttcgagatcgaccagctgagcagaaacctgcagaacttcaagaaggagaacgagaccctgaagagcgacctgaacaacctgatggagctgctggaggccgagaaggagagaaacaacaagctgagcctgcagttcgaggaggacaaggagaacagcagcaaggagatcctgaaggtgctggaggccgtgagacaggagaagcagaaggagaccgccaagtgcgagcagcagatggccaaggtgcagaagctggaggagagcctgctggccaccgagaaggtgatcagcagcctggagaagagcagagacagcgacaagaaggtggtggccgacctgatgaaccagatccaggagctgagaaccagcgtgtgcgagaagaccgagaccatcgacaccctgaagcaggagctgaaggacatcaactgcaagtacaacagcgccctggtggacagagaggagagcagagtgctgatcaagaagcaggaggtggacatcctggacctgaaggagaccctgagactgagaatcctgagcgaggacatcgagagagacatgctgtgcgaggacctggcccacgccaccgagcagctgaacatgctgaccgaggccagcaagaagcacagcggcctgctgcagagcgcccaggaggagctgaccaagaaggaggccctgatccaggagctgcagcacaagctgaaccagaagaaggaggaggtggagcagaagaagaacgagtacaacttcaagatgagacagctggagcacgtgatggacagcgccgccgaggacccccagagccccaagacccccccccacttccagacccacctggccaagctgctggagacccaggagcaggagatcgaggacggcagagccagcaagaccagcctggagcacctggtgaccaagctgaacgaggacagagaggtgaagaacgccgagatcctgagaatgaaggagcagctgagagagatggagaacctgagactggagagccagcagctgatcgagaagaactggctgctgcagggccagctggacgacatcaagagacagaaggagaacagcgaccagaaccaccccgacaaccagcagctgaagaacgagcaggaggagagcatcaaggagagactggccaagagcaagatcgtggaggagatgctgaagatgaaggccgacctggaggaggtgcagagcgccctgtacaacaaggagatggagtgcctgagaatgaccgacgaggtggagagaacccagaccctggagagcaaggccttccaggagaaggagcagctgagaagcaagctggaggagatgtacgaggagagagagagaaccagccaggagatggagatgctgagaaagcaggtggagtgcctggccgaggagaacggcaagctggtgggccaccagaacctgcaccagaagatccagtacgtggtgagactgaagaaggagaacgtgagactggccgaggagaccgagaagctgagagccgagaacgtgttcctgaaggagaagaagagaagcgagagctag

SEQ ID NO: 10006 - DNA, 4767 bp, synthetic construct
  source 1..4767: mol_type = other DNA; note = Synthetic coding sequence
atgctgccccccaagcacctgagcgccaccaagcccaagaagagctgggcccccaacctgtacgagctggacagcgacctgaccaaggagcccgacgtgatcatcggcgagggccccaccgacagcgagttcttccaccagagattcagaaacctgatctacgtggagttcgtgggccccagaaagaccctgatcaagctgagaaacctgtgcctggactggctgcagcccgagaccagaaccaaggaggagatcatcgagctgctggtgctggagcagtacctgaccatcatccccgagaagctgaagccctgggtgagagccaagaagcccgagaactgcgagaagctggtgaccctgctggagaactacaaggagatgtaccagcccgaggacgacaacaacagcgacgtgaccagcgacgacgacatgaccagaaacagaagagagagcagccccccccacagcgtgcacagcttcagcgacagagactgggacagaagaggcagaagcagagacatggagcccagagacagatggagccacaccagaaaccccagaagcagaatgccccccagagacctgagcctgcccgtggtggccaagaccagcttcgagatggacagagaggacgacagagacagcagagcctacgagagcagaagccaggacgccgagagctaccagaacgtggtggacctggccgaggacagaaagccccacaacaccatccaggacaacatggagaactacagaaagctgctgagcctggtgcagctggccgaggacgacggccacagccacatgacccagggccacagcagcagaagcaagagaagcgcctaccccagcaccagcagaggcctgaagaccatgcccgaggccaagaagagcacccacagaagaggcatctgcgaggacgagagcagccacggcgtgatcatggagaagttcatcaaggacgtgagcagaagcagcaagagcggcagagccagagagagcagcgacagaagccagagattccccagaatgagcgacgacaactggaaggacatcagcctgaacaagagagagagcgtgatccagcagagagtgtacgagggcaacgccttcagaggcggcttcagattcaacagcaccctggtgagcagaaagagagtgctggagagaaagagaagataccacttcgacaccgacggcaagggcagcatccacgaccagaagggctgccccagaaagaagcccttcgagtgcggcagcgagatgagaaaggccatgagcgtgagcagcctgagcagcctgagcagccccagcttcaccgagagccagcccatcgacttcggcgccatgccctacgtgtgcgacgagtgcggcagaagcttcagcgtgatcagcgagttcgtggagcaccagatcatgcacaccagagagaacctgtacgagtacggcgagagcttcatccacagcgtggccgtgagcgaggtgcagaagagccaggtgggcggcaagagattcgagtgcaaggactgcggcgagaccttcaacaagagcgccgccctggccgagcacagaaagatccacgccagaggctacctggtggagtgcaagaaccaggagtgcgaggaggccttcatgcccagccccaccttcagcgagctgcagaagatctacggcaaggacaagttctacgagtgcagagtgtgcaaggagaccttcctgcacagcagcgccctgatcgagcaccagaagatccacttcggcgacgacaaggacaacgagagagagcacgagagagagagagagagagagagaggcgagaccttcagacccagccccgccctgaacgagttccagaagatgtacggcaaggagaagatgtacgagtgcaaggtgtgcggcgagaccttcctgcacagcagcagcctgaaggagcaccagaagatccacaccagaggcaaccccttcgagaacaagggcaaggtgtgcgaggagaccttcatccccggccagagcctgaagagaagacagaagacctacaacaaggagaagctgtgcgacttcaccgacggcagagacgccttcatgcagagcagcgagctgagcgagcaccagaagatccacagcagaaagaacctgttcgagggcagaggctacgagaagagcgtgatccacagcggccccttcaccgagagccagaagagccacaccatcaccagacccctggagagcgacgaggacgagaaggccttcaccatcagcagcaacccctacgagaaccagaagatccccaccaaggagaacgtgtacgaggccaagagctacgagagaagcgtgatccacagcctggccagcgtggaggcccagaagagccacagcgtggccggccccagcaagcccaaggtgatggccgagagcaccatccagagcttcgacgccatcaaccaccagagagtgagagccggcggcaacaccagcgagggcagagagtacagcagaagcgtgatccacagcctggtggccagcaagccccccagaagccacaacggcaacgagctggtggagagcaacgagaagggcgagagcagcatctacatcagcgacctgaacgacaagagacagaagatccccgccagagagaacccctgcgagggcggcagcaagaacagaaactacgaggacagcgtgatccagagcgtgttcagagccaagccccagaagagcgtgcccggcgagggcagcggcgagttcaagaaggacggcgagttcagcgtgcccagcagcaacgtgagagagtaccagaaggccagagccaagaagaagtacatcgagcacagaagcaacgagaccagcgtgatccacagcctgcccttcggcgagcagaccttcagacccagaggcatgctgtacgagtgccaggagtgcggcgagtgcttcgcccacagcagcgacctgaccgagcaccagaagatccacgacagagagaagcccagcggcagcagaaactacgagtggagcgtgatcagaagcctggcccccaccgacccccagaccagctacgcccaggagcagtacgccaaggagcaggccagaaacaagtgcaaggacttcagacagttcttcgccaccagcgaggacctgaacaccaaccagaagatctacgaccaggagaagagccacggcgaggagagccagggcgagaacaccgacggcgaggagacccacagcgaggagacccacggccaggagaccatcgaggaccccgtgatccagggcagcgacatggaggacccccagaaggacgaccccgacgacaagatctacgagtgcgaggactgcggcctgggcttcgtggacctgaccgacctgaccgaccaccagaaggtgcacagcagaaagtgcctggtggacagcagagagtacacccacagcgtgatccacacccacagcatcagcgagtaccagagagactacaccggcgagcagctgtacgagtgccccaagtgcggcgagagcttcatccacagcagcttcctgttcgagcaccagagaatccacgagcaggaccagctgtacagcatgaagggctgcgacgacggcttcatcgccctgctgcccatgaagcccagaagaaacagagccgccgagagaaaccccgccctggccggcagcgccatcagatgcctgctgtgcggccagggcttcatccacagcagcgccctgaacgagcacatgagactgcacagagaggacgacctgctggagcagagccagatggccgaggaggccatcatccccggcctggccctgaccgagttccagagaagccagaccgaggagagactgttcgagtgcgccgtgtgcggcgagagcttcgtgaaccccgccgagctggccgaccacgtgaccgtgcacaagaacgagccctacgagtacggcagcagctacacccacaccagcttcctgaccgagcccctgaagggcgccatccccttctacgagtgcaaggactgcggcaagagcttcatccacagcaccgtgctgaccaagcacaaggagctgcacctggaggaggaggaggaggacgaggccgccgccgccgccgccgccgccgcccaggaggtggaggccaacgtgcacgtgccccaggtggtgctgagaatccagggcctgaacgtggaggccgccgagcccgaggtggaggccgccgagcccgaggtggaggccgccgagcccgaggtggaggccgccgagcccaacggcgaggccgagggccccgacggcgaggccgccgagcccatcggcgaggccggccagcccaacggcgaggccgagcagcccaacggcgacgccgacgagcccgacggcgccggcatcgaggaccccgaggagagagccgaggagcccgagggcaaggccgaggagcccgagggcgacgccgacgagcccgacggcgtgggcatcgaggaccccgaggagggcgaggaccaggagatccaggtggaggagccctactacgactgccacgagtgcaccgagaccttcaccagcagcaccgccttcagcgagcacctgaagacccacgccagcatgatcatcttcgagcccgccaacgccttcggcgagtgcagcggctacatcgagagagccagcaccagcaccggcggcgccaaccaggccgacgagaagtacttcaagtgcgacgtgtgcggccagctgttcaacgacagactgagcctggccagacaccagaacacccacaccggctag

SEQ ID NO: 10007 - DNA, 2508 bp, synthetic construct
  source 1..2508: mol_type = other DNA; note = Synthetic coding sequence
atgggcaactacaagagcagacccacccagacctgcaccgacgagtggaagaagaaggtgagcgagagctacgtgatcaccatcgagagactggaggacgacctgcagatcaaggagaaggagctgaccgagctgagaaacatcttcggcagcgacgaggccttcagcaaggtgaacctgaactacagaaccgagaacggcctgagcctgctgcacctgtgctgcatctgcggcggcaagaagagccacatcagaaccctgatgctgaagggcctgagacccagcagactgaccagaaacggcttcaccgccctgcacctggccgtgtacaaggacaacgccgagctgatcaccagcctgctgcacagcggcgccgacatccagcaggtgggctacggcggcctgaccgccctgcacatcgccaccatcgccggccacctggaggccgccgacgtgctgctgcagcacggcgccaacgtgaacatccaggacgccgtgttcttcacccccctgcacatcgccgcctactacggccacgagcaggtgaccagactgctgctgaagttcggcgccgacgtgaacgtgagcggcgaggtgggcgacagacccctgcacctggccagcgccaagggcttcctgaacatcgccaagctgctgatggaggagggcagcaaggccgacgtgaacgcccaggacaacgaggaccacgtgcccctgcacttctgcagcagattcggccaccacgacatcgtgaagtacctgctgcagagcgacctggaggtgcagccccacgtggtgaacatctacggcgacacccccctgcacctggcctgctacaacggcaagttcgaggtggccaaggagatcatccagatcagcggcaccgagagcctgaccaaggagaacatcttcagcgagaccgccttccacagcgcctgcacctacggcaagagcatcgacctggtgaagttcctgctggaccagaacgtgatcaacatcaaccaccagggcagagacggccacaccggcctgcacagcgcctgctaccacggccacatcagactggtgcagttcctgctggacaacggcgccgacatgaacctggtggcctgcgaccccagcagaagcagcggcgagaaggacgagcagacctgcctgatgtgggcctacgagaagggccacgacgccatcgtgaccctgctgaagcactacaagagaccccaggacgagctgccctgcaacgagtacagccagcccggcggcgacggcagctacgtgagcgtgcccagccccctgggcaagatcaagagcatgaccaaggagaaggccgacatcctgctgctgagagccggcctgcccagccacttccacctgcagctgagcgagatcgagttccacgagatcatcggcagcggcagcttcggcaaggtgtacaagggcagatgcagaaacaagatcgtggccatcaagagatacagagccaacacctactgcagcaagagcgacgtggacatgttctgcagagaggtgagcatcctgtgccagctgaaccacccctgcgtgatccagttcgtgggcgcctgcctgaacgaccccagccagttcgccatcgtgacccagtacatcagcggcggcagcctgttcagcctgctgcacgagcagaagagaatcctggacctgcagagcaagctgatcatcgccgtggacgtggccaagggcatggagtacctgcacaacctgacccagcccatcatccacagagacctgaacagccacaacatcctgctgtacgaggacggccacgccgtggtggccgacttcggcgagagcagattcctgcagagcctggacgaggacaacatgaccaagcagcccggcaacctgagatggatggcccccgaggtgttcacccagtgcaccagatacaccatcaaggccgacgtgttcagctacgccctgtgcctgtgggagatcctgaccggcgagatccccttcgcccacctgaagcccgccgccgccgccgccgacatggcctaccaccacatcagaccccccatcggctacagcatccccaagcccatcagcagcctgctgatcagaggctggaacgcctgccccgagggcagacccgagttcagcgaggtggtgatgaagctggaggagtgcctgtgcaacatcgagctgatgagccccgccagcagcaacagcagcggcagcctgagccccagcagcagcagcgactgcctggtgaacagaggcggccccggcagaagccacgtggccgccctgagaagcagattcgagctggagtacgccctgaacgccagaagctacgccgccctgagccagagcgccggccagtacagcagccagggcctgagcctggaggagatgaagagaagcctgcagtacacccccatcgacaagtacggctacgtgagcgaccccatgagcagcatgcacttccacagctgcagaaacagcagcagcttcgaggacagcagctag

SEQ ID NO: 10008 - DNA, 1767 bp, synthetic construct
  source 1..1767: mol_type = other DNA; note = Synthetic coding sequence
atgaacaccagcatcccctaccagcagaacccctacaaccccagaggcagcagcaacgtgatccagtgctacagatgcggcgacacctgcaagggcgaggtggtgagagtgcacaacaaccacttccacatcagatgcttcacctgccaggtgtgcggctgcggcctggcccagagcggcttcttcttcaagaaccaggagtacatctgcacccaggactaccagcagctgtacggcaccagatgcgacagctgcagagacttcatcaccggcgaggtgatcagcgccctgggcagaacctaccaccccaagtgcttcgtgtgcagcctgtgcagaaagcccttccccatcggcgacaaggtgaccttcagcggcaaggagtgcgtgtgccagacctgcagccagagcatggccagcagcaagcccatcaagatcagaggccccagccactgcgccggctgcaaggaggagatcaagcacggccagagcctgctggccctggacaagcagtggcacgtgagctgcttcaagtgccagacctgcagcgtgatcctgaccggcgagtacatcagcaaggacggcgtgccctactgcgagagcgactaccacgcccagttcggcatcaagtgcgagacctgcgacagatacatcagcggcagagtgctggaggccggcggcaagcactaccaccccacctgcgccagatgcgtgagatgccaccagatgttcaccgagggcgaggagatgtacctgaccggcagcgaggtgtggcaccccatctgcaagcaggccgccagagccgagaagaagctgaagcacagaagaaccagcgagaccagcatcagcccccccggcagcagcatcggcagccccaacagagtgatctgcgacatctacgagaacctggacctgagacagagaagagccagcagccccggctacatcgacagccccacctacagcagacagggcatgagccccaccttcagcagaagcccccaccactactacagaagcgccggcgacagcaacatctacagaaagccccccatctacaagagacacggcgacctgagcaccgccaccaagagcaagaccagcgaggacatcagccagaccagcaagtacagccccatctacagccccgacccctactacgccagcgagagcgagtactggacctaccacggcagccccaaggtgcccagagccagaagattcagcagcggcggcgaggaggacgacttcgacagaagcatgcacaagctgcagagcggcatcggcagactgatcctgaaggaggagatgaaggccagaagcagcagctacgccgacccctggaccccccccagaagcagcaccagcagcagagaggccctgcacaccgccggctacgagatgagcctgaacggcagccccagaagccactacctggccgacagcgaccccctgatcagcaagagcgccagcctgcccgcctacagaagaaacggcctgcacagaacccccagcgccgacctgttccactacgacagcatgaacgccgtgaactggggcatgagagagtacaagatctacccctacgagctgctgctggtgaccaccagaggcagaaacagactgcccaaggacgtggacagaaccagactggagagacacctgagccaggaggagttctaccaggtgttcggcatgaccatcagcgagttcgacagactggccctgtggaagagaaacgagctgaagaagcaggccagactgttctag

SEQ ID NO: 10009 - DNA, 1050 bp, synthetic construct
  source 1..1050: mol_type = other DNA; note = Synthetic coding sequence
atggccatccccatcaccgtgctggactgcgacctgctgctgtacggcagaggccacagaaccctggacagattcaagctggacgacgtgaccgacgagtacctgatgagcatgtacggcttccccagacagttcatctactacctggtggagctgctgggcgccaacctgagcagacccacccagagaagcagagccatcagccccgagacccaggtgctggccgccctgggcttctacaccagcggcagcttccagaccagaatgggcgacgccatcggcatcagccaggccagcatgagcagatgcgtggccaacgtgaccgaggccctggtggagagagccagccagttcatcagattccccgccgacgaggccagcatccaggccctgaaggacgagttctacggcctggccggcatgcccggcgtgatgggcgtggtggactgcatccacgtggccatcaaggcccccaacgccgaggacctgagctacgtgaacagaaagggcctgcacagcctgaactgcctgatggtgtgcgacatcagaggcaccctgatgaccgtggagaccaactggcccggcagcctgcaggactgcgccgtgctgcagcagagcagcctgagcagccagttcgaggccggcatgcacaaggacagctggctgctgggcgacagcagcttcttcctgagaacctggctgatgacccccctgcacatccccgagacccccgccgagtacagatacaacatggcccacagcgccacccacagcgtgatcgagaagaccttcagaaccctgtgcagcagattcagatgcctggacggcagcaagggcgccctgcagtacagccccgagaagagcagccacatcatcctggcctgctgcgtgctgcacaacatcagcctggagcacggcatggacgtgtggagcagccccatgaccggccccatggagcagccccccgaggaggagtacgagcacatggagagcctggacctggaggccgacagaatcagacaggagctgatgctgacccacttcagctag

SEQ ID NO: 10010 - DNA, 1794 bp, synthetic construct
  source 1..1794: mol_type = other DNA; note = Synthetic coding sequence
atgagcagcaagggcagcagcaccgacggcagaaccgacctggccaacggcagcctgagcagcagccccgaggagatgagcggcgccgaggagggcagagagaccagcagcggcatcgaggtggaggccagcgacctgagcctgagcctgaccggcgacgacggcggccccaacagaaccagcaccgagagcagaggcaccgacaccgagagcagcggcgaggacaaggacagcgacagcatggaggacaccggccactacagcatcaacgacgagaacagagtgcacgacagaagcgaggaggaggaggaggaggaggaggaggaggaggaggagcagcccagaagaagagtgcagagaaagagagccaacagagaccaggacagcagcgacgacgagagagccctggaggactgggtgagcagcgagaccagcgccctgcccagacccagatggcaggccctgcccgccctgagagagagagagctgggcagcagcgccagattcgtgtacgaggcctgcggcgccagagtgttcgtgcagagattcagactgcagcacggcctggagggccacaccggctgcgtgaacaccctgcacttcaaccagagaggcacctggctggccagcggcagcgacgacctgaaggtggtggtgtgggactgggtgagaagacagcccgtgctggacttcgagagcggccacaagagcaacgtgttccaggccaagttcctgcccaacagcggcgacagcaccctggccatgtgcgccagagacggccaggtgagagtggccgagctgagcgccacccagtgctgcaagaacaccaagagagtggcccagcacaagggcgccagccacaagctggccctggagcccgacagcccctgcaccttcctgagcgccggcgaggacgccgtggtgttcaccatcgacctgagacaggacagacccgccagcaagctggtggtgaccaaggagaaggagaagaaggtgggcctgtacaccatctacgtgaaccccgccaacacccaccagttcgccgtgggcggcagagaccagttcgtgagaatctacgaccagagaaagatcgacgagaacgagaacaacggcgtgctgaagaagttctgcccccaccacctggtgaacagcgagagcaaggccaacatcacctgcctggtgtacagccacgacggcaccgagctgctggccagctacaacgacgaggacatctacctgttcaacagcagccacagcgacggcgcccagtacgtgaagagatacaagggccacagaaacaacgccaccgtgaagggcgtgaacttctacggccccaagagcgagttcgtggtgagcggcagcgactgcggccacatcttcctgtgggagaagagcagctgccagatcatccagttcatggagggcgacaagggcggcgtggtgaactgcctggagccccacccccacctgcccgtgctggccaccagcggcctggaccacgacgtgaagatctgggcccccaccgccgaggccagcaccgagctgaccggcctgaaggacgtgatcaagaagaacaagagagagagagacgaggacagcctgcaccagaccgacctgttcgacagccacatgctgtggttcctgatgcaccacctgagacagagaagacaccacagaagatggagagagcccggcgtgggcgccaccgacgccgacagcgacgagagccccagcagcagcgacaccagcgacgaggaggagggccccgacagagtgcagtgcatgcccagctag

SEQ ID NO: 10011 - DNA, 933 bp, synthetic construct
  source 1..933: mol_type = other DNA; note = Synthetic coding sequence
atgagccagcagctgaagaagagagccaagaccagacaccagaagggcctgggcggcagagcccccagcggcgccaagcccagacagggcaagagcagccaggacctgcaggccgagatcgagcccgtgagcgccgtgtgggccctgtgcgacggctacgtgtgctacgagcccggcccccaggccctgggcggcgacgacttcagcgactgctacatcgagtgcgtgatcagaggcgagttcagccagcccatcctggaggaggacagcctgttcgagagcctggagtacctgaagaagggcagcgagcagcagctgagccagaaggtgttcgaggccagcagcctggagtgcagcctggagtacatgaagaagggcgtgaagaaggagctgccccagaagatcgtgggcgagaacagcctggagtacagcgagtacatgaccggcaagaagctgccccccggcggcatccccggcatcgacctgagcgaccccaagcagctggccgagttcgccagaaagaagccccccatcaacaaggagtacgacagcctgagcgccatcgcctgcccccagagcggctgcaccagaaagctgagaaacagagccgccctgagaaagcacctgctgatccacggccccagagaccacgtgtgcgccgagtgcggcaaggccttcgtggagagcagcaagctgaagagacacttcctggtgcacaccggcgagaagcccttcagatgcaccttcgagggctgcggcaagagattcagcctggacttcaacctgagaacccacgtgagaatccacaccggcgagaagagattcgtgtgccccttccagggctgcaacagaagattcatccagagcaacaacctgaaggcccacatcctgacccacgccaacaccaacaagaacgagcaggagggcaagtag

SEQ ID NO: 10012 - DNA, 1149 bp, synthetic construct
  source 1..1149: mol_type = other DNA; note = Synthetic coding sequence
atgctgagatggaccgtgcacctggagggcggccccagaagagtgaaccacgccgccgtggccgtgggccacagagtgtacagcttcggcggctactgcagcggcgaggactacgagaccctgagacagatcgacgtgcacatcttcaacgccgtgagcctgagatggaccaagctgccccccgtgaagagcgccatcagaggccaggcccccgtggtgccctacatgagatacggccacagcaccgtgctgatcgacgacaccgtgctgctgtggggcggcagaaacgacaccgagggcgcctgcaacgtgctgtacgccttcgacgtgaacacccacaagtggttcacccccagagtgagcggcaccgtgcccggcgccagagacggccacagcgcctgcgtgctgggcaagatcatgtacatcttcggcggctacgagcagcaggccgactgcttcagcaacgacatccacaagctggacaccagcaccatgacctggaccctgatctgcaccaagggcagccccgccagatggagagacttccacagcgccaccatgctgggcagccacatgtacgtgttcggcggcagagccgacagattcggccccttccacagcaacaacgagatctactgcaacagaatcagagtgttcgacaccagaaccgaggcctggctggactgcccccccacccccgtgctgcccgagggcagaagaagccacagcgccttcggctacaacggcgagctgtacatcttcggcggctacaacgccagactgaacagacacttccacgacctgtggaagttcaaccccgtgagcttcacctggaagaagatcgagcccaagggcaagggcccctgccccagaagaagacagtgctgctgcatcgtgggcgacaagatcgtgctgttcggcggcaccagccccagccccgaggagggcctgggcgacgagttcgacctgatcgaccacagcgacctgcacatcctggacttcagccccagcctgaagaccctgtgcaagctggccgtgatccagtacaacctggaccagagctgcctgccccacgacatcagatgggagctgaacgccatgaccaccaacagcaacatcagcagacccatcgtgagcagccacggctag

SEQ ID NO: 10013 - DNA, 1827 bp, synthetic construct
  source 1..1827: mol_type = other DNA; note = Synthetic coding sequence
atggccgccgccgccgccgccgtgggccccggcgccggcggcgccggcagcgccgtgcccggcggcgccggcccctgcgccaccgtgagcgtgttccccggcgccagactgctgaccatcggcgacgccaacggcgagatccagagacacgccgagcagcaggccctgagactggaggtgagagccggccccgacagcgccggcatcgccctgtacagccacgaggacgtgtgcgtgttcaagtgcagcgtgagcagagagaccgagtgcagcagagtgggcaagcagagcttcatcatcaccctgggctgcaacagcgtgctgatccagttcgccacccccaacgacttctgcagcttctacaacatcctgaagacctgcagaggccacaccctggagagaagcgtgttcagcgagagaaccgaggagagcagcgccgtgcagtacttccagttctacggctacctgagccagcagcagaacatgatgcaggactacgtgagaaccggcacctaccagagagccatcctgcagaaccacaccgacttcaaggacaagatcgtgctggacgtgggctgcggcagcggcatcctgagcttcttcgccgcccaggccggcgccagaaagatctacgccgtggaggccagcaccatggcccagcacgccgaggtgctggtgaagagcaacaacctgaccgacagaatcgtggtgatccccggcaaggtggaggaggtgagcctgcccgagcaggtggacatcatcatcagcgagcccatgggctacatgctgttcaacgagagaatgctggagagctacctgcacgccaagaagtacctgaagcccagcggcaacatgttccccaccatcggcgacgtgcacctggcccccttcaccgacgagcagctgtacatggagcagttcaccaaggccaacttctggtaccagcccagcttccacggcgtggacctgagcgccctgagaggcgccgccgtggacgagtacttcagacagcccgtggtggacaccttcgacatcagaatcctgatggccaagagcgtgaagtacaccgtgaacttcctggaggccaaggagggcgacctgcacagaatcgagatccccttcaagttccacatgctgcacagcggcctggtgcacggcctggccttctggttcgacgtggccttcatcggcagcatcatgaccgtgtggctgagcaccgcccccaccgagcccctgacccactggtaccaggtgagatgcctgttccagagccccctgttcgccaaggccggcgacaccctgagcggcacctgcctgctgatcgccaacaagagacagagctacgacatcagcatcgtggcccaggtggaccagaccggcagcaagagcagcaacctgctggacctgaagaaccccttcttcagatacaccggcaccacccccagccccccccccggcagccactacaccagccccagcgagaacatgtggaacaccggcagcacctacaacctgagcagcggcatggccgtggccggcatgcccaccgcctacgacctgagcagcgtgatcgccagcggcagcagcgtgggccacaacaacctgatccccctggccaacaccggcatcgtgaaccacacccacagcagaatgggcagcatcatgagcaccggcatcgtgcagggcagcagcggcgcccagggcagcggcggcggcagcaccagcgcccactacgccgtgaacagccagttcaccatgggcggccccgccatcagcatggccagccccatgagcatccccaccaacaccatgcactacggcagctag

SEQ ID NO: 10014 - DNA, 2913 bp, synthetic construct
  source 1..2913: mol_type = other DNA; note = Synthetic coding sequence
atgcagagcaccgacctgggcaacaaggagagcggcaagatctggcacagaaagcccagccccgccaccagagacggcatcatcgtgaacatcatccacaacaccagcgactaccaccccaaggtgctgagattcctgaacgtggccttcgacggcaccggcgactgcctgatcgccggcgaccaccagggcaacatctacgtgttcgacctgcacggcaacagattcaacctggtgcagagaaccgcccaggcctgcaccgccctggccttcaacctgagaagaaagagcgagttcctggtggccctggccgactacagcatcaagtgcttcgacaccgtgaccaaggagctggtgagctggatgagaggccacgagagcagcgtgttcagcatcagcgtgcacgccagcggcaagtacgccatcaccaccagcagcgacaccgcccagctgtgggacctggacaccttccagagaaagagaaagctgaacatcagacagagcgtgggcatccagaaggtgttcttcctgcccctgagcaacaccatcctgagctgcttcaaggacaacagcatcttcgcctgggagtgcgacaccctgttctgcaagtaccagctgcccgccccccccgagagcagcagcatcctgtacaaggtgttcgccgtgaccagagacggcagaatcctggccgccggcggcaagagcaaccacctgcacctgtggtgcctggaggccagacagctgttcagaatcatccagatgcccaccaaggtgagagccatcagacacctggagttcctgcccgacagcttcgacgccggcagcaaccaggtgctgggcgtgctgagccaggacggcatcatgagattcatcaacatgcagacctgcaagctgctgttcgagatcggcagcctggacgagggcatcagcagcagcgccatcagcccccacggcagatacatcgccagcatcatggagaacggcagcctgaacatctacagcgtgcaggccctgacccaggagatcaacaagccccccccccccctggtgaaggtgatcgaggacctgcccaagaacaagctgagcagcagcgacctgaagatgaaggtgaccagcggcagagtgcagcagcccgccaagagcagagagagcaagatgcagaccagaatcctgaagcaggacctgaccggcgacttcgagagcaagaagaacgagctgcccgacggcctgaacaagaagagactgcagatcctgctgaagggctacggcgagtaccccaccaagtacagaatgttcatctggagaagcctgctgcagctgcccgagaaccacaccgccttcagcaccctgatcgacaagggcacccacgtggccttcctgaacctgcagaagaagtaccccatcaagagcagaaagctgctgagagtgctgcagagaaccctgagcgccctggcccactggagcgtgatcttcagcgacaccccctacctgcccctgctggccttccccttcgtgaagctgttccagaacaaccagctgatctgcttcgaggtgatcgccaccctgatcatcaactggtgccagcactggttcgagtacttccccaacccccccatcaacatcctgagcatgatcgagaacgtgctggccttccacgacaaggagctgctgcagcacttcatcgaccacgacatcaccagccagctgtacgcctggcccctgctggagaccgtgttcagcgaggtgctgaccagagaggagtggctgaagctgttcgacaacatcttcagcaaccaccccagcttcctgctgatgaccgtggtggcctacaacatctgcagcagaacccccctgctgagctgcaacctgaaggacgacttcgagttcttcttccaccacagaaacaacctggacatcaacgtggtgatcagacaggtgtaccacctgatggagaccacccccaccgacatccaccccgacagcatgctgaacgtgttcgtggccctgaccaagggccagtaccccgtgttcaaccagtaccccaagttcatcgtggactaccagacccaggagagagagagaatcagaaacgacgagctggactacctgagagagagacagaccgtggaggacatgcaggccaaggtggaccagcagagagtggaggacgaggcctggtaccagaagcaggagctgctgagaaaggccgaggagaccagaagagagatgctgctgcaggaggaggagaagatgatccagcagagacagagactggccgccgtgaagagagagctgaaggtgaaggagatgcacctgcaggacgccgccagaagaagattcctgaagctgcagcaggaccagcaggagatggagctgagaagactggacgacgagatcggcagaaagaacctgaccgagaaccaggaggccctggccaaggagatgagagccgacgccgacgcctacagaagaaaggtggacctggaggagcacatgttccacaagctgatcgaggccggcgagacccagagccagaagacccagaagtggaaggaggccgagggcaaggagttcagactgagaagcgccaagaaggccagcgccctgagcgacgccagcagaaagtggttcctgaagcaggagatcaacgccgccgtggagcacgccgagaacccctgccacaaggaggagcccagattccagaacgagcaggacagcagctgcctgcccagaaccagccagctgaacgacagcagcgagatggaccccagcacccagatcagcctgaacagaagagccgtggagtgggacaccaccggccagaacctgatcaagaaggtgagaaacctgagacagagactgaccgccagagccagacacagatgccagaccccccacctgctggccgcctag

SEQ ID NO: 10015 - DNA, 648 bp, synthetic construct
  source 1..648: mol_type = other DNA; note = Synthetic coding sequence
atgagctgcaccatcgagaaggccctggccgacgccaaggccctggtggagagactgagagaccacgacgacgccgccgagagcctgatcgagcagaccaccgccctgaacaagagagtggaggccatgaagcagtaccaggaggagatccaggagctgaacgaggtggccagacacagacccagaagcaccctggtgatgggcatccagcaggagaacagacagatcagagagctgcagcaggagaacaaggagctgagaaccagcctggaggagcaccagagcgccctggagctgatcatgagcaagtacagagagcagatgttcagactgctgatggccagcaagaaggacgaccccggcatcatcatgaagctgaaggagcagcacagcaaggagctgcaggcccacgtggaccagatcaccgagatggccgccgtgatgagaaaggccatcgagatcgacgagcagcagggctgcaaggagcaggagagaatcttccagctggagcaggagaacaagggcctgagagagatcctgcagatcaccagagagagcttcctgaacctgagaaaggacgacgccagcgagagcaccagcctgagcgccctggtgaccaacagcgacctgagcctgagaaagagctag

SEQ ID NO: 10016 - DNA, 2676 bp, synthetic construct
  source 1..2676: mol_type = other DNA; note = Synthetic coding sequence
atggccgtggccagagtggacgccgccctgccccccggcgagggcagcgtggtgaactggagcggccagggcctgcagaagctgggccccaacctgccctgcgaggccgacatccacaccctgatcctggacaagaaccagatcatcaagctggagaacctggagaagtgcaagagactgatccagctgagcgtggccaacaacagactggtgagaatgatgggcgtggccaagctgaccctgctgagagtgctgaacctgccccacaacagcatcggctgcgtggagggcctgaaggagctggtgcacctggagtggctgaacctggccggcaacaacctgaaggccatggagcagatcaacagctgcaccgccctgcagcacctggacctgagcgacaacaacatcagccagatcggcgacctgagcaagctggtgagcctgaagaccctgctgctgcacggcaacatcatcaccagcctgagaatggcccccgcctacctgcccagaagcctggccatcctgagcctggccgagaacgagatcagagacctgaacgagatcagcttcctggccagcctgaccgagctggagcagctgagcatcatgaacaacccctgcgtgatggccacccccagcatccccggcttcgactacagaccctacatcgtgagctggtgcctgaacctgagagtgctggacggctacgtgatcagccagaaggagagcctgaaggccgagtggctgtacagccagggcaagggcagagcctacagacccggccagcacatccagctggtgcagtacctggccaccgtgtgccccctgaccagcaccctgggcctgcagaccgccgaggacgccaagctggagaagatcctgagcaagcagagattccaccagagacagctgatgaaccagagccagaacgaggagctgagccccctggtgcccgtggagaccagagccagcctgatccccgagcacagcagccccgtgcaggactgccagatcagccaggagagcgagcccgtgatccaggtgaacagctgggtgggcatcaacagcaacgacgaccagctgttcgccgtgaagaacaacttccccgccagcgtgcacaccaccagatacagcagaaacgacctgcacctggaggacatccagaccgacgaggacaagctgaactgcagcctgctgagcagcgagagcaccttcatgcccgtggccagcggcctgagccccctgagccccaccgtggagctgagactgcagggcatcaacctgggcctggaggacgacggcgtggccgacgagagcgtgaagggcctggagagccaggtgctggacaaggaggaggagcagcccctgtgggccgccaacgagaacagcgtgcagatgatgagaagcgagatcaacaccgaggtgaacgagaaggccggcctgctgccctgccccgagcccaccatcatcagcgccatcctgaaggacgacaaccacagcctgaccttcttccccgagagcaccgagcagaagcagagcgacatcaagaagcccgagaacacccagcccgagaacaaggagaccatcagccaggccaccagcgagaagctgcccatgatcctgacccagagaagcgtggccctgggccaggacaaggtggccctgcagaagctgaacgacgccgccaccaagctgcaggcctgctggagaggcttctacgccagaaactacaacccccaggccaaggacgtgagatacgagatcagactgagaagaatgcaggagcacatcgtgtgcctgaccgacgagatcagaagactgagaaaggagagagacgaggagagaatcaagaagttcgtgcaggaggaggccttcagattcctgtggaaccagaagtggggcctggccatcctgcccagacccgtgagcaacttctgggcccaggccgtgttccccccccagccccccaaggtgagaagcctgcaggtgtggcagcagaccgtggaccagagactgagcagctggcacaccgacgtgccccccatcagcagcaccctggtgcccagcaagcaccccctgttcacccagagccaggagagcagctgcgaccagaacgccgactggttcatcgccagcgacgtggccccccaggagaagagcctgcccgagttccccgacagcggcttccacagcagcctgaccgagcaggtgcacagcctgcagcacagcctggacttcgagaagagcagcaccgagggcagcgagagcagcatcatgggcaacagcatcgacaccgtgagatacggcaaggagagcgacctgggcgacgtgagcgaggagcacggcgagtggaacaaggagagcagcaacaacgagcaggacaacagcctgctggagcagtacctgaccagcgtgcagcagctggaggacgccgacgagagaaccaacttcgacaccgagaccagagacagcaagctgcacatcgcctgcttccccgtgcagctggacaccctgagcgacggcgccagcgtggacgagagccacggcatcagcccccccctgcagggcgagatcagccagacccaggagaacagcaagctgaacgccgaggtgcagggccagcagcccgagtgcgacagcaccttccagctgctgcacgtgggcgtgaccgtgtag

SEQ ID NO: 10017 - DNA, 828 bp, synthetic construct
  source 1..828: mol_type = other DNA; note = Synthetic coding sequence
atggccgagcccgccagcgtggccgccgagagcctggccggcagcagagccagagccgccagaaccgtgctgggccaggtggtgctgcccggcgaggagctgctgctgcccgagcaggaggacgccgagggccccggcggcgccgtggagagacccctgagcctgaacgccagagcctgcagcagagtgagagtggtgtgcggccccggcctgagaagatgcggcgacagactgctggtgaccaagtgcggcagactgagacacaaggagcccggcagcggcagcggcggcggcgtgtactgggtggacagccagcagaagagatacgtgcccgtgaagggcgaccacgtgatcggcatcgtgaccgccaagagcggcgacatcttcaaggtggacgtgggcggcagcgagcccgccagcctgagctacctgagcttcgagggcgccaccaagagaaacagacccaacgtgcaggtgggcgacctgatctacggccagttcgtggtggccaacaaggacatggagcccgagatggtgtgcatcgacagctgcggcagagccaacggcatgggcgtgatcggccaggacggcctgctgttcaaggtgaccctgggcctgatcagaaagctgctggcccccgactgcgagatcatccaggaggtgggcaagctgtaccccctggagatcgtgttcggcatgaacggcagaatctgggtgaaggccaagaccatccagcagaccctgatcctggccaacatcctggaggcctgcgagcacatgaccagcgaccagagaaagcagatcttcagcagactggccgagagctag

SEQ ID NO: 10018 - DNA, 1620 bp, synthetic construct
  source 1..1620: mol_type = other DNA; note = Synthetic coding sequence
atggccaccagcgcccccctgagaagcctggaggaggaggtgacctgcagcatctgcctggactacctgagagaccccgtgaccatcgactgcggccacgtgttctgcagaagctgcaccaccgacgtgagacccatcagcggcagcagacccgtgtgccccctgtgcaagaagcccttcaagaaggagaacatcagacccgtgtggcagctggccagcctggtggagaacatcgagagactgaaggtggacaagggcagacagcccggcgaggtgaccagagagcagcaggacgccaagctgtgcgagagacacagagagaagctgcactactactgcgaggacgacggcaagctgctgtgcgtgatgtgcagagagagcagagagcacagaccccacaccgccgtgctgatggagaaggccgcccagccccacagagagaagatcctgaaccacctgagcaccctgagaagagacagagacaagatccagggcttccaggccaagggcgaggccgacatcctggccgccctgaagaagctgcaggaccagagacagtacatcgtggccgagttcgagcagggccaccagttcctgagagagagagaggagcacctgctggagcagctggccaagctggagcaggagctgaccgagggcagagagaagttcaagagcagaggcgtgggcgagctggccagactggccctggtgatcagcgagctggagggcaaggcccagcagcccgccgccgagctgatgcaggacaccagagacttcctgaacagataccccagaaagaagttctgggtgggcaagcccatcgccagagtggtgaagaagaagaccggcgagttcagcgacaagctgctgagcctgcagagaggcctgagagagttccagggcaagctgctgagagacctggagtacaagaccgtgagcgtgaccctggacccccagagcgccagcggctacctgcagctgagcgaggactggaagtgcgtgacctacaccagcctgtacaagagcgcctacctgcacccccagcagttcgactgcgagcccggcgtgctgggcagcaagggcttcacctggggcaaggtgtactgggaggtggaggtggagagagagggctggagcgaggacgaggaggagggcgacgaggaggaggagggcgaggaggaggaggaggaggaggaggccggctacggcgacggctacgacgactgggagaccgacgaggacgaggagagcctgggcgacgaggaggaggaggaggaggaggaggaggaggaggtgctggagagctgcatggtgggcgtggccagagacagcgtgaagagaaagggcgacctgagcctgagacccgaggacggcgtgtgggccctgagactgagcagcagcggcatctgggccaacaccagccccgaggccgagctgttccccgccctgagacccagaagagtgggcatcgccctggactacgagggcggcaccgtgaccttcaccaacgccgagagccaggagctgatctacaccttcaccgccaccttcaccagaagactggtgcccttcctgtggctgaagtggcccggcaccagactgctgctgagaccctag

SEQ ID NO: 10019 - DNA, 1233 bp, synthetic construct
  source 1..1233: mol_type = other DNA; note = Synthetic coding sequence
atgttcaacaacgagctgatggccgacgtgcacttcgtggtgggcccccccggcgccaccagaaccgtgcccgcccacaagtacgtgctggccgtgggcagcagcgtgttctacgccatgttctacggcgacctggccgaggtgaagagcgagatccacatccccgacgtggagcccgccgccttcctgatcctgctgaagtacatgtacagcgacgagatcgacctggaggccgacaccgtgctggccaccctgtacgccgccaagaagtacatcgtgcccgccctggccaaggcctgcgtgaacttcctggagaccagcctggaggccaagaacgcctgcgtgctgctgagccagagcagactgttcgaggagcccgagctgacccagagatgctgggaggtgatcgacgcccaggccgagatggccctgagaagcgagggcttctgcgagatcgacagacagaccctggagatcatcgtgaccagagaggccctgaacaccaaggaggccgtggtgttcgaggccgtgctgaactgggccgaggccgagtgcaagagacagggcctgcccatcacccccagaaacaagagacacgtgctgggcagagccctgtacctggtgagaatccccaccatgaccctggaggagttcgccaacggcgccgcccagagcgacatcctgaccctggaggagacccacagcatcttcctgtggtacaccgccaccaacaagcccagactggacttccccctgaccaagagaaagggcctggccccccagagatgccacagattccagagcagcgcctacagaagcaaccagtggagatacagaggcagatgcgacagcatccagttcgccgtggacagaagagtgttcatcgccggcctgggcctgtacggcagcagcagcggcaaggccgagtacagcgtgaagatcgagctgaagagactgggcgtggtgctggcccagaacctgaccaagttcatgagcgacggcagcagcaacaccttccccgtgtggttcgagcaccccgtgcaggtggagcaggacaccttctacaccgccagcgccgtgctggacggcagcgagctgagctacttcggccaggagggcatgaccgaggtgcagtgcggcaaggtggccttccagttccagtgcagcagcgacagcaccaacggcaccggcgtgcagggcggccagatccccgagctgatcttctacgcctag

SEQ ID NO: 10020 - DNA, 966 bp, synthetic construct
  source 1..966: mol_type = other DNA; note = Synthetic coding sequence
atgagagccctggccgccctgagcgccccccccaacgagagactgctgcccagagaccccgccgccaccagagaccccgacgccgccagacccgccagaagaagcgccgtggagagactggccgccgacagagccaagtacgtgagaggcagacccggcaccggcagaggcgtggccagcgagggcagcggccccggcgccatcaagtgccccggcaacgaccccggcccccccgccagagcccccgcccccgtggccagaagagccatcgccagaaagcccctgagacccgacagcctgatcatctacagacagaagtgcgagttcgtgagaggcagcggcgccgacggccccagagccagcctggtgaagaagctgttccagggccccggcaaggacaaggcccccgtgcccagaaccggcgacgagggcaaggccggcaaccccgagaccgtgcccaccacccccggccccgccgccgaccccgccatccccgagacccccgcccccgccgccagaagcgccgcccccagcagcgtgcccgccgccccccccggccccgagcccagagtggtgagaagaagaggcctgcagagaagccagagcgacctgagcagcagatacagcgccgccctggccgagagcgacaccttcttccagtactgcggcctggaccccgaggtggtggaggccctgggcagagagaacttcaccgccggcagcgactgcgtgaccctgaaggtgagaagcgtgagcgtggccaccagcggcagcggcttcagcagacacagcggcggcgacgacgagggcctgcaggaggaggagctgatcgagcaggtgcccagcaccaccagcgtgatcgagagaaacgccagaatcatcaagtggctgtacacctgcaagaaggccaaggagacccccagccaggagcagagcagaaccagaggcagcaagcccagcagatag

SEQ ID NO: 10021 - DNA, 945 bp, synthetic construct
  source 1..945: mol_type = other DNA; note = Synthetic coding sequence
atgagcgagaacgccgcccccggcctgatcagcgagctgaagctggccgtgccctggggccacatcgccgccaaggcctggggcagcctgcagggcccccccgtgctgtgcctgcacggctggctggacaacgccagcagcttcgacagactgatccccctgctgccccaggacttctactacgtggccatggacttcggcggccacggcctgagcagccactacagccccggcgtgccctactacctgcagaccttcgtgagcgagatcagaagagtggtggccgccctgaagtggaacagattcagcatcctgggccacagcttcggcggcgtggtgggcggcatgttcttctgcaccttccccgagatggtggacaagctgatcctgctggacacccccctgttcctgctggagagcgacgagatggagaacctgctgacctacaagagaagagccatcgagcacgtgctgcaggtggaggccagccaggagcccagccacgtgttcagcctgaagcagctgctgcagagactgctgaagagcaacagccacctgagcgaggagtgcggcgagctgctgctgcagagaggcaccaccaaggtggccaccggcctggtgctgaacagagaccagagactggcctgggccgagaacagcatcgacttcatcagcagagagctgtgcgcccacagcatcagaaagctgcaggcccacgtgctgctgatcaaggccgtgcacggctacttcgacagcagacagaactacagcgagaaggagagcctgagcttcatgatcgacaccatgaagagcaccctgaaggagcagttccagttcgtggaggtgcccggcaaccactgcgtgcacatgagcgagccccagcacgtggccagcatcatcagcagcttcctgcagtgcacccacatgctgcccgcccagctgtag

SEQ ID NO: 10022 - DNA, 3945 bp, synthetic construct
  source 1..3945: mol_type = other DNA; note = Synthetic coding sequence
atggccagcaagggcgccggcatgagcttcagcagaaagagctacagactgaccagcgacgccgagaagagcagagtgaccggcatcgtgcaggagaagctgctgaacgactacctgaacagaatcttcagcagcagcgagcacgccccccccgccgccaccagcagaaagcccctgaacttccagaacctgcccgagcacctggaccagctgctgcaggtggacaacgaggaggaggagagccagggccaggtggagggcagactgggccccagcaccgtggtgctggaccacaccggcggcttcgagggcctgctgctggtggacgacgacctgctgggcgtgatcggccacagcaacttcggcaccatcagaagcaccacctgcgtgtacaagggcaagtggctgtacgaggtgctgatcagcagccagggcctgatgcagatcggctggtgcaccatcagctgcagattcaaccaggaggagggcgtgggcgacacccacaacagctacgcctacgacggcaacagagtgagaaagtggaacgtgaccaccaccaactacggcaaggcctgggccgccggcgacatcgtgagctgcctgatcgacctggacgacggcaccctgagcttctgcctgaacggcgtgagcctgggcaccgccttcgagaacctgagcagaggcctgggcatggcctacttccccgccatcagcctgagcttcaaggagagcgtggccttcaacttcggcagcagacccctgagataccccgtggccggctacagacccctgcaggacccccccagcgccgacctggtgagagcccagagactgctgggctgcttcagagccgtgctgagcgtggagctggaccccgtggagggcagactgctggacaaggagagcagcaagtggagactgagaggccagcccaccgtgctgctgaccctggcccacatcttccaccacttcgcccccctgctgagaaaggtgtacctggtggaggccgtgctgatgagcttcctgctgggcatcgtggagaagggcacccccacccaggcccagagcgtggtgcaccaggtgctggacctgctgtggctgttcatggaggactacgaggtgcaggactgcctgaagcagctgatgatgagcctgctgagactgtacagattcagccccatcgtgcccgacctgggcctgcagatccactacctgagactgaccatcgccatcctgagacacgagaagagcagaaagttcctgctgagcaacgtgctgttcgacgtgctgagaagcgtggtgttcttctacatcaagagccccctgagagtggaggaggccggcctgcaggagctgatccccaccacctggtggccccactgcagcagcagagagggcaaggagagcaccgagatgaaggaggagaccgccgaggagagactgagaagaagagcctacgagagaggctgccagagactgagaaagagaatcgaggtggtggaggagctgcaggtgcagatcctgaagctgctgctggacaacaaggacgacaacggcggcgaggccagcagatacatcttcctgaccaagttcagaaagttcctgcaggagaacgccagcggcagaggcaacatgcccatgctgtgcccccccgagtacatggtgtgcttcctgcacagactgatcagcgccctgagatactactgggacgagtacaaggccagcaacccccacgccagcttcagcgaggaggcctacatccccccccaggtgttctacaacggcaaggtggactacttcgacctgcagagactgggcggcctgctgagccacctgagaaagaccctgaaggacgacctggccagcaaggccaacatcgtgatcgaccccctggagctgcagagcaccgccatggacgacctggacgaggacgaggagcccgcccccgccatggcccagagacccatgcaggccctggccgtgggcggccccctgcccctgcccagacccggctggctgagcagccccaccctgggcagagccaacagattcctgagcaccgccgccgtgagcctgatgacccccagaagacccctgagcaccagcgagaaggtgaaggtgagaaccctgagcgtggagcagagaaccagagaggacatcgagggcagccactggaacgagggcctgctgctgggcagaccccccgaggagcccgagcagcccctgaccgagaacagcctgctggaggtgctggacggcgccgtgatgatgtacaacctgagcgtgcaccagcagctgggcaagatggtgggcgtgagcgacgacgtgaacgagtacgccatggccctgagagacaccgaggacaagctgagaagatgccccaagagaagaaaggacatcctggccgagctgaccaagagccagaaggtgttcagcgagaagctggaccacctgagcagaagactggcctgggtgcacgccaccgtgtacagccaggagaagatgctggacatctactggctgctgagagtgtgcctgagaaccatcgagcacggcgacagaaccggcagcctgttcgccttcatgcccgagttctacctgagcgtggccatcaacagctacagcgccctgaagaactacttcggccccgtgcacagcatggaggagctgcccggctacgaggagaccctgaccagactggccgccatcctggccaagcacttcgccgacgccagaatcgtgggcaccgacatcagagacagcctgatgcaggccctggccagctacgtgtgctacccccacagcctgagagccgtggagagaatccccgaggagcagagaatcgccatggtgagaaacctgctggccccctacgagcagagaccctgggcccagaccaactggatcctggtgagactgtggagaggctgcggcttcggctacagatacaccagactgccccacctgctgaagaccaagctggaggacgccaacctgcccagcctgcagaagccctgccccagcaccctgctgcagcagcacatggccgacctgctgcagcagggccccgacgtggcccccagcttcctgaacagcgtgctgaaccagctgaactgggccttcagcgagttcatcggcatgatccaggagatccagcaggccgccgagagactggagagaaacttcgtggacagcagacagctgaaggtgtgcgccacctgcttcgacctgagcgtgagcctgctgagagtgctggagatgaccatcaccctggtgcccgagatcttcctggactggaccagacccaccagcgagatgctgctgagaagactggcccagctgctgaaccaggtgctgaacagagtgaccgccgagagaaacctgttcgacagagtggtgaccctgagactgcccggcctggagagcgtggaccactaccccatcctggtggccgtgaccggcatcctggtgcagctgctggtgagaggccccgccagcgagagagagcaggccaccagcgtgctgctggccgacccctgcttccagctgagaagcatctgctacctgctgggccagcccgagccccccgcccccggcaccgccctgcccgcccccgacagaaagagattcagcctgcagagctacgccgactacatcagcgccgacgagctggcccaggtggagcagatgctggcccacctgaccagcgccagcgcccaggccgccgccgccagcctgcccaccagcgaggaggacctgtgccccatctgctacgcccaccccatcagcgccgtgttccagccctgcggccacaagagctgcaaggcctgcatcaaccagcacctgatgaacaacaaggactgcttcttctgcaagaccaccatcgtgagcgtggaggactgggagaagggcgccaacaccagcaccaccagcagcgccgcctag

SEQ ID NO: 10023 - DNA, 2646 bp, synthetic construct
  source 1..2646: mol_type = other DNA; note = Synthetic coding sequence
atggccggcgccgcccccagagtgagatacctggccggcttctgctgccccctgggcggcctggccgccggcaagcccagagtgctgtgccacgaggccgaggtgttcctgagcaccggcagcgagctggtgtacgtgtacgaccaggagggcggcctgctgaccgccgccttcagattccccgaccaggtgtggcacctggagctgctggcccccagaagactgctgtacgccctgtgcgccagaagaggcctgtactgcctgagcctggaccaccccggcagaagcagaagcaccagccaggacgacagagacagcgaggacggcgaccagcccagccccgtgatccccgtggaccccgacgcctgcatcctgcccgacgccgccctgtgcgccttcaccctgctggacagcgtgctggtgaccctggtgcagggccccgccagatggaagatgcagctgttcgagcagccctgccccggcgaggaccccagacccggcggccagatcggcgaggtggagctgagcagctacaccccccccgccggcgtgcccggcaagcccgccgccccccacttcctgcccgtgctgtgcagcgtgagccccagcggcagcagagtgccccacgacctgctgggcggcagcggcggcttcaccctggaggacgccctgttcggcctgctgttcggcgccgacgccaccctgctgcagagccccgtggtgctgtgcggcctgcccgacggccagctgtgctgcgtgatcctgaaggccctggtgaccagcagaagcgcccccggcgaccccaacgccctggtgaagatcctgcaccacctggaggagcccgtgatcttcatcggcgccctgaagaccgagccccaggccgccgaggccgccgagaacttcctgcccgacgaggacgtgcactgcgactgcctggtggccttcggccaccacggcagaatgctggccatcaaggccagctgggacgagagcggcaagctggtgcccgagctgagagagtactgcctgcccggccccgtgctgtgcgccgcctgcggcggcggcggcagagtgtaccacagcacccccagcgacctgtgcgtggtggacctgagcagaggcagcacccccctgggccccgagcagcccgaggagggccccggcggcctgccccccatgctgtgccccgccagcctgaacatctgcagcgtggtgagcctgagcgccagccccagaacccacgagggcggcaccaagctgctggccctgagcgccaagggcagactgatgacctgcagcctggacctggacagcgagatgcccggccccgccagaatgaccaccgagagcgccggccagaagatcaaggagctgctgagcggcatcggcaacatcagcgagagagtgagcttcctgaagaaggccgtggaccagagaaacaaggccctgaccagcctgaacgaggccatgaacgtgagctgcgccctgctgagcagcggcaccggccccagacccatcagctgcaccaccagcaccacctggagcagactgcagacccaggacgtgctgatggccacctgcgtgctggagaacagcagcagcttcagcctggaccagggctggaccctgtgcatccaggtgctgaccagcagctgcgccctggacctggacagcgcctgcagcgccatcacctacaccatccccgtggaccagctgggccccggcgccagaagagaggtgaccctgcccctgggccccggcgagaacggcggcctggacctgcccgtgaccgtgagctgcaccctgttctacagcctgagagaggtggtgggcggcgccctggcccccagcgacagcgaggaccccttcctggacgagtgccccagcgacgtgctgcccgagcaggagggcgtgtgcctgcccctgagcagacacaccgtggacatgctgcagtgcctgagattccccggcctggcccccccccacaccagagcccccagccccctgggccccaccagagaccccgtggccaccttcctggagacctgcagagagcccggcagccagcccgccggccccgccagcctgagagccgagtacctgccccccagcgtggccagcatcaaggtgagcgccgagctgctgagagccgccctgaaggacggccacagcggcgtgcccctgtgctgcgccaccctgcagtggctgctggccgagaacgccgccgtggacgtggtgagagccagagccctgagcagcatccagggcgtggcccccgacggcgccaacgtgcacctgatcgtgagagaggtggccatgaccgacctgtgccccgccggccccatccaggccgtggagatccaggtggagagcagcagcctggccgacatctgcagagcccaccacgccgtggtgggcagaatgcagaccatggtgaccgagcaggccacccagggcagcagcgcccccgacctgagagtgcagtacctgagacagatccacgccaaccacgagaccctgctgagagaggtgcagaccctgagagacagactgtgcaccgaggacgaggccagcagctgcgccaccgcccagagactgctgcaggtgtacagacagctgagacaccccagcctgatcctgctgtag

SEQ ID NO: 10024 - DNA, 471 bp, synthetic construct
  source 1..471: mol_type = other DNA; note = Synthetic coding sequence
atgggcgacaagaagagccccaccagacccaagagacagcccaagcccagcagcgacgagggctactgggactgcagcgtgtgcaccttcagaaacagcgccgaggccttcaagtgcatgatgtgcgacgtgagaaagggcaccagcaccagaaaggagaagaaggacaaggtggagaaggagaagagcgagaaggagaccaccagcaagaagaacagccacaagaagaccagacccagactgaagaacgtggacagaagcagcgcccagcacctggaggtgaccgtgggcgacctgaccgtgatcatcaccgacttcaaggagaagaccaagagcccccccgccagcagcgccgccagcgccgaccagcacagccagagcggcagcagcagcgacaacaccgagagaggcatgagcagaagcagcagccccagaggcgaggccagcagcctgaacggcgagagccactag

SEQ ID NO: 10025 - DNA, 777 bp, synthetic construct
  source 1..777: mol_type = other DNA; note = Synthetic coding sequence
atgtgcgccctggagatggccgtgctggagatccagaccaacggcgacaccagagtgaccgaggaggccatcgccagagccagacacagcctgagcgaccccaacatgagagagttcatcctgtgctgcctggccagagaccccgccagaagacccagcgcccacagcctgctgttccacagagtgctgttcgaggtgcacagcctgaagctgctggccgcccactgcttcatccagcaccagtacctgatgcccgagaacgtggtggaggagaagaccaaggccatggacctgcacgccgtgctggccgagctgcccagacccagaagaccccccctgcagtggagatacagcgaggtgagcttcatggagctggacaagttcctggaggacgtgagaaacggcatctaccccctgatgaacttcgccgccaccagacccctgggcctgcccagagtgctggcccccccccccgaggaggtgcagaaggccaagacccccacccccgagcccttcgacagcgagaccagaaaggtgatccagatgcagtgcaacctggagagaagcgaggacaaggccagatggcacctgaccctgctgctggtgctggaggacagactgcacagacagctgacctacgacctgctgcccaccgacagcgcccaggacctggccagcgagctggtgcactacggcttcctgcacgaggacgacagaatgaagctggccgccttcctggagagcaccttcctgaagtacagaggcacccaggcctag

SEQ ID NO: 10026 - DNA, 564 bp, synthetic construct
  source 1..564: mol_type = other DNA; note = Synthetic coding sequence
atgctgggcagatacagagagtacagcaacggccaggccggcgccatcgagcacctgaaggagagcctggagcagagcatcgaccagctgagaagccagagactgctgagaaacagcggcggcagaagcatcagcgtgaccagcctgagcgccagcgacctggacggcggcaccggcagcgagctgcaccacttcccccccaccagccccctgaaggactacggcgacccccagggcatcaagagaatgagaagcagaaccggcgtgagattcgtgcaggagaccgacgacatgacccagctgcacggcttccaccagagcctgagagacctgagcagcgagcagatcagactgggcgacgacttcaacagagagctgagcagaagaagcagaagcgacgccgagaccaagagagccctggaggagctgaccgagaagctgaacgaggcccagaagcaggaggtgttcttcgtgaagagcctgggcaaggtgaagatccagtgcctgagcagcgccgaggtggacaacgtgttccccatcaacgtgtggcagtgcggcatctag

SEQ ID NO: 10027 - DNA, 927 bp, synthetic construct
  source 1..927: mol_type = other DNA; note = Synthetic coding sequence
atgatggacgtgagcggcgtgggcttccccagcaaggtgccctggaagaagatgagcgccgaggagctggagaaccagtactgccccagcagatgggtggtgagactgggcgccgaggaggccctgagaacctacagccagatcggcatcgaggccaccaccagagccagagccaccagaaagagcctgctgcacgtgccctacggcgacggcgagggcgagaaggtggacatctacttccccgacgagagcagcgaggccctgcccttcttcctgttcttccacggcggctactggcagagcggcagcaaggacgagagcgccttcatggtgcaccccctgaccgcccagggcgtggccgtggtgatcgtggcctacggcatcgcccccaagggcaccctggaccacatggtggaccaggtgaccagaagcgtggccttcgtgcagaagagataccccagcaacaagggcatctacctgtgcggccacagcgccggcgcccacctggccgccatgatgctgctggccgactggaccaagcacggcgtgacccccaacctgagaggcttcttcctggtgagcggcgtgttcgacctggagcccatcgtgtacaccagccagaacgtggccctgcagctgaccctggaggacgcccagagaaacagcccccagctgaaggtggcccaggcccagcccgtggaccccacctgcagagtgctggtggtggtgggccagttcgacagccccgagttccacagacagagctgggagttctaccaggtgctgcccgtgcagaccctgtgccagggcgagtggaaggccagcttcgaggagctgcacgacgtggaccacttcgagatcgtggagaacctgacccagaaggacaacgtgctgacccagatcatcctgaagaccatcttccagtag

SEQ ID NO: 10028 - DNA, 1461 bp, synthetic construct
  source 1..1461: mol_type = other DNA; note = Synthetic coding sequence
atgagcggcagcacccccttccagatgagactggtgcacctggacctgaagggcgccccccccaaggtgagctacctgagcgagatcttccccctgttcagagccctgggcgccaacggcctgctgatcgagtacgaggacatgttcccctacgagggccccctgagactgctgagagccaagtacgcctacagccccagcgagatcaaggagatcctgcacctggccggcctgaacgagctggaggtgatccccctggtgcagaccttcggccacatggagttcgtgctgaagcacaccgccttcgcccacctgagagaggtgggcagcttcccctgcaccctgaacccccacgaggccgagagcctggccctggtgggcgccatgatcgaccaggtgctggagctgcaccccggcgcccagagactgcacatcggctgcgacgaggtgtactacctgggcgagggcgaggccagcagaagatggctgcagcaggagcagaacagcaccggcaagctgtgcctgagccacatgagagccgtggccagcggcgtgaaggccagaagacccagcgtgacccccctggtgtgggacgacatgctgagagacctgcccgaggaccagctggccgccagcggcgtgccccagctggtggagcccgtgctgtgggactacaccgccgacctggacgtgcacggcaaggtgctgctgatgcagaagtacagaagatgcggcttcccccagctgtgggccgccagcgccttcaagggcgccaccggccccagccaggccgtgccccccgtggagcaccacctgagaaaccacgtgcagtggctgcaggtggccggcagcggccccaccgacagcctgcagggcatcatcctgaccggctggcagagatacgaccactacagcgtgctgtgcgagctgctgcccgccggcgtgcccagcctggccgcctgcctgcagctgctgctgagaggcggcttcgacgaggacgtgaaggccaaggtggagaacctgctgggcatcagcagcctggagaagaccgaccccgtgagagagggcgccggcagcttccccggcagcaacatcctggccctggtgacccaggtgagcctgcacctgagaagcagcgtggacgccctgctggagggcaacagatacgtgaccggctggttcagcccctaccacagacagagaaagctgatccaccccgtgatggtgcagcacatccagcccgccgccctgagcctgctggcccagtggagcaccctggtgcaggagctggaggccgccctgcagctggccttctaccccgacgccgtggaggagtggctggaggagaacgtgcaccccagcctgcagagactgcaggccctgctgcaggacctgagcgaggtgagcgccccccccctgccccccaccagccccggcagagacgtggcccaggacccctag

SEQ ID NO: 10029 - DNA, 240 bp, synthetic construct
  source 1..240: mol_type = other DNA; note = Synthetic coding sequence
atgagcagccagcagcagcagagacagcagcagcagtgccccccccagagagcccagcagcagcaggtgaagcagccctgccagcccccccccgtgaagtgccaggagacctgcgcccccaagaccaaggacccctgcgccccccaggtgaagaagcagtgcccccccaagggcaccatcatccccgcccagcagaagtgccccagcgcccagcaggccagcaagagcaagcagaagtag

SEQ ID NO: 10030 - DNA, 822 bp, synthetic construct
  source 1..822: mol_type = other DNA; note = Synthetic coding sequence
atgggccagaaggtgaccggcggcatcaagaccgtggacatgagagaccccacctacagacccctgaagcaggagctgcagggcctggactactgcaagcccaccagactggacctgctgctggacatgccccccgtgagctacgacgtgcagctgctgcacagctggaacaacaacgacagaagcctgaacgtgttcgtgaaggaggacgacaagctgatcttccacagacaccccgtggcccagagcaccgacgccatcagaggcaaggtgggctacaccagaggcctgcacgtgtggcagatcacctgggccatgagacagagaggcacccacgccgtggtgggcgtggccaccgccgacgcccccctgcacagcgtgggctacaccaccctggtgggcaacaaccacgagagctggggctgggacctgggcagaaacagactgtaccacgacggcaagaaccagcccagcaagacctaccccgccttcctggagcccgacgagaccttcatcgtgcccgacagcttcctggtggccctggacatggacgacggcaccctgagcttcatcgtggacggccagtacatgggcgtggccttcagaggcctgaagggcaagaagctgtaccccgtggtgagcgccgtgtggggccactgcgagatcagaatgagatacctgaacggcctggaccccgagcccctgcccctgatggacctgtgcagaagaagcgtgagactggccctgggcagagagagactgggcgagatccacaccctgcccctgcccgccagcctgaaggcctacctgctgtaccagtag

SEQ ID NO: 10031 - DNA, 3315 bp, synthetic construct
  source 1..3315: mol_type = other DNA; note = Synthetic coding sequence
atgggcaacgccgccggcagcgccgagcagcccgccggccccgccgcccccccccccaagcagcccgccccccccaagcagcccatgcccgccgccggcgagctggaggagagattcaacagagccctgaactgcatgaacctgccccccgacaaggtgcagctgctgagccagtacgacaacgagaagaagtgggagctgatctgcgaccaggagagattccaggtgaagaacccccccgccgcctacatccagaagctgaagagctacgtggacaccggcggcgtgagcagaaaggtggccgccgactggatgagcaacctgggcttcaagagaagagtgcaggagagcacccaggtgctgagagagctggagaccagcctgagaaccaaccacatcggctgggtgcaggagttcctgaacgaggagaacagaggcctggacgtgctgctggagtacctggccttcgcccagtgcagcgtgacctacgacatggagagcaccgacaacggcgccagcaacagcgagaagaacaagcccctggagcagagcgtggaggacctgagcaagggcccccccagcagcgtgcccaagagcagacacctgaccatcaagctgacccccgcccacagcagaaaggccctgagaaacagcagaatcgtgagccagaaggacgacgtgcacgtgtgcatcatgtgcctgagagccatcatgaactaccagagcggcttcagcctggtgatgaaccaccccgcctgcgtgaacgagatcgccctgagcctgaacaacaagaaccccagaaccaaggccctggtgctggagctgctggccgccgtgtgcctggtgagaggcggccacgacatcatcctggccgccttcgacaacttcaaggaggtgtgcggcgagcagcacagattcgagaagctgatggagtacttcagaaacgaggacagcaacatcgacttcatggtggcctgcatgcagttcatcaacatcgtggtgcacagcgtggagaacatgaacttcagagtgttcctgcagtacgagttcacccacctgggcctggacctgtacctggagagactgagactgaccgagagcgacaagctgcaggtgcagatccaggcctacctggacaacatcttcgacgtgggcgccctgctggaggacaccgagaccaagaacgccgtgctggagcacatggaggagctgcaggagcaggtggccctgctgaccgagagactgagagacgccgagaacgagagcatggccaagatcgccgagctggagaagcagctgagccaggccagaaaggagctggagaccctgagagagagattcagcgagagcaccgccatgggccccagcagaagaccccccgagcccgagaaggccccccccgccgcccccaccagacccagcgccctggagctgaaggtggaggagctggaggagaagggcctgatcagaatcctgagaggccccggcgacgccgtgagcatcgagatcctgcccgtggccgtggccacccccagcggcggcgacgcccccacccccggcgtgcccaccggcagccccagccccgacctggcccccgccgccgagcccgcccccggcgccgccccccccccccccccccccctgcccggcctgcccagcccccaggaggccccccccagcgcccccccccaggccccccccctgcccggcagccccgagcccccccccgccccccccctgcccggcgacctgcccccccccccccccccccccccccccccccccggcaccgacggccccgtgcccccccccccccccccccccccccccccccccggcggcccccccgacgccctgggcagaagagacagcgagctgggccccggcgtgaaggccaagaagcccatccagaccaagttcagaatgcccctgctgaactgggtggccctgaagcccagccagatcaccggcaccgtgttcaccgagctgaacgacgagaaggtgctgcaggagctggacatgagcgacttcgaggagcagttcaagaccaagagccagggccccagcctggacctgagcgccctgaagagcaaggccgcccagaaggcccccagcaaggccaccctgatcgaggccaacagagccaagaacctggccatcaccctgagaaagggcaacctgggcgccgagagaatctgccaggccatcgaggcctacgacctgcaggccctgggcctggacttcctggagctgctgatgagattcctgcccaccgagtacgagagaagcctgatcaccagattcgagagagagcagagacccatggaggagctgagcgaggaggacagattcatgctgtgcttcagcagaatccccagactgcccgagagaatgaccaccctgaccttcctgggcaacttccccgacaccgcccagctgctgatgccccagctgaacgccatcatcgccgccagcatgagcatcaagagcagcgacaagctgagacagatcctggagatcgtgctggccttcggcaactacatgaacagcagcaagagaggcgccgcctacggcttcagactgcagagcctggacgccctgctggagatgaagagcaccgacagaaagcagaccctgctgcactacctggtgaaggtgatcgccgagaagtacccccagctgaccggcttccacagcgacctgcacttcctggacaaggccggcagcgtgagcctggacagcgtgctggccgacgtgagaagcctgcagagaggcctggagctgacccagagagagttcgtgagacaggacgactgcatggtgctgaaggagttcctgagagccaacagccccaccatggacaagctgctggccgacagcaagaccgcccaggaggccttcgagagcgtggtggagtacttcggcgagaaccccaagaccaccagccccggcctgttcttcagcctgttcagcagattcatcaaggcctacaagaaggccgagcaggaggtggagcagtggaagaaggaggccgccgcccaggaggccggcgccgacacccccggcaagggcgagccccccgcccccaagagcccccccaaggccagaagaccccagatggacctgatcagcgagctgaagagaagacagcagaaggagcccctgatctacgagagcgacagagacggcgccatcgaggacatcatcaccgacctgagaaaccagccctacatcagagccgacaccggcagaagaagcgccagaagaagaccccccggcccccccctgcaggtgaccagcgacctgagcctgtag

SEQ ID NO: 10032 - DNA, 603 bp, synthetic construct
  source 1..603: mol_type = other DNA; note = Synthetic coding sequence
atggaggagaagcccagcaaggtgagcctgaagagcagcgacagacagggcagcgacgaggagagcgtgcacagcgacaccagagacctgtggaccaccaccaccctgagccaggcccagctgaacatgcccctgagcgaggtgtgcgagggcttcgacgaggagggcagaaacatcagcaagaccagaggctggcacagccccggcagaggcagcctggacgagggctacaaggccagccacaagcccgaggagctggacgagcacgccctggtggagctggagctgcacagaggcagcagcatggagatcaacctgggcgagaaggacaccgccagccagatcgaggccgagaagagcagcagcatgagcagcctgaacatcgccaagcacatgccccacagagcctactgggccgagcagcagagcagactgcccctgcccctgatggagctgatggagaacgaggccctggagatcctgaccaaggccctgagaagctaccagctgggcatcggcagagaccacttcctgaccaaggagctgcagagatacatcgagggcctgaagaagagaagaagcaagagactgtacgtgaactag

SEQ ID NO: 10033 - DNA, 1044 bp, synthetic construct
  source 1..1044: mol_type = other DNA; note = Synthetic coding sequence
atgaagctgaccagcgagaagctgcccaagaaccccttctacgccagcgtgagccagtacgccgccaagaaccagaagttcttccagtggaagaaggagaagaccgactacacccacgccaacctggtggacaaggccctgcagctgctgaaggagagaatcctgaagggcgacaccctggcctacttcctgagaggccagctgtacttcgaggagggctggtacgaggaggccctggagcagttcgaggagatcaaggagaaggaccaccaggccacctaccagctgggcgtgatgtactacgacggcctgggcaccaccctggacgccgagaagggcgtggactacatgaagaagatcctggacagcccctgccccaaggccagacacctgaagttcgccgccgcctacaacctgggcagagcctactacgagggcaagggcgtgaagagaagcaacgaggaggccgagagactgtggctgatcgccgccgacaacggcaaccccaaggccagcgtgaaggcccagagcatgctgggcctgtactacagcaccaaggagcccaaggagctggagaaggccttctactggcacagcgaggcctgcggcaacggcaacctggagagccagggcgccctgggcctgatgtacctgtacggccagggcatcagacaggacaccgaggccgccctgcagtgcctgagagaggccgccgagagaggcaacgtgtacgcccagggcaacctggtggagtactactacaagatgaagttcttcaccaagtgcgtggccttcagcaagagaatcgccgactacgacgaggtgcacgacatccccatgatcgcccaggtgaccgactgcctgcccgagttcatcggcagaggcatggccatggccagcttctaccacgccagatgcctgcagctgggcctgggcatcaccagagacgagaccaccgccaagcactactacagcaaggcctgcagactgaaccccgccctggccgacgagctgcacagcctgctgatcagacagagaatctag

SEQ ID NO: 10034 - DNA, 3525 bp, synthetic construct
  source 1..3525: mol_type = other DNA; note = Synthetic coding sequence
atgcccctgcccttcggcctgaagctgaagagaaccagaagatacaccgtgagcagcaagagctgcctggtggccagaatccagctgctgaacaacgagttcgtggagttcaccctgagcgtggagagcaccggccaggagagcctggaggccgtggcccagagactggagctgagagaggtgacctacttcagcctgtggtactacaacaagcagaaccagagaagatgggtggacctggagaagcccctgaagaagcagctggacaagtacgccctggagcccaccgtgtacttcggcgtggtgttctacgtgcccagcgtgagccagctgcagcaggagatcaccagataccagtactacctgcagctgaagaaggacatcctggagggcagcatcccctgcaccctggagcaggccatccagctggccggcctggccgtgcaggccgacttcggcgacttcgaccagtacgagagccaggacttcctgcagaagttcgccctgttccccgtgggctggctgcaggacgagaaggtgctggaggaggccacccagaaggtggccctgctgcaccagaagtacagaggcctgaccgcccccgacgccgagatgctgtacatgcaggaggtggagagaatggacggctacggcgaggagagctaccccgccaaggacagccagggcagcgacatcagcatcggcgcctgcctggagggcatcttcgtgaagcacaagaacggcagacaccccgtggtgttcagatggcacgacatcgccaacatgagccacaacaagagcttcttcgccctggagctggccaacaaggaggagaccatccagttccagaccgaggacatggagaccgccaagtacatctggagactgtgcgtggccagacacaagttctacagactgaaccagtgcaacctgcagacccagaccgtgaccgtgaaccccatcagaagaagaagcagcagcagaatgagcctgcccaagccccagccctacgtgatgcccccccccccccagctgcactacaacggccactacaccgagccctacgccagcagccaggacaacctgttcgtgcccaaccagaacggctactactgccacagccagaccagcctggacagagcccagatcgacctgaacggcagaatcagaaacggcagcgtgtacagcgcccacagcaccaacagcctgaacaacccccagccctacctgcagcccagccccatgagcagcaaccccagcatcaccggcagcgacgtgatgagacccgactacctgcccagccacagacacagcgccgtgatcccccccagctacagacccacccccgactacgagaccgtgatgaagcagctgaacagaggcctggtgcacgccgagagacagagccacagcctgagaaacctgaacatcggcagcagctacgcctacagcagacccgccgccctggtgtacagccagcccgagatcagagagcacgcccagctgcccagccccgccgccgcccactgccccttcagcctgagctacagcttccacagccccagcccctacccctaccccgccgagagaagacccgtggtgggcgccgtgagcgtgcccgagctgaccaacgcccagctgcaggcccaggactaccccagccccaacatcatgagaacccaggtgtacagacccccccccccctaccccccccccagacccgccaacagcacccccgacctgagcagacacctgtacatcagcagcagcaaccccgacctgatcaccagaagagtgcaccacagcgtgcagaccttccaggaggacagcctgcccgtggcccacagcctgcaggaggtgagcgagcccctgaccgccgccagacacgcccagctgcacaagagaaacagcatcgaggtggccggcctgagccacggcctggagggcctgagactgaaggagagaaccctgagcgccagcgccgccgaggtggcccccagagccgtgagcgtgggcagccagcccagcgtgttcaccgagagaacccagagagagggccccgaggaggccgagggcctgagatacggccacaagaagagcctgagcgacgccaccatgctgatccacagcagcgaggaggaggaggacgaggacttcgaggaggagagcggcgccagagccccccccgccagagccagagagcccagacccggcctggcccaggacccccccggctgccccagagtgctgctggccggccccctgcacatcctggagcccaaggcccacgtgcccgacgccgagaagagaatgatggacagcagccccgtgagaaccaccgccgaggcccagagaccctggagagacggcctgctgatgcccagcatgagcgagagcgacctgaccaccagcggcagatacagagccagaagagacagcctgaagaagagacccgtgagcgacctgctgagcggcaagaagaacatcgtggagggcctgccccccctgggcggcatgaagaagaccagagtggacgccaagaagatcggccccctgaagctggccgccctgaacggcctgagcctgagcagagtgcccctgcccgacgagggcaaggaggtggccaccagagccaccaacgacgagagatgcaagatcctggagcagagactggagcagggcatggtgttcaccgagtacgagagaatcctgaagaagagactggtggacggcgagtgcagcaccgccagactgcccgagaacgccgagagaaacagattccaggacgtgctgccctacgacgacgtgagagtggagctggtgcccaccaaggagaacaacaccggctacatcaacgccagccacatcaaggtgagcgtgagcggcatcgagtgggactacatcgccacccagggccccctgcagaacacctgccaggacttctggcagatggtgtgggagcagggcatcgccatcatcgccatggtgaccgccgaggaggagggcggcagagagaagagcttcagatactggcccagactgggcagcagacacaacaccgtgacctacggcagattcaagatcaccaccagattcagaaccgacagcggctgctacgccaccaccggcctgaagatgaagcacctgctgaccggccaggagagaaccgtgtggcacctgcagtacaccgactggcccgagcacggctgccccgaggacctgaagggcttcctgagctacctggaggagatccagagcgtgagaagacacaccaacagcaccagcgacccccagagccccaacccccccctgctggtgcactgcagcgccggcgtgggcagaaccggcgtggtgatcctgagcgagatcatgatcgcctgcctggagcacaacgaggtgctggacatccccagagtgctggacatgctgagacagcagagaatgatgctggtgcagaccctgtgccagtacaccttcgtgtacagagtgctgatccagttcctgaagagcagcagactgatctag

SEQ ID NO: 10035 - DNA, 2235 bp, synthetic construct
  source 1..2235: mol_type = other DNA; note = Synthetic coding sequence
atggccgccgacaagcccgccgaccagggcgccgagaagcacgagggcaccggccagagcagcggcatcaccgaccaggagaaggagctgagcaccaacgccttccaggccttcaccagcggcaactacgacgcctgcctgcagcacctggcctgcctgcaggacatcaacaaggacgactacaagatcatcctgaacaccgccgtggccgagttcttcaagagcaaccagaccaccaccgacaacctgagacagaccctgaaccagctgaagaaccaggtgcacagcgccgtggaggagatggacggcctggacgacgtggagaacagcatgctgtactacaaccaggccgtgatcctgtaccacctgagacagtacaccgaggccatcagcgtgggcgagaagctgtaccagttcatcgagcccttcgaggagaagttcgcccaggccgtgtgcttcctgctggtggacctgtacatcctgacctaccaggccgagaaggccctgcacctgctggccgtgctggagaagatgatcagccagggcaacaacaacaagaacggcaagaacgagaccggcaacaacaacaacaaggacggcagcaaccacaaggccgagagcggcgccctgatcgaggccgccaagagcaagatccaccagtacaaggtgagagcctacatccagatgaagagcctgaaggcctgcaagagagagatcaagagcgtgatgaacaccgccggcaacagcgcccccagcctgttcctgaagagcaacttcgagtacctgagaggcaactacagaaaggccgtgaagctgctgaacagcagcaacatcgccgagcaccccggcttcatgaagaccggcgagtgcctgagatgcatgttctggaacaacctgggctgcatccacttcgccatgagcaagcacaacctgggcatcttctacttcaagaaggccctgcaggagaacgacaacgtgtgcgcccagctgagcgccggcagcaccgaccccggcaagaagttcagcggcagacccatgtgcaccctgctgaccaacaagagatacgagctgctgtacaactgcggcatccagctgctgcacatcggcagacccctggccgccttcgagtgcctgatcgaggccgtgcaggtgtaccacgccaaccccagactgtggctgagactggccgagtgctgcatcgccgccaacaagggcaccagcgagcaggagaccaagggcctgcccagcaagaagggcatcgtgcagagcatcgtgggccagggctaccacagaaagatcgtgctggccagccagagcatccagaacaccgtgtacaacgacggccagagcagcgccatccccgtggccagcatggagttcgccgccatctgcctgagaaacgccctgctgctgctgcccgaggagcagcaggaccccaagcaggagaacggcgccaagaacagcaaccagctgggcggcaacaccgagagcagcgagagcagcgagacctgcagcagcaagagccacgacggcgacaagttcatccccgccccccccagcagccccctgagaaagcaggagctggagaacctgaagtgcagcatcctggcctgcagcgcctacgtggccctggccctgggcgacaacctgatggccctgaaccacgccgacaagctgctgcagcagcccaagctgagcggcagcctgaagttcctgggccacctgtacgccgccgaggccctgatcagcctggacagaatcagcgacgccatcacccacctgaaccccgagaacgtgaccgacgtgagcctgggcatcagcagcaacgagcaggaccagggcagcgacaagggcgagaacgaggccatggagagcagcggcaagagagccccccagtgctaccccagcagcgtgaacagcgccagaaccgtgatgctgttcaacctgggcagcgcctactgcctgagaagcgagtacgacaaggccagaaagtgcctgcaccaggccgccagcatgatccaccccaaggaggtgccccccgaggccatcctgctggccgtgtacctggagctgcagaacggcaacacccagctggccctgcagatcatcaagagaaaccagctgctgcccgccgtgaagacccacagcgaggtgagaaagaagcccgtgttccagcccgtgcaccccatccagcccatccagatgcccgccttcaccaccgtgcagagaaagtag

SEQ ID NO: 10036 - DNA, 363 bp, synthetic construct
  source 1..363: mol_type = other DNA; note = Synthetic coding sequence
atgcacccccccccccccgccgccgccatggacttcagccagaacagcctgttcggctacatggaggacctgcaggagctgaccatcatcgagagacccgtgagaagaagcctgaagacccccgaggagatcgagagactgaccgtggacgaggacctgagcgacatcgagagagccgtgtacctgctgagcgccggccaggacgtgcagggcaccagcgtgatcgccaacctgcccttcctgatgagacagaaccccaccgagaccctgagaagagtgctgcccaaggtgagagtgcacgaggacgcccacctgttcatccagagagtgtggatcagccacatgttcgtgcagagagtgtag

SEQ ID NO: 10037 - DNA, 1335 bp, synthetic construct
  source 1..1335: mol_type = other DNA; note = Synthetic coding sequence
atgagagagatcgtgctgacccagatcggccagtgcggcaaccagatcggcgccaagttctgggaggtgatcagcgacgagcacgccatcgacagcgccggcacctaccacggcgacagccacctgcagctggagagaatcaacgtgtactacaacgaggccagcggcggcagatacgtgcccagagccgtgctggtggacctggagcccggcaccatggacagcgtgagaagcggccccttcggccaggtgttcagacccgacaacttcatcttcggccagtgcggcgccggcaacaactgggccaagggccactacaccgagggcgccgagctgatggagagcgtgatggacgtggtgagaaaggaggccgagagctgcgactgcctgcagggcttccagctgacccacagcctgggcggcggcaccggcagcggcatgggcaccctgctgctgagcaagatcagagaggagtaccccgacagaatcatcaacaccttcagcatcctgcccagccccaaggtgagcgacaccgtggtggagccctacaacgccaccctgagcgtgcaccagctgatcgagaacgccgacgagaccttctgcatcgacaacgaggccctgtacgacatctgcagcaagaccctgaagctgcccacccccacctacggcgacctgaaccacctggtgagcgccaccatgagcggcgtgaccacctgcctgagattccccggccagctgaacgccgacctgagaaagctggccgtgaacatggtgcccttccccagactgcacttcttcatgcccggcttcgcccccctgaccagcagaggcagccagcagtacagagccctgaccgtggccgagctgacccagcagatgttcgacgccaagaacatgatggccgcctgcgaccccagacacggcagatacctgaccgccgccgccatcttcagaggcagaatgcccatgagagaggtggacgagcagatgttcaacatccaggacaagaacagcagctacttcgccgactggctgcccaacaacgtgaagaccgccgtgtgcgacatcccccccagaggcctgaagatgagcgccaccttcatcggcaacaacaccgccatccaggagctgttcaagagagtgagcgagcagttcaccgccatgttcagaagaaaggccttcctgcactggtacaccggcgagggcatggacgagatggagttcaccgaggccgagagcaacatgaacgacctggtgagcgagtaccagcagtaccaggacgccaccgccgaggaggaggaggacgaggagtacgccgaggaggaggtggcctag

SEQ ID NO: 10038 - DNA, 915 bp, synthetic construct
  source 1..915: mol_type = other DNA; note = Synthetic coding sequence
atggccaagatcgagaagaacgcccccaccatggagaagaagcccgagctgttcaacatcatggaggtggacggcgtgcccaccctgatcctgagcaaggagtggtgggagaaggtgtgcaacttccaggccaagcccgacgacctgatcctggccacctaccccaagagcggcaccacctggatgcacgagatcctggacatgatcctgaacgacggcgacgtggagaagtgcaagagagcccagaccctggacagacacgccttcctggagctgaagttcccccacaaggagaagcccgacctggagttcgtgctggagatgagcagcccccagctgatcaagacccacctgcccagccacctgatcccccccagcatctggaaggagaactgcaagatcgtgtacgtggccagaaaccccaaggactgcctggtgagctactaccacttccacagaatggccagcttcatgcccgacccccagaacctggaggagttctacgagaagttcatgagcggcaaggtggtgggcggcagctggttcgaccacgtgaagggctggtgggccgccaaggacatgcacagaatcctgtacctgttctacgaggacatcaagaaggaccccaagagagagatcgagaagatcctgaagttcctggagaaggacatcagcgaggagatcctgaacaagatcatctaccacaccagcttcgacgtgatgaagcagaaccccatgaccaactacaccaccctgcccaccagcatcatggaccacagcatcagccccttcatgagaaagggcatgcccggcgactggaagaactacttcaccgtggcccagaacgaggagttcgacaaggactaccagaagaagatggccggcagcaccctgaccttcagaaccgagatctag

SEQ ID NO: 10039 - DNA, 216 bp, synthetic construct
  source 1..216: mol_type = other DNA; note = Synthetic coding sequence
atgtgcggcagctactacggcaactactacggcacccccggctacggcttctgcggctacggcggcctgggctacggctacggcggcctgggctgcggctacggcagctgctgcggctgcggcttcagaagactgggctgcggctacggctacggcagcagaagcctgtgcggctacggctacggctgcggcagcggcagcggctactactactag

SEQ ID NO: 10040 - DNA, 2094 bp, synthetic construct
  source 1..2094: mol_type = other DNA; note = Synthetic coding sequence
atggacaagaagagcaccgccgagaagctgggcaaggagctgggcctgcaggccaaggagctgagcgccgtgcacagcagccaccacgagatcggcgtgaacgacagcaacctgttcagcctggagatgagagagcccctggagagcagcaacaccaagagcttccacagcgccgtggagatcaagaacagaagccagcacgagctgccctgcttccagcaccacggcatcgacacccccaccagcctgcagaagagaagcgcctgctgcccccccagcctgctgagactggaggagaccgccagcagcagccaggacggcgacccccagatctgggacgacctgcccttcagcgagagcctgaacaagttcctggccgtgctggagagcgagatcgccgtgacccaggccgacgtgagcagcagaaagcaccacgtggacaacgacatcgacaagttccacgccgaccacagcagactgagcgtgaccccccagagaaccaccggcgccctgcacaccccccccatcgccctgagaagcagccaggtgatcgtgaaggccaactgcagcaaggacgacttcctgttcaactgcaagggcaacctgagccccagcgtggagaaggagagccagcccgacaacaaggtggaggccgtgagcgtgaaccacaacggcagagacatgagcgagtacttcctgcccaacccctacctgagcgccctgagcagcagcagcaaggacctggagaccatcgtgaccctgaagaagaccatcagaatcagcccccacagagagagcgaccacagcagcctgaacaacaagtacctgaacggctgcggcgagatcagcgtgagcgagatgaacgagaagctgaccaccctgtgctacagaaagtacaacgacgtgagcgacctgtgcaagctggagaacaagcagtactgcagatggagcaagaaccaggacgacagcttcaccatctgcagaaagctgacctaccccctggagaccctgtgcaacagccccaacagaagcaccaacaccctgaaggagatgccctggggccacatcaacaacaacgtgacccagagctacagcatcggctacgagggcagctacgacgccagcgccgacctgttcgacgacatcgccaaggagatggacatcgccaccgagatcaccaagaagagccaggacatcctgctgaagtggggcaccagcctggccgagagccaccccagcgagagcgacttcagcctgagaagcctgagcgaggacttcatccagcccagccagaagctgagcctgcagagcctgagcgacagcagacacagcagaacctgcagccccaccccccacttccagagcgacagcgagtacaacttcgagaacagccaggacttcgtgccctgcagccagagcacccccatcagcggcttccaccagaccagaatccacggcatcaacagagccttcaagaagcccgtgttctacagcgacctggacggcaactacgagaagatcagaatcttccccgagaacgacaagcagcaggccagccccagctgccccaagaacatcaagacccccagccagaagatcagaagccccatcgtgagcggcgtgagccagcccgacgtgttcaaccactaccccttcgccgagtgccacgagaccgacagcgacgagtgggtgccccccaccacccagaagatcttccccagcgacatgctgggcttccagggcatcggcctgggcaagtgcctggccgcctaccacttccccgaccagcaggagctgcccagaaagaagctgaagcacatcagacagggcaccaacaagggcctgatcaagaagaagctgaagaacatgctggccgccgtggtgaccaagaagaagacccacaagtacaactgcaagagcagcggctggatcagcaagtgccccgacatccaggtgctggccgccccccagctgcaccccatcctgggccccgacagctgcagcgaggtgaagtgctgcctgcccttcagcgagaagggcccccccagcgtgtgcgagaccagaagcgcctggagccccgagctgttcagctag

SEQ ID NO: 10041 - DNA, 306 bp, synthetic construct
  source 1..306: mol_type = other DNA; note = Synthetic coding sequence
atgagcaacacccaggccgagagaagcatcatcggcatgatcgacatgttccacaagtacaccggcagagacggcaagatcgagaagcccagcctgctgaccatgatgaaggagaacttccccaacttcctgagcgcctgcgacaagaagggcatccactacctggccaccgtgttcgagaagaaggacaagaacgaggacaagaagatcgacttcagcgagttcctgagcctgctgggcgacatcgccgccgactaccacaagcagagccacggcgccgccccctgcagcggcggcagccagtag

SEQ ID NO: 10042 - DNA, 678 bp, synthetic construct
  source 1..678: mol_type = other DNA; note = Synthetic coding sequence
atggccgtgagaagcctgtgggccggcagactgagagtgcagagactgctggcctggagcgccgcctgggagagcaagggctggcccctgcccttcagcaccgccacccagagaaccgccggcgaggactgcagaagcgaggacccccccgacgagctgggcccccccctggccgagagagccctgagagtgaaggccgtgaagctggagaaggaggtgcaggacctgaccgtgagataccagagagccatcgccgactgcgagaacatcagaagaagaacccagagatgcgtggaggacgccaagatcttcggcatccagagcttctgcaaggacctggtggaggtggccgacatcctggagaagaccaccgagtgcatcagcgaggagagcgagcccgaggaccagaagctgaccctggagaaggtgttcagaggcctgctgctgctggaggccaagctgaagagcgtgttcgccaagcacggcctggagaagctgacccccatcggcgacaagtacgacccccacgagcacgagctgatctgccacgtgcccgccggcgtgggcgtgcagcccggcaccgtggccctggtgagacaggacggctacaagctgcacggcagaaccatcagactggccagagtggaggtggccgtggagagccagagaagactgtag

SEQ ID NO: 10043 - DNA, 1203 bp, synthetic construct
  source 1..1203: mol_type = other DNA; note = Synthetic coding sequence
atgaccaccaagaacctggagaccaaggtgaccgtgaccagcagccccatcagaggcgccggcgacggcatggagaccgaggagccccccaagagcgtggaggtgaccagcggcgtgcagagcagaaagcaccacagcctgcagagcccctggaagaaggccgtgcccagcgagagccccggcgtgctgcagctgggcaagatgctgaccgagaaggccatggaggtgaaggccgtgagaatcctggtgcccaaggccgccatcacccacgacatccccaacaagaacaccaaggtgaagagcctgggccaccacaagggcgagttcctgggccagagcgagggcgtgatcgagcccaacaaggagctgagcgaggtgaagaacgtgctggagaagctgaagaacagcgagagaagactgctgcaggacaaggagggcctgagcaaccagctgagagtgcagaccgaggtgaacagagagctgaagaagctgctggtggccagcgtgggcgacgacctgcagtaccacttcgagagactggccagagagaagaaccagctgatcctggagaacgaggccctgggcagaaacaccgcccagctgagcgagcagctggagagaatgagcatccagtgcgacgtgtggagaagcaagttcctggccagcagagtgatggccgacgagctgaccaacagcagagccgccctgcagagacagaacagagacgcccacggcgccatccaggacctgctgagcgagagagagcagttcagacaggagatgatcgccacccagaagctgctggaggagctgctggtgagcctgcagtggggcagagagcagacctacagccccagcgtgcagccccacagcaccgccgagctggccctgaccaaccacaagctggccaaggccgtgaacagccacctgctgggcaacgtgggcatcaacaaccagaagaagatccccagcaccgtggagttctgcagcacccccgccgagaagatggccgagaccgtgctgagaatcctggaccccgtgacctgcaaggagagcagccccgacaaccccttcttcgagagcagccccaccaccctgctggccaccaagaagaacatcggcagattccacccctacaccagatacgagaacatcaccttcaactgctgcaaccactgcagaggcgagctgatcgccctgtag

SEQ ID NO: 10044 - DNA, 735 bp, synthetic construct
  source 1..735: mol_type = other DNA; note = Synthetic coding sequence
atggaccccggcgccgccctgcagagaagagccggcggcggcggcggcctgggcgccggcagccccgccctgagcggcggccagggcagaagaagaaagcagccccccagacccgccgacttcaagctgcaggtgatcatcatcggcagcagaggcgtgggcaagaccagcctgatggagagattcaccgacgacaccttctgcgaggcctgcaagagcaccgtgggcgtggacttcaagatcaagaccgtggagctgagaggcaagaagatcagactgcagatctgggacaccgccggccaggagagattcaacagcatcaccagcgcctactacagaagcgccaagggcatcatcctggtgtacgacatcaccaagaaggagaccttcgacgacctgcccaagtggatgaagatgatcgacaagtacgccagcgaggacgccgagctgctgctggtgggcaacaagctggactgcgagaccgacagagagatcaccagacagcagggcgagaagttcgcccagcagatcaccggcatgagattctgcgaggccagcgccaaggacaacttcaacgtggacgagatcttcctgaagctggtggacgacatcctgaagaagatgcccctggacatcctgagaaacgagctgagcaacagcatcctgagcctgcagcccgagcccgagatcccccccgagctgcccccccccagaccccacgtgagatgctgctag

SEQ ID NO: 10045 - DNA, 1158 bp, synthetic construct
  source 1..1158: mol_type = other DNA; note = Synthetic coding sequence
atggccctgccccacgacagcaacgagaccagctacctgctgccccccaacaacgaggactggggcagacagaccatccccgacttcgtgtacggccagaaggacctgatggccgagggcatccagtggcccagaaacgcccccggcatccccgacgccctgccccagagccccttcgacgccgccctgtgcagcgcctggaagcagagagtggagctgggcctgttcagatacagactgagagagctgcagacccagatcctgcccggcgccgtgggcttcgtggcccagctgaacgtggagagaggcgtgcagagaagacccccccagaccatcaagagcgtgagacaggccttcgaccccgtgcagttcaacttcaacaagatcagacccggcgaggtgctgttcagactgcacagagagcccgacctgcccggcaccctgctgcaggaggacatcctggtggtgatcaacgtgagccccctggagtggggccacgtgctgctggtgcccgagcccgccagacagctgccccagagactgctgcccggcgccctgagagccggcatcgaggccgtgctgctgagcctgcaccccggcttcagagtgggcttcaacagcctgggcggcctggccagcgtgaaccacctgcacctgcacggctactacctggcccacagactgcccgtggagcaggcccccagcgagcccctggaccccggcggccacctgcacctgctgcaggacctgcccgcccccggcttcctgttctacaccagaggccccggccccgacctggagagcctgatcagcagagtgtgcagagccaccgactacctgaccgaccacgagatcgcccacaacctgttcgtgaccagaggcgccccccccggcaagaccagccccagcagcgccctgaccggcgtgagagtgatcctgtgggccagaaagagcagcttcggcatcaaggacggcgaggccttcaacgtggccctgtgcgagctggccggccacctgcccgtgaagaccagccaggacttcagcagcctgaccgaggccgccgccgtggccctgatccaggactgcagactgccccccagccaggccgaggacgtgcaggccgccctggtggccctgatgagccaggaggagcagtag

SEQ ID NO: 10046 - DNA, 192 bp, synthetic construct
  source 1..192: mol_type = other DNA; note = Synthetic coding sequence
atgctgtgcgacaacttccccggcgccgtgttccccggctgctactggggcagctacggctaccccctgggctacagcgtgggctgcggctacggcagcacctacagccccgtgggctacggcttcggctacggctacaacggctgcggcgccttcggctacagaagatacagccccttcgccctgtactag

SEQ ID NO: 10047 - DNA, 1083 bp, synthetic construct
  source 1..1083: mol_type = other DNA; note = Synthetic coding sequence
atgctgggcagcggcttcaaggccgagagactgagagtgaacctgagactggtgatcaacagactgaagctgctggagaagaagaagaccgagctggcccagaaggccagaaaggagatcgccgactacctggccgccggcaaggacgagagagccagaatcagagtggagcacatcatcagagaggactacctggtggaggccatggagatcctggagctgtactgcgacctgctgctggccagattcggcctgatccagagcatgaaggagctggacagcggcctggccgagagcgtgagcaccctgatctgggccgcccccagactgcagagcgaggtggccgagctgaagatcgtggccgaccagctgtgcgccaagtacagcaaggagtacggcaagctgtgcagaaccaaccagatcggcaccgtgaacgacagactgatgcacaagctgagcgtggaggccccccccaagatcctggtggagagatacctgatcgagatcgccaagaactacaacgtgccctacgagcccgacagcgtggtgatggccgaggccccccccggcgtggagaccgacctgatcgacgtgggcttcaccgacgacgtgaagaagggcggccccggcagaggcggcagcggcggcttcaccgcccccgtgggcggccccgacggcaccgtgcccatgcccatgcccatgcccatgcccatgcccagcgccaacacccccttcagctaccccctgcccaagggccccagcgacttcaacggcctgcccatgggcacctaccaggccttccccaacatccaccccccccagatccccgccaccccccccagctacgagagcatgaccctgatgctgatcagaatcagcctgctgcacagactgctggtgctggaccccagccagaagcccctgcagagcttcctgcccgacctgcagatcaccatgaccaccctgagctaccagagctgccacctgtgccagacccactaccagctgcacctgctggtgcccgccccccagcacctgaagaccctgaccctgatgatcttccccggcggcctgaagagctag

SEQ ID NO: 10048 - DNA, 528 bp, synthetic construct
  source 1..528: mol_type = other DNA; note = Synthetic coding sequence
atgcccaagagaagctgccccttcgccgacgtggcccccctgcagctgaaggtgagagtgagccagagagagctgagcagaggcgtgtgcgccgagagatacagccaggaggtgttcgagaagaccaagagactgctgttcctgggcgcccaggcctacctggaccacgtgtgggacgagggctgcgccgtggtgcacctgcccgagagccccaagcccggccccaccggcgcccccagagccgccagaggccagatgctgatcggccccgacggcagactgatcagaagcctgggccaggccagcgaggccgaccccagcggcgtggccagcatcgcctgcagcagctgcgtgagagccgtggacggcaaggccgtgtgcggccagtgcgagagagccctgtgcggccagtgcgtgagaacctgctggggctgcggcagcgtggcctgcaccctgtgcggcctggtggactgcagcgacatgtacgagaaggtgctgtgcaccagctgcgccatgttcgagacctag

SEQ ID NO: 10049 - DNA, 366 bp, synthetic construct
  source 1..366: mol_type = other DNA; note = Synthetic coding sequence
atggaggccgaggtggacaagctggagctgatgttccagaaggccgagagcgacctggactacatccagtacagactggagtacgagatcaagaccaaccaccccgacagcgccagcgagaagaaccccgtgaccctgctgaaggagctgagcgtgatcaagagcagataccagaccctgtacgccagattcaagcccgtggccgtggagcagaaggagagcaagagcagaatctgcgccaccgtgaagaagaccatgaacatgatccagaagctgcagaagcagaccgacctggagctgagccccctgaccaaggaggagaagaccgccgccgagcagttcaagttccacatgcccgacctgtag

SEQ ID NO: 10050 - DNA, 1968 bp, synthetic construct
  source 1..1968: mol_type = other DNA; note = Synthetic coding sequence
atggtgaccaccctgggccccaagatggccgccgagtggggcggcggcgtgggctacagcggcagcggccccggcagaagcagatggagatggagcggcagcgtgtgggtgagaagcgtgctgctgctgctgggcggcctgagagccagcgccaccagcacccccgtgagcctgggcagcagccccccctgcagacaccacgtgcccagcgacaccgaggtgatcaacaaggtgcacctgaaggccaaccacgtggtgaagagagacgtggacgagcacctgagaatcaagaccgtgtacgacaagagcgtggaggagctgctgcccgagaagaagaacctggtgaagaacaagctgttcccccaggccatcagctacctggagaagaccttccaggtgagaagacccgccggcaccatcctgctgagcagacagtgcgccaccaaccagtacctgagaaaggagaacgacccccacagatactgcaccggcgagtgcgccgcccacaccaagtgcggccccgtgatcgtgcccgaggagcacctgcagcagtgcagagtgtacagaggcggcaagtggccccacggcgccgtgggcgtgcccgaccaggagggcatcagcgacgccgacttcgtgctgtacgtgggcgccctggccaccgagagatgcagccacgagaacatcatcagctacgccgcctactgccagcaggaggccaacatggacagacccatcgccggctacgccaacctgtgccccaacatgatcagcacccagccccaggagttcgtgggcatgctgagcaccgtgaagcacgaggtgatccacgccctgggcttcagcgccggcctgttcgccttctaccacgacaaggacggcaaccccctgaccagcagattcgccgacggcctgccccccttcaactacagcctgggcctgtaccagtggagcgacaaggtggtgagaaaggtggagagactgtgggacgtgagagacaacaagatcgtgagacacaccgtgtacctgctggtgacccccagagtggtggaggaggccagaaagcacttcgactgccccgtgctggagggcatggagctggagaaccagggcggcgtgggcaccgagctgaaccactgggagaagagactgctggagaacgaggccatgaccggcagccacacccagaacagagtgctgagcagaatcaccctggccctgatggaggacaccggcagacagatgctgagcccctactgcgacaccctgagaagcaaccccctgcagctgacctgcagacaggaccagagagccgtggccgtgtgcaacctgcagaagttccccaagcccctgccccaggagtaccagtacttcgacgagctgagcggcatccccgccgaggacctgccctactacggcggcagcgtggagatcgccgactactgccccttcagccaggagttcagctggcacctgagcggcgagtaccagagaagcagcgactgcagaatcctggagaaccagcccgagatcttcaagaactacggcgccgagaagtacggcccccacagcgtgtgcctgatccagaagagcgccttcgtgatggagaagtgcgagagaaagctgagctaccccgactggggcagcggctgctaccaggtgagctgcagcccccagggcctgaaggtgtgggtgcaggacaccagctacctgtgcagcagagccggccaggtgctgcccgtgagcatccagatgaacggctggatccacgacggcaacctgctgtgccccagctgctgggacttctgcgagctgtgcccccccgagaccgacccccccgccaccaacctgaccagagccctgcccctggacctgtgcagctgcagcagcagcctggtggtgaccctgtggctgctgctgggcaacctgttccccctgctggccggcttcctgctgtgcatctggcactag

SEQ ID NO: 10051 - DNA, 408 bp, synthetic construct
  source 1..408: mol_type = other DNA; note = Synthetic coding sequence
atgggcagagtgagaaccaagaccgtgaagaaggccgccagagtgatcatcgagaagtactacaccagactgggcaacgacttccacaccaacaagagagtgtgcgaggagatcgccatcatccccagcaagaagctgagaaacaagatcgccggctacgtgacccacctgatgaagagaatccagagaggccccgtgagaggcatcagcatcaagctgcaggaggaggagagagagagaagagacaactacgtgcccgaggtgagcgccctggaccaggagatcatcgaggtggaccccgacaccaaggagatgctgaagctgctggacttcggcagcctgagcaacctgcaggtgacccagcccaccgtgggcatgaacttcaagacccccagaggccccgtgtag

SEQ ID NO: 10052 - DNA, 1119 bp, synthetic construct
  source 1..1119: mol_type = other DNA; note = Synthetic coding sequence
atgaaccactgccagctgcccgtggtgatcgacaacggcagcggcatgatcaaggccggcgtggccggctgcagagagccccagttcatctaccccaacatcatcggcagagccaagggccagagcagagccgcccagggcggcctggagctgtgcgtgggcgaccaggcccaggactggagaagcagcctgttcatcagctaccccgtggagagaggcctgatcaccagctgggaggacatggagatcatgtggaagcacatctacgactacaacctgaagctgaagccctgcgacggccccgtgctgatcaccgagcccgccctgaaccccctggccaacagacagcagatcaccgagatgttcttcgagcacctgggcgtgcccgccttctacatgagcatccaggccgtgctggccctgttcgccgccggcttcaccaccggcctggtgctgaacagcggcgccggcgtgacccagagcgtgcccatcttcgagggctactgcctgccccacggcgtgcagcagctggacctggccggcctggacctgaccaactacctgatggtgctgatgaagaaccacggcatcatgctgctgagcgccagcgacagaaagatcgtggaggacatcaaggagagcttctgctacgtggccatgaactacgaggaggagatggccaagaagcccgactgcctggagaaggtgtaccagctgcccgacggcaaggtgatccagctgcacgaccagctgttcagctgccccgaggccctgttcagcccctgccacatgaacctggaggcccccggcatcgacaagatctgcttcagcagcatcatgaagtgcgacaccggcctgagaaacagcttcttcagcaacatcatcctggccggcggcagcaccagcttccccggcctggacaagagactggtgaaggacatcgccaaggtggcccccgccaacaccgccgtgcaggtgatcgccccccccgagagaaagatcagcgtgtggatgggcggcagcatcctggccagcctgagcgccttccaggacatgtggatcaccgccgccgagttcaaggaggtgggccccaacatcgtgcaccagagatgcttctag

SEQ ID NO: 10053 - DNA, 3072 bp, synthetic construct
  source 1..3072: mol_type = other DNA; note = Synthetic coding sequence
atggacgccaacagcaaggacaagccccccgagaccaaggagagcgccatgaacaacgccggcaacgccagcttcatcctgggcaccggcaagatcgtgaccccccagaagcacgccgagctgccccccaacccctgcacccccgacaccttcaagagccccctgaacttcagcaccgtgaccgtggagcagctgggcatcacccccgagagcttcgtgagaaacagcgccggcaagagcagcagctacctgaagaagtgcagaagaagaagcgccgtgggcgccagaggcagccccgagaccaaccacctgatcagattcatcgccagacagcagaacatcaagaacgccagaaagagccccctggcccaggacagccccagccagggcagccccgccctgtacagaaacgtgaacaccctgagagagagaatcagcgccttccagagcgccttccacagcatcaaggagaacgagaagatgaccggctgcctggagttcagcgaggccggcaaggagagcgagatgaccgacctgaccagaaaggagggcctgagcgcctgccagcagagcggcttccccgccgtgctgagcagcaagagaagaagaatcagctaccagagagacagcgacgagaacctgaccgacgccgagggcaaggtgatcggcctgcagatcttcaacatcgacaccgacagagcctgcgccgtggagaccagcgtggacctgagcgagatcagcagcaagctgggcagcacccagagcggcttcctggtggaggagagcctgcccctgagcgagctgaccgagaccagcaacgccctgaaggtggccgactgcgtggtgggcaagggcagcagcgacgccgtgagccccgacaccttcaccgccgaggtgagcagcgacgccgtgcccgacgtgagaagccccgccacccccgcctgcagaagagacctgcccacccccaagaccttcgtgctgagaagcgtgctgaagaagcccagcgtgaagatgtgcctggagagcctgcaggagcactgcaacaacctgtacgacgacgacggcacccaccccagcctgatcagcaacctgcccaactgctgcaaggagaaggaggccgaggacgaggagaacttcgaggcccccgccttcctgaacatgagaaagagaaagagagtgaccttcggcgaggacctgagccccgaggtgttcgacgagagcctgcccgccaacacccccctgagaaagggcggcacccccgtgtgcaagaaggacttcagcggcctgagcagcctgctgctggagcagagccccgtgcccgagcccctgccccagcccgacttcgacgacaagggcgagaacctggagaacatcgagcccctgcaggtgagcttcgccgtgctgagcagccccaacaagagcagcatcagcgagaccctgagcggcaccgacaccttcagcagcagcaacaaccacgagaagatcagcagccccaaggtgggcagaatcaccagaaccagcaacagaagaaaccagctggtgagcgtggtggaggagagcgtgtgcaacctgctgaacaccgaggtgcagccctgcaaggagaagaagatcaacagaagaaagagccaggagaccaagtgcaccaagagagccctgcccaagaagagccaggtgctgaagagctgcagaaagaagaagggcaagggcaagaagagcgtgcagaagagcctgtacggcgagagagacatcgccagcaagaagcccctgctgagccccatccccgagctgcccgaggtgcccgagatgacccccagcatccccagcatcagaagactgggcagcggctacttcagcagcaacggcaagctggaggaggtgaagacccccaagaaccccgtgaagagaaaggacctgctgagacacgaccccgacctgcacatgcaccagggctacgacaagtacgacgtgagcgagttctgcagctacatcaagagcagcagcagcctgggcaacgccaccagcgacgaggaccccaacaccaacatcatgaacatcaacgagaacaagaacatccccaaggccaagaacaagagcgagagcgagaacgagcccaaggccggcaccgacagccccgtgagctgcgccagcgtgaccgaggagagagtggccagcgacagccccaagcccgccctgaccctgcagcagggccaggagttcagcgccggcggccagaacgccgagaacctgtgccagttcttcaagatcagccccgacctgaacatcaagtgcgagagaaaggacgacttcctgggcgccgccgagggcaagctgcagtgcaacagactgatgcccaacagccagaaggactgccactgcctgggcgacgtgctgatcgagaacaccaaggagagcaagagccagagcgaggacctgggcagaaagcccatggagagcagcagcgtggtgagctgcagagacagaaaggacagaagaagaagcatgtgctacagcgacggcagaagcctgcacctggagaagaacggcaaccacacccccagcagcagcgtgggcagcagcgtggagatcagcctggagaacagcgagctgttcaaggacctgagcgacgccatcgagcagaccttccagagaagaaacagcgagaccaaggtgagaagaagcaccagactgcagaaggacctggagaacgagggcctggtgtggatcagcctgcccctgcccagcaccagccagaaggccaagagaagaaccatctgcaccttcgacagcagcggcttcgagagcatgagccccatcaaggagaccgtgagcagcagacagaagccccagatggccccccccgtgagcgaccccgagaacagccagggccccgccgccggcagcagcgacgagcccggcaagagaagaaagagcttctgcatcagcaccctggccaacaccaaggccaccagccagttcaagggctacagaagaagaagcagcctgaacggcaagggcgagagcagcctgaccgccctggagagaatcgagcacaacggcgagagaaagcagtag

SEQ ID NO: 10054 - DNA, 963 bp, synthetic construct
  source 1..963: mol_type = other DNA; note = Synthetic coding sequence
atgagcaagagcgagagccccaaggagcccgagcagctgagaaagctgttcatcggcggcctgagcttcgagaccaccgacgagagcctgagaagccacttcgagcagtggggcaccctgaccgactgcgtggtgatgagagaccccaacaccaagagaagcagaggcttcggcttcgtgacctacgccaccgtggaggaggtggacgccgccatgaacgccagaccccacaaggtggacggcagagtggtggagcccaagagagccgtgagcagagaggacagccagagacccggcgcccacctgaccgtgaagaagatcttcgtgggcggcatcaaggaggacaccgaggagcaccacctgagagactacttcgagcagtacggcaagatcgaggtgatcgagatcatgaccgacagaggcagcggcaagaagagaggcttcgccttcgtgaccttcgacgaccacgacagcgtggacaagatcgtgatccagaagtaccacaccgtgaacggccacaactgcgaggtgagaaaggccctgagcaagcaggagatggccagcgccagcagcagccagagaggcagaagcggcagcggcaacttcggcggcggcagaggcggcggcttcggcggcaacgacaacttcggcagaggcggcaacttcagcggcagaggcggcttcggcggcagcagaggcggcggcggctacggcggcagcggcgacggctacaacggcttcggcaacgacggcaacaacttcggcggcggcggcagctacaacgacttcggcaactacaacaaccagagcagcaacttcggccccatgaagggcggcaacttcggcggcagaagcagcggcccctacggcggcggcggccagtacttcgccaagcccagaaaccagggcggctacggcggcagcagcagcagcagcagctacggcagcggcagaagattctag

SEQ ID NO: 10055 - DNA, 141 bp, synthetic construct
  source 1..141: mol_type = other DNA; note = Synthetic coding sequence
atgtgcagcctggccagcggcgccaccggctacagccacctgctgaagaagcacttccacaccgtgagcctgagcatcagcctgatcctgaccgcctggttcatcaacatggacctgaacttcatggacaccctgagctag

SEQ ID NO: 10056 - DNA, 198 bp, synthetic construct
  source 1..198: mol_type = other DNA; note = Synthetic coding sequence
atgtgctactacagcaactactacggcggcctgagatacggctacggcgtgctgggcggcggctacggctgcggctgcggctacggccacggctacggcggcctgggctgcggctacggcagaggctacggcggctacggctacggctgctgcagacccagctgctacggcagatactggagctgcggcttctactag

SEQ ID NO: 10057 - DNA, 7059 bp, synthetic construct
  source 1..7059: mol_type = other DNA; note = Synthetic coding sequence
atggagaaggccaccgtgcccgtggccgccgccaccgccgccgagggcgagggcagcccccccgccgtggccgccgtggccggcccccccgccgccgccgaggtgggcggcggcgtgggcggcagcagcagagccagaagcgccagcagccccagaggcatggtgagagtgtgcgacctgctgctgaagaagaagcccccccagcagcagcaccacaaggccaagagaaacagaacctgcagaccccccagcagcagcgagagcagcagcgacagcgacaacagcggcggcggcggcggcggcggcggcggcggcggcggcggcggcggcaccagcagcaacaacagcgaggaggaggaggacgacgacgacgaggaggaggaggtgagcgaggtggagagcttcatcctggaccaggacgacctggagaaccccatgctggagaccgccagcaagctgctgctgagcggcaccgccgacggcgccgacctgagaaccgtggaccccgagacccaggccagactggaggccctgctggaggccgccggcatcggcaagctgagcaccgccgacggcaaggccttcgccgaccccgaggtgctgagaagactgaccagcagcgtgagctgcgccctggacgaggccgccgccgccctgaccagaatgagagccgagagcaccgccaacgccggccagagcgacaacagaagcctggccgaggcctgcagcgagggcgacgtgaacgccgtgagaaagctgctgatcgagggcagaagcgtgaacgagcacaccgaggagggcgagagcctgctgtgcctggcctgcagcgccggctactacgagctggcccaggtgctgctggccatgcacgccaacgtggaggacagaggcatcaagggcgacatcacccccctgatggccgccgccaacggcggccacgtgaagatcgtgaagctgctgctggcccacaaggccgacgtgaacgcccagagcagcaccggcaacaccgccctgacctacgcctgcgccggcggctacgtggacgtggtgaaggtgctgctggagagcggcgccagcatcgaggaccacaacgagaacggccacacccccctgatggaggccggcagcgccggccacgtggaggtggccagactgctgctggagaacggcgccggcatcaacacccacagcaacgagttcaaggagagcgccctgaccctggcctgctacaagggccacctggagatggtgagattcctgctggaggccggcgccgaccaggagcacaagaccgacgagatgcacaccgccctgatggaggcctgcatggacggccacgtggaggtggccagactgctgctggacagcggcgcccaggtgaacatgcccgccgacagcttcgagagccccctgaccctggccgcctgcggcggccacgtggagctggccgccctgctgatcgagagaggcgccagcctggaggaggtgaacgacgagggctacacccccctgatggaggccgccagagagggccacgaggagatggtggccctgctgctgggccagggcgccaacatcaacgcccagaccgaggagacccaggagaccgccctgaccctggcctgctgcggcggcttcctggaggtggccgacttcctgatcaaggccggcgccgacatcgagctgggctgcagcacccccctgatggaggccgcccaggagggccacctggagctggtgaagtacctgctggccgccggcgccaacgtgcacgccaccaccgccaccggcgacaccgccctgacctacgcctgcgagaacggccacaccgacgtggccgacgtgctgctgcaggccggcgccgacctggagcacgagagcgagggcggcagaacccccctgatgaaggccgccagagccggccacgtgtgcaccgtgcagttcctgatcagcaagggcgccaacgtgaacagaaccaccgccaacaacgaccacaccgtgctgagcctggcctgcgccggcggccacctggccgtggtggagctgctgctggcccacggcgccgaccccacccacagactgaaggacggcagcaccatgctgatcgaggccgccaagggcggccacaccagcgtggtgtgctacctgctggactaccccaacaacctgctgagcgcccccccccccgacgtgacccagctgaccccccccagccacgacctgaacagagcccccagagtgcccgtgcaggccctgcccatggtggtgcccccccaggagcccgacaagccccccgccaacgtggccaccaccctgcccatcagaaacaaggccgtgagcggcagagccagcgccatgagcaacacccccacccacagcatcgccgccagcatcagccagccccagacccccacccccagccccatcatcagccccagcgccatgctgcccatctaccccgccatcgacatcgacgcccagaccgagagcaaccacgacaccgccctgaccctggcctgcgccggcggccacgaggagctggtgcagaccctgctggagagaggcgccagcatcgagcacagagacaagaagggcttcacccccctgatcctggccgccaccgccggccacgtgggcgtggtggagatcctgctggacaacggcgccgacatcgaggcccagagcgagagaaccaaggacacccccctgagcctggcctgcagcggcggcagacaggaggtggtggagctgctgctggccagaggcgccaacaaggagcacagaaacgtgagcgactacacccccctgagcctggccgccagcggcggctacgtgaacatcatcaagatcctgctgaacgccggcgccgagatcaacagcagaaccggcagcaagctgggcatcagccccctgatgctggccgccatgaacggccacaccgccgccgtgaagctgctgctggacatgggcagcgacatcaacgcccagatcgagaccaacagaaacaccgccctgaccctggcctgcttccagggcagaaccgaggtggtgagcctgctgctggacagaaaggccaacgtggagcacagagccaagaccggcctgacccccctgatggaggccgccagcggcggctacgccgaggtgggcagagtgctgctggacaagggcgccgacgtgaacgccccccccgtgcccagcagcagagacaccgccctgaccatcgccgccgacaagggccactacaagttctgcgagctgctgatcggcagaggcgcccacatcgacgtgagaaacaagaagggcaacacccccctgtggctggccgccaacggcggccacctggacgtggtgcagctgctggtgcaggccggcgccgacgtggacgccgccgacaacagaaagatcacccccctgatggccgccttcagaaagggccacgtgaaggtggtgagatacctggtgaaggaggtgaaccagttccccagcgacagcgagtgcatgagatacatcgccaccatcaccgacaaggagatgctgaagaagtgccacctgtgcatggagagcatcgtgcaggccaaggacagacaggccgccgaggccaacaagaacgccagcatcctgctggaggagctggacctggagaagctgagagaggagagcagaagactggccctggccgccaagagagagaagagaaaggagaagagaagaaagaagaaggaggagcagagaagaaagctggaggagatcgaggccaagaacaaggagaacttcgagctgcaggccgcccaggagaaggagaagctgaaggtggaggacgagcccgaggtgctgaccgagccccccagcgccaccaccaccaccaccatcggcatcagcgccacctggaccaccctggccggcagccacggcaagagaaacaacaccatcaccaccaccagcagcaagagaaagaacagaaagaacaagatcacccccgagaacgtgcagatcatcttcgacgaccccctgcccatcagctacagccagcccgagaaggtgaacggcgagagcaagagcagcagcaccagcgagagcggcgacagcgacaacatgagaatcagcagctgcagcgacgagagcagcaacagcaacagcagcagaaagagcgacaaccacagccccgccgtggtgaccaccaccgtgagcagcaagaagcagcccagcgtgctggtgaccttccccaaggaggagagaaagagcgtgagcggcaaggccagcatcaagctgagcgagaccatcagcgagggcaccagcaacagcctgagcacctgcaccaagagcggccccagccccctgagcagccccaacggcaagctgaccgtggccagccccaagagaggccagaagagagaggagggctggaaggaggtggtgagaagaagcaagaaggtgagcgtgcccagcaccgtgatcagcagagtgatcggcagaggcggctgcaacatcaacgccatcagagagttcaccggcgcccacatcgacatcgacaagcagaaggacaagaccggcgacagaatcatcaccatcagaggcggcaccgagagcaccagacaggccacccagctgatcaacgccctgatcaaggaccccgacaaggagatcgacgagctgatccccaagaacagactgaagagcagcagcgccaacagcaagatcggcagcagcgcccccaccaccaccgccgccaacaccagcctgatgggcatcaagatgaccaccgtggccctgagcagcaccagccagaccgccaccgccctgaccgtgcccgccatcagcagcgccagcacccacaagaccatcaagaaccccgtgaacaacgtgagacccggcttccccgtgagcctgcccctggcctacccccccccccagttcgcccacgccctgctggccgcccagaccttccagcagatcagaccccccagactgcccatgacccacttcggcggcaccttcccccccgcccagagcacctggggccccttccccgtgagacccctgagccccgccagagccaccaacagccccaagccccacatggtgcccagacacagcaaccagaacagcagcggcagccaggtgaacagcgccggcagcctgaccagcagccccaccaccaccaccagcagcagcgccagcaccgtgcccggcaccagcaccaacggcagccccagcagccccagcgtgagaagacagctgttcgtgaccgtggtgaagaccagcaacgccaccaccaccaccgtgaccaccaccgccagcaacaacaacaccgcccccaccaacgccacctaccccatgcccaccgccaaggagcactaccccgtgagcagccccagcagccccagcccccccgcccagcccggcggcgtgagcagaaacagccccctggactgcggcagcgccagccccaacaaggtggccagcagcagcgagcaggaggccggcagcccccccgtggtggagaccaccaacaccagaccccccaacagcagcagcagcagcggcagcagcagcgcccacagcaaccagcagcagccccccggcagcgtgagccaggagcccagaccccccctgcagcagagccaggtgcccccccccgaggtgagaatgaccgtgccccccctggccaccagcagcgcccccgtggccgtgcccagcaccgcccccgtgacctaccccatgccccagacccccatgggctgcccccagcccacccccaagatggagacccccgccatcagaccccccccccacggcaccaccgccccccacaagaacagcgccagcgtgcagaacagcagcgtggccgtgctgagcgtgaaccacatcaagagaccccacagcgtgcccagcagcgtgcagctgcccagcaccctgagcacccagagcgcctgccagaacagcgtgcaccccgccaacaagcccatcgcccccaacttcagcgcccccctgcccttcggccccttcagcaccctgttcgagaacagccccaccagcgcccacgccttctggggcggcagcgtggtgagcagccagagcacccccgagagcatgctgagcggcaagagcagctacctgcccaacagcgaccccctgcaccagagcgacaccagcaaggcccccggcttcagaccccccctgcagagacccgcccccagccccagcggcatcgtgaacatggacagcccctacggcagcgtgacccccagcagcacccacctgggcaacttcgccagcaacatcagcggcggccagatgtacggccccggcgcccccctgggcggcgcccccgccgccgccaacttcaacagacagcacttcagccccctgagcctgctgaccccctgcagcagcgccagcaacgacagcagcgcccagagcgtgagcagcggcgtgagagcccccagccccgcccccagcagcgtgcccctgggcagcgagaagcccagcaacgtgagccaggacagaaaggtgcccgtgcccatcggcaccgagagaagcgccagaatcagacagaccggcaccagcgcccccagcgtgatcggcagcaacctgagcaccagcgtgggccacagcggcatctggagcttcgagggcatcggcggcaaccaggacaaggtggactggtgcaaccccggcatgggcaaccccatgatccacagacccatgagcgaccccggcgtgttcagccagcaccaggccatggagagagacagcaccggcatcgtgacccccagcggcaccttccaccagcacgtgcccgccggctacatggacttccccaaggtgggcggcatgcccttcagcgtgtacggcaacgccatgatcccccccgtggcccccatccccgacggcgccggcggccccatcttcaacggcccccacgccgccgaccccagctggaacagcctgatcaagatggtgagcagcagcaccgagaacaacggcccccagaccgtgtggaccggcccctgggccccccacatgaacagcgtgcacatgaaccagctgggctag

SEQ ID NO: 10058 - DNA, 1374 bp, synthetic construct
  source 1..1374: mol_type = other DNA; note = Synthetic coding sequence
atgagcggcaccagagccagcaacgacagaccccccggcgccggcggcgtgaagagaggcagactgcagcaggaggccgccgccaccggcagcagagtgaccgtggtgctgggcgcccagtggggcgacgagggcaagggcaaggtggtggacctgctggccaccgacgccgacatcatcagcagatgccagggcggcaacaacgccggccacaccgtggtggtggacggcaaggagtacgacttccacctgctgcccagcggcatcatcaacaccaaggccgtgagcttcatcggcaacggcgtggtgatccacctgcccggcctgttcgaggaggccgagaagaacgagaagaagggcctgaaggactgggagaagagactgatcatcagcgacagagcccacctggtgttcgacttccaccaggccgtggacggcctgcaggaggtgcagagacaggcccaggagggcaagaacatcggcaccaccaagaagggcatcggccccacctacagcagcaaggccgccagaaccggcctgagaatctgcgacctgctgagcgacttcgacgagttcagcagcagattcaagaacctggcccaccagcaccagagcatgttccccaccctggagatcgacatcgagggccagctgaagagactgaagggcttcgccgagagaatcagacccatggtgagagacggcgtgtacttcatgtacgaggccctgcacggcccccccaagaagatcctggtggagggcgccaacgccgccctgctggacatcgacttcggcacctaccccttcgtgaccagcagcaactgcaccgtgggcggcgtgtgcaccggcctgggcatccccccccagaacatcggcgacgtgtacggcgtggtgaaggcctacaccaccagagtgggcatcggcgccttccccaccgagcagatcaacgagatcggcggcctgctgcagaccagaggccacgagtggggcgtgaccaccggcagaaagagaagatgcggctggctggacctgatgatcctgagatacgcccacatggtgaacggcttcaccgccctggccctgaccaagctggacatcctggacgtgctgggcgaggtgaaggtgggcgtgagctacaagctgaacggcaagagaatcccctacttccccgccaaccaggagatgctgcagaaggtggaggtggagtacgagaccctgcccggctggaaggccgacaccaccggcgccagaagatgggaggacctgcccccccaggcccagaactacatcagattcgtggagaaccacgtgggcgtggccgtgaagtgggtgggcgtgggcaagagcagagagagcatgatccagctgttctag

SEQ ID NO: 10059 - DNA, 1596 bp, synthetic construct
  source 1..1596: mol_type = other DNA; note = Synthetic coding sequence
atgtgcagcctggccagcggcgccaccggcggcagaggcgccgtggagaacgaggaggacctgcccgagctgagcgacagcggcgacgaggccgcctgggaggacgaggacgacgccgacctgccccacggcaagcagcagaccccctgcctgttctgcaacagactgttcaccagcgccgaggagaccttcagccactgcaagagcgagcaccagttcaacatcgacagcatggtgcacaagcacggcctggagttctacggctacatcaagctgatcaacttcatcagactgaagaaccccaccgtggagtacatgaacagcatctacaaccccgtgccctgggagaaggaggagtacctgaagcccgtgctggaggacgacctgctgctgcagttcgacgtggaggacctgtacgagcccgtgagcgtgcccttcagctaccccaacggcctgagcgagaacaccagcgtggtggagaagctgaagcacatggaggccagagccctgagcgccgaggccgccctggccagagccagagaggacctgcagaagatgaagcagttcgcccaggacttcgtgatgcacaccgacgtgagaacctgcagcagcagcaccagcgtgatcgccgacctgcaggaggacgaggacggcgtgtacttcagcagctacggccactacggcatccacgaggagatgctgaaggacaagatcagaaccgagagctacagagacttcatctaccagaacccccacatcttcaaggacaaggtggtgctggacgtgggctgcggcaccggcatcctgagcatgttcgccgccaaggccggcgccaagaaggtgctgggcgtggaccagagcgagatcctgtaccaggccatggacatcatcagactgaacaagctggaggacaccatcaccctgatcaagggcaagatcgaggaggtgcacctgcccgtggagaaggtggacgtgatcatcagcgagtggatgggctacttcctgctgttcgagagcatgctggacagcgtgctgtacgccaagaacaagtacctggccaagggcggcagcgtgtaccccgacatctgcaccatcagcctggtggccgtgagcgacgtgaacaagcacgccgacagaatcgccttctgggacgacgtgtacggcttcaagatgagctgcatgaagaaggccgtgatccccgaggccgtggtggaggtgctggaccccaagaccctgatcagcgagccctgcggcatcaagcacatcgactgccacaccaccagcatcagcgacctggagttcagcagcgacttcaccctgaagatcaccagaaccagcatgtgcaccgccatcgccggctacttcgacatctacttcgagaagaactgccacaacagagtggtgttcagcaccggcccccagagcaccaagacccactggaagcagaccgtgttcctgctggagaagcccttcagcgtgaaggccggcgaggccctgaagggcaaggtgaccgtgcacaagagcaagaaggaccccagaagcctgaccgtgaccctgaccctgaacaacagcacccagacctacggcctgcagtag

SEQ ID NO: 10060 - DNA, 1659 bp, synthetic construct
  source 1..1659: mol_type = other DNA; note = Synthetic coding sequence
atgagcgtgctgagccccggcgacctgaagcccaagagaggcagcccccacagaggcagcctggacagaaccgacgccagcaccgacctggccatgagaagctggcccagcgagctgggcagcagaacctgcagcaccagcgccaccaccaccgcccccagcaacagcacccccatcgccagacaccccggcagaaccaagggctacaacagcgacgacaacctgtgcgagcccagcctggagttcgaggtgcccaaccacagacagtacgtgagcagacccagcagcctggagagcagcagaaacaccagcagcaacagcagccccctgaacctgaagggcagcagcgagcagctgcacggcagaagcgagagcttcagcagcgaggacctgatccccagcagagacctggccaccctgcccagagaggccagcacccccggcagaaacgccctgggcagacacgagtaccccctgcccagaaacggccccctgccccaggagggcgcccagaagagaggcaccgcccccccctacgtgggcgtgagaccctgcagcgccagccccagcagcgagatggtgaccctggaggagttcctggaggagagcaacagaagcagccccacccacgacacccccagctgcagagacgacctgctgagcgactacttcagaaaggccagcgacccccccgccatcggcggccagcccggcccccccgccaagaaggagggcgccaagatgcccaccaacttcgtggcccccaccgtgaagatggccgcccccaccagcgagggcagacccctgaagcccggccagtacgtgaagcccaacttcagactgaccgaggccgaggccccccccagcgtggcccccagacaggcccagcccccccagagcctgagcctgggcagacccagacaggcccccgtgccccccgccagccacgcccccgccagcagaagcgccagcctgagcagagccttcagcctggccagcgccgacctgctgagagccagcggccccgaggcctgcaagcaggagagcccccagaagctgggcgcccccgaggccctgggcggcagagagaccggcagccacaccctgcagagccccgccccccccagcagccacagcctggccagagagagaacccccctggtgggcaaggccggcagcagctgccagggccccggccccagaagcagacccctggacaccagaagattcagcctggccccccccaaggaggagagactggcccccctgcaccagagcgccaccgcccccgccatcgccaccgccggcgccggcgccgccgccgccggcagcggcagcaacagccagctgctgcacttcagccccgccgccgcccccgccgccagaaccaagcccaaggccccccccagaagcggcgaggtggccaccatcacccccgtgagagccggcctgagcctgagcgagggcgacggcgtgcccggccagggctgcagcgagggcctgcccgccaagagccccggcagaagccccgacctggccccccacctgggcagagccctggaggactgcagcagaggcagcgtgagcaagagcagccccgccagccccgagcccggcggcgacccccagaccgtgtggtacgagtacggctgcgtgtag

SEQ ID NO: 10061 - DNA, 774 bp, synthetic construct
  source 1..774: mol_type = other DNA; note = Synthetic coding sequence
atggccgacaagatggacatgagcctggacgacatcatcaagctgaacagaagccagagaggcggcagaggcggcggcagaggcagaggcagagccggcagccagggcggcagaggcggcggcgcccaggccgccgccagagtgaacagaggcggcggccccatcagaaacagacccgccatcgccagaggcgccgccggcggcggcggcagaaacagacccgccccctacagcagacccaagcagctgcccgacaagtggcagcacgacctgttcgacagcggcttcggcggcggcgccggcgtggagaccggcggcaagctgctggtgagcaacctggacttcggcgtgagcgacgccgacatccaggagctgttcgccgagttcggcaccctgaagaaggccgccgtgcactacgacagaagcggcagaagcctgggcaccgccgacgtgcacttcgagagaaaggccgacgccctgaaggccatgaagcagtacaacggcgtgcccctggacggcagacccatgaacatccagctggtgaccagccagatcgacgcccagagaagacccgcccagagcgtgaacagaggcggcatgaccagaaacagaggcgccggcggcttcggcggcggcggcggcaccagaagaggcaccagaggcggcgccagaggcagaggcagaggcgccggcagaaacagcaagcagcagctgagcgccgaggagctggacgcccagctggacgcctacaacgccagaatggacaccagctag

SEQ ID NO: 10062 - DNA, 876 bp, synthetic construct
  source 1..876: mol_type = other DNA; note = Synthetic coding sequence
atgggcgtggccgccagaccccccgccctgagacactggttcagccacagcatccccctggccatcttcgccctgctgctgctgtacctgagcgtgagaagcctgggcgccagaagcggctgcggccccagagcccagccctgcgtgcccggcgagaccgcccccttccaggtgagacaggagagcggcaccctggaggcccccgagagaaagcagcccccctgcctgggccccagaggcatgctgggcagaatgatgagaagattccacgccagcctgaagcccgagggcgacgtgggcctgagcccctacctggccggctggagagccctggtggagttcctgacccccctgggcagcgtgttcgccttcgccaccagagaggccttcaccaaggtgaccgacctggaggccagagtgcacggccccgacgccgagcactactggagcctggtggccatggccgcctgggagagaagagccggcctgctggagcagcccggcgccgcccccagagaccccaccagaagcagcggcagcagaaccctgctgctgctgcacagagccctgagatggagccagctgtgcctgcacagagtggccaccggcgccctgggcggccccgacgccggcgtgcagtgcagcgacgcctacagagccgccctgggcccccaccacccctggctggtgagacagaccgccagactggccttcctggccttccccggcagaagaagactgctggagctggcctgccccggcgccaccgaggccgaggccagagccgccctggtgagagccgccggcaccctggaggacgtgtacaacagaacccagagcctgctggccgagagaggcctgctgcagctggcctag

SEQ ID NO: 10063 - DNA, 3303 bp, synthetic construct
  source 1..3303: mol_type = other DNA; note = Synthetic coding sequence
atgggcaacgccgccggcagcgccgagcagcccgccggccccgccgcccccccccccaagcagcccgccccccccaagcagcccatgcccgccgccggcgagctggaggagagattcaacagagccctgaactgcatgaacctgccccccgacaaggtgcagctgctgagccagtacgacaacgagaagaagtgggagctgatctgcgaccaggagagattccaggtgaagaacccccccgccgcctacatccagaagctgaagagctacgtggacaccggcggcgtgagcagaaaggtggccgccgactggatgagcaacctgggcttcaagagaagagtgcaggagagcacccaggtgctgagagagctggagaccagcctgagaaccaaccacatcggctgggtgcaggagttcctgaacgaggagaacagaggcctggacgtgctgctggagtacctggccttcgcccagtgcagcgtgacctacgacatggagagcaccgacaacggcgccagcaacagcgagaagaacaagcccctggagcagagcgtggaggacctgagcaagggcccccccagcagcgtgcccaagagcagacacctgaccatcaagctgacccccgcccacagcagaaaggccctgagaaacagcagaatcgtgagccagaaggacgacgtgcacgtgtgcatcatgtgcctgagagccatcatgaactaccagagcggcttcagcctggtgatgaaccaccccgcctgcgtgaacgagatcgccctgagcctgaacaacaagaaccccagaaccaaggccctggtgctggagctgctggccgccgtgtgcctggtgagaggcggccacgacatcatcctggccgccttcgacaacttcaaggaggtgtgcggcgagcagcacagattcgagaagctgatggagtacttcagaaacgaggacagcaacatcgacttcatggtggcctgcatgcagttcatcaacatcgtggtgcacagcgtggagaacatgaacttcagagtgttcctgcagtacgagttcacccacctgggcctggacctgtacctggagagactgagactgaccgagagcgacaagctgcaggtgcagatccaggcctacctggacaacatcttcgacgtgggcgccctgctggaggacaccgagaccaagaacgccgtgctggagcacatggaggagctgcaggagcaggtggccctgctgaccgagagactgagagacgccgagaacgagagcatggccaagatcgccgagctggagaagcagctgagccaggccagaaaggagctggagaccctgagagagagattcagcgagagcaccgccatgggccccagcagaagaccccccgagcccgagaaggccccccccgccgcccccaccagacccagcgccctggagctgaaggtggaggagctggaggagaagggcctgatcagaatcctgagaggccccggcgacgccgtgagcatcgagatcctgcccgtggccgtggccacccccagcggcggcgacgcccccacccccggcgtgcccaccggcagccccagccccgacctggcccccgccgccgagcccgcccccggcgccgccccccccccccccccccccctgcccggcctgcccagcccccaggaggccccccccagcgcccccccccaggccccccccctgcccggcagccccgagcccccccccgccccccccctgcccggcgacctgcccccccccccccccccccccccccccccccccggcaccgacggccccgtgcccccccccccccccccccccccccccccccccggcggcccccccgacgccctgggcagaagagacagcgagctgggccccggcgtgaaggccaagaagcccatccagaccaagttcagaatgcccctgctgaactgggtggccctgaagcccagccagatcaccggcaccgtgttcaccgagctgaacgacgagaaggtgctgcaggagctggacatgagcgacttcgaggagcagttcaagaccaagagccagggccccagcctggacctgagcgccctgaagagcaaggccgcccagaaggcccccagcaaggccaccctgatcgaggccaacagagccaagaacctggccatcaccctgagaaagggcaacctgggcgccgagagaatctgccaggccatcgaggcctacgacctgcaggccctgggcctggacttcctggagctgctgatgagattcctgcccaccgagtacgagagaagcctgatcaccagattcgagagagagcagagacccatggaggagctgagcgaggaggacagattcatgctgtgcttcagcagaatccccagactgcccgagagaatgaccaccctgaccttcctgggcaacttccccgacaccgcccagctgctgatgccccagctgaacgccatcatcgccgccagcatgagcatcaagagcagcgacaagctgagacagatcctggagatcgtgctggccttcggcaactacatgaacagcagcaagagaggcgccgcctacggcttcagactgcagagcctggacgccctgctggagatgaagagcaccgacagaaagcagaccctgctgcactacctggtgaaggtgatcgccgagaagtacccccagctgaccggcttccacagcgacctgcacttcctggacaaggccggcagcgtgagcctggacagcgtgctggccgacgtgagaagcctgcagagaggcctggagctgacccagagagagttcgtgagacaggacgactgcatggtgctgaaggagttcctgagagccaacagccccaccatggacaagctgctggccgacagcaagaccgcccaggaggccttcgagagcgtggtggagtacttcggcgagaaccccaagaccaccagccccggcctgttcttcagcctgttcagcagattcatcaaggcctacaagaaggccgagcaggaggtggagcagtggaagaaggaggccgccgcccaggaggccggcgccgacacccccggcaagggcgagccccccgcccccaagagcccccccaaggccagaagaccccagatggacctgatcagcgagctgaagagaagacagcagaaggagcccctgatctacgagagcgacagagacggcgccatcgaggacatcatcaccgtgatcaagaccgtgcccttcaccgccagaaccggcaagagaaccagcagactgctgtgcgaggccagcctgggcgaggagatgcccctgtag

SEQ ID NO: 10064 - DNA, 1839 bp, synthetic construct
  source 1..1839: mol_type = other DNA; note = Synthetic coding sequence
atggagaaccagctggccaagagcaccgaggagagaaccttccagtaccaggacagcctgcccagcctgcccgtgcccagcctggaggagagcctgaagaagtacctggagagcgtgaagcccttcgccaaccaggaggagtacaagaagaccgaggagatcgtgcagaagttccagagcggcatcggcgagaagctgcaccagaagctgctggagagagccaagggcaagagaaactggctggaggagtggtggctgaacgtggcctacctggacgtgagaatccccagccagctgaacgtgaacttcgccggccccgccgcccacttcgagcactactggccccccaaggagggcacccagctggagagaggcagcatcaccctgtggcacaacctgaactactggcagctgctgagaaaggagaaggtgcccgtgcacaaggtgggcaacacccccctggacatgaaccagttcagaatgctgttcagcacctgcaaggtgcccggcatcaccagagacagcatcatgaactacttcagaaccgagagcgagggcagaagccccaaccacatcgtggtgctgtgcagaggcagagccttcgtgttcgacgtgatccacgagggctgcctggtgaccccccccgagctgctgagacagctgacctacatccacaagaagtgccacagcgagcccgacggccccggcatcgccgccctgaccagcgaggagagaaccagatgggccaaggccagagagtacctgatcggcctggaccccgagaacctggccctgctggagaagatccagagcagcctgctggtgtacagcatggaggacagcagcccccacgtgacccccgaggactacagcgagatcatcgccgccatcctgatcggcgaccccaccgtgagatggggcgacaagagctacaacctgatcagcttcagcaacggcgtgttcggctgcaactgcgaccacgcccccttcgacgccatgatcatggtgaacatcagctactacgtggacgagaagatcttccagaacgagggcagatggaagggcagcgagaaggtgagagacatccccctgcccgaggagctgatcttcatcgtggacgagaaggtgctgaacgacatcaaccaggccaaggcccagtacctgagagaggccagcgacctgcagatcgccgcctacgccttcaccagcttcggcaagaagctgaccaagaacaagatgctgcaccccgacaccttcatccagctggccctgcagctggcctactacagactgcacggccaccccggctgctgctacgagaccgccatgaccagacacttctaccacggcagaaccgagaccatgagaagctgcaccgtggaggccgtgagatggtgccagagcatgcaggaccccagcgtgaacctgagagagagacagcagaagatgctgcaggccttcgccaagcacaacaagatgatgaaggactgcagcgccggcaagggcttcgacagacacctgctgggcctgctgctgatcgccaaggaggagggcctgcccgtgcccgagctgttcaccgaccccctgttcagcaagagcggcggcggcggcaacttcgtgctgagcaccagcctggtgggctacctgagagtgcagggcgtggtggtgcccatggtgcacaacggctacggcttcttctaccacatcagagacgacagattcgtggtggcctgcagcgcctggaagagctgccccgagaccgacgccgagaagctggtgcagctgaccttctgcgccttccacgacatgatccagctgatgaacagcacccacctgtag

SEQ ID NO: 10065 - DNA, 1773 bp, synthetic construct
  source 1..1773: mol_type = other DNA; note = Synthetic coding sequence
atgagcgacagccccgccggcagcaaccccagaacccccgagagcagcggcagcggcagcggcggcggcggcaagagacccgccgtgcccgccgccgtgagcctgctgccccccgccgaccccctgagacaggccaacagactgcccatcagagtgctgaagatgctgagcgcccacaccggccacctgctgcaccccgagtacctgcagcccctgagcagcacccccgtgagccccatcgagctggacgccaagaagagccccctggccctgctggcccagacctgcagccagatcggcaagcccgaccccccccccagcagcaagctgaacagcgtggccgccgccgccaacggcctgggcgccgagaaggaccccggcagaagcgcccccggcgccgccagcgccgccgccgccctgaagcagctgggcgacagccccgccgaggacaagagcagcttcaagccctacagcaagggcagcggcggcggcgacagcagaaaggacagcggcagcagcagcgtgagcagcaccagcagcagcagcagcagcagccccggcgacaaggccggcttcagagtgcccagcgccgcctgcccccccttccccccccacggcgcccccgtgagcgccagcagcagcagcagcagccccggcggcagcagaggcggcagcccccaccacagcgactgcaagaacggcggcggcgtgggcggcggcgagctggacaagaaggaccaggagcccaagcccagccccgagcccgccgccgtgagcagaggcggcggcggcgagcccggcgcccacggcggcgccgagagcggcgccagcggcagaaagagcgagccccccagcgccctggtgggcgccggccacgtggcccccgtgagcccctacaagcccggccacagcgtgttccccctgccccccagcagcatcggctaccacggcagcatcgtgggcgcctacgccggctaccccagccagttcgtgcccggcctggaccccagcaagagcggcctggtgggcggccagctgagcggcggcctgggcctgccccccggcaagccccccagcagcagccccctgaccggcgccagcccccccagcttcctgcagggcctgtgcagagacccctactgcctgggcggctaccacggcgccagccacctgggcggcagcagctgcagcacctgcagcgcccacgaccccgccggccccagcctgaaggccggcggctaccccctggtgtaccccggccaccccctgcagcccgccgccctgagcagcagcgccgcccaggccgccctgcccggccaccccctgtacacctacggcttcatgctgcagaacgagcccctgccccacagctgcaactgggtggccgccagcggcccctgcgacaagagattcgccaccagcgaggagctgctgagccacctgagaacccacaccgccctgcccggcgccgagaagctgctggccgcctaccccggcgccagcggcctgggcagcgccgccgccgccgccgccgccgccgccagctgccacctgcacctgcccccccccgccgcccccggcagccccggcagcctgagcctgagaaacccccacaccctgggcctgagcagataccacccctacggcaagagccacctgagcaccgccggcggcctggccgtgcccagcctgcccaccgccggcccctactacagcccctacgccctgtacggccagagactggccagcgccagcgccctgggctaccagtag

SEQ ID NO: 10066 - DNA, 1020 bp, synthetic construct
  source 1..1020: mol_type = other DNA; note = Synthetic coding sequence
atgtggaccgccagaggccccttcagaagagacagatggagcagcgaggacgaggaggccgccggccccagccaggccctgagccccctgctgagcgacaccagaaagatcgtgagcgagggcgagctggaccagctggcccagatcagacccctgatcttcaacttccacgagcagaccgccatcaaggactgcctgaagatcctggaggagaagaccgccgcctacgacatcatgcaggagttcatggccctggagctgaagaacctgcccggcgagttcaacagcggcaaccagcccagcaacagagagaagaacagatacagagacatcctgccctacgacagcaccagagtgcccctgggcaagagcaaggactacatcaacgccagctacatcagaatcgtgaactgcggcgaggagtacttctacatcgccacccagggccccctgctgagcaccatcgacgacttctggcagatggtgctggagaacaacagcaacgtgatcgccatgatcaccagagagatcgagggcggcatcatcaagtgctaccactactggcccatcagcctgaagaagcccctggagctgaagcacttcagagtgttcctggagaactaccagatcctgcagtacttcatcatcagaatgttccaggtggtggagaagagcaccggcaccagccacagcgtgaagcagctgcagttcaccaagtggcccgaccacggcacccccgccagcgccgacagcttcatcaagtacatcagatacgccagaaagagccacctgaccggccccatggtggtgcactgcagcgccggcatcggcagaaccggcgtgttcctgtgcgtggacgtggtgttctgcgccatcgtgaagaactgcagcttcaacatcatggacatcgtggcccagatgagagagcagagaagcggcatggtgcagaccaaggagcagtaccacttctgctacgacatcgtgctggaggtgctgagaaagctgctgaccctggactag

SEQ ID NO: 10067 - DNA, 1917 bp, synthetic construct
  source 1..1917: mol_type = other DNA; note = Synthetic coding sequence
atgagcgccctggccggcgaggacgtgtggagatgccccggctgcggcgaccacatcgcccccagccagatctggtacagaaccgtgaacgagacctggcacggcagctgcttcagatgcagcgagtgccaggacagcctgaccaactggtactacgagaaggacggcaagctgtactgccccaaggactactggggcaagttcggcgagttctgccacggctgcagcctgctgatgaccggccccttcatggtggccggcgagttcaagtaccaccccgagtgcttcgcctgcatgagctgcaaggtgatcatcgaggacggcgacgcctacgccctggtgcagcacgccaccctgtactgcggcaagtgccacaacgaggtggtgctggcccccatgttcgagagactgagcaccgagagcgtgcaggagcagctgccctacagcgtgaccctgatcagcatgcccgccaccaccgagggcagaagaggcttcagcgtgagcgtggagagcgcctgcagcaactacgccaccaccgtgcaggtgaaggaggtgaacagaatgcacatcagccccaacaacagaaacgccatccaccccggcgacagaatcctggagatcaacggcacccccgtgagaaccctgagagtggaggaggtggaggacgccatcagccagaccagccagaccctgcagctgctgatcgagcacgaccccgtgagccagagactggaccagctgagactggaggccagactggccccccacatgcagaacgccggccacccccacgccctgagcaccctggacaccaaggagaacctggagggcaccctgagaagaagaagcctgagaagaagcaacagcatcagcaagagccccggccccagcagccccaaggagcccctgctgttcagcagagacatcagcagaagcgagagcctgagatgcagcagcagctacagccagcagatcttcagaccctgcgacctgatccacggcgaggtgctgggcaagggcttcttcggccaggccatcaaggtgacccacaaggccaccggcaaggtgatggtgatgaaggagctgatcagatgcgacgaggagacccagaagaccttcctgaccgaggtgaaggtgatgagaagcctggaccaccccaacgtgctgaagttcatcggcgtgctgtacaaggacaagaagctgaacctgctgaccgagtacatcgagggcggcaccctgaaggacttcctgagaagcatggaccccttcccctggcagcagaaggtgagattcgccaagggcatcgccagcggcatggcctacctgcacagcatgtgcatcatccacagagacctgaacagccacaactgcctgatcaagctggacaagaccgtggtggtggccgacttcggcctgagcagactgatcgtggaggagagaaagagagcccccatggagaaggccaccaccaagaagagaaccctgagaaagaacgacagaaagaagagatacaccgtggtgggcaacccctactggatggcccccgagatgctgaacggcaagagctacgacgagaccgtggacatcttcagcttcggcatcgtgctgtgcgagatcatcggccaggtgtacgccgaccccgactgcctgcccagaaccctggacttcggcctgaacgtgaagctgttctgggagaagttcgtgcccaccgactgcccccccgccttcttccccctggccgccatctgctgcagactggagcccgagagcagacccgccttcagcaagctggaggacagcttcgaggccctgagcctgtacctgggcgagctgggcatccccctgcccgccgagctggaggagctggaccacaccgtgagcatgcagtacggcctgaccagagacagccccccctag

SEQ ID NO: 10068 - DNA, 606 bp, synthetic construct
  source 1..606: mol_type = other DNA; note = Synthetic coding sequence
atggccgccgccaaggacacccacgaggaccacgacaccagcaccgagaacaccgacgagagcaaccacgacccccagttcgagcccatcgtgagcctgcccgagcaggagatcaagaccctggaggaggacgaggaggagctgttcaagatgagagccaagctgttcagattcgccagcgagaacgacctgcccgagtggaaggagagaggcaccggcgacgtgaagctgctgaagcacaaggagaagggcgccatcagactgctgatgagaagagacaagaccctgaagatctgcgccaaccactacatcacccccatgatggagctgaagcccaacgccggcagcgacagagcctgggtgtggaacacccacgccgacttcgccgacgagtgccccaagcccgagctgctggccatcagattcctgaacgccgagaacgcccagaagttcaagaccaagttcgaggagtgcagaaaggagatcgaggagagagagaagaaggccggcagcggcaagaacgaccacgccgagaaggtggccgagaagctggaggccctgagcgtgaaggaggagaccaaggaggacgccgaggagaagcagtag

SEQ ID NO: 10069 - DNA, 2154 bp, synthetic construct
  source 1..2154: mol_type = other DNA; note = Synthetic coding sequence
atggccgccgacaagcccgccgaccagggcgccgagaagcacgagggcaccggccagagcagcggcatcaccgaccaggagaaggagctgagcaccaacgccttccaggccttcaccagcggcaactacgacgcctgcctgcagcacctggcctgcctgcaggacatcaacaaggacgactacaagatcatcctgaacaccgccgtggccgagttcttcaagagcaaccagaccaccaccgacaacctgagacagaccctgaaccagctgaagaaccaggtgcacagcgccgtggaggagatggacggcctggacgacgtggagaacagcatgctgtactacaaccaggccgtgatcctgtaccacctgagacagtacaccgaggccatcagcgtgggcgagaagctgtaccagttcatcgagcccttcgaggagaagttcgcccaggccgtgtgcttcctgctggtggacctgtacatcctgacctaccaggccgagaaggccctgcacctgctggccgtgctggagaagatgatcagccagggcaacaacaacaagaacggcaagaacgagaccggcaacaacaacaacaaggacggcagcaaccacaaggccgagagcggcgccctgatcgaggccgccaagagcaagatccaccagtacaaggtgagagcctacatccagatgaagagcctgaaggcctgcaagagagagatcaagagcgtgatgaacaccgccggcaacagcgcccccagcctgttcctgaagagcaacttcgagtacctgagaggcaactacagaaaggccgtgaagctgctgaacagcagcaacatcgccgagcaccccggcttcatgaagaccggcgagtgcctgagatgcatgttctggaacaacctgggctgcatccacttcgccatgagcaagcacaacctgggcatcttctacttcaagaaggccctgcaggagaacgacaacgtgtgcgcccagctgagcgccggcagcaccgaccccggcaagaagttcagcggcagacccatgtgcaccctgctgaccaacaagagatacgagctgctgtacaactgcggcatccagctgctgcacatcggcagacccctggccgccttcgagtgcctgatcgaggccgtgcaggtgtaccacgccaaccccagactgtggctgagactggccgagtgctgcatcgccgccaacaagggcaccagcgagcaggagaccaagggcctgcccagcaagaagggcatcgtgcagagcatcgtgggccagggctaccacagaaagatcgtgctggccagccagagcatccagaacaccgtgtacaacgacggccagagcagcgccatccccgtggccagcatggagttcgccgccatctgcctgagaaacgccctgctgctgctgcccgaggagcagcaggaccccaagcaggagaacggcgccaagaacagcaaccagctgggcggcaacaccgagagcagcgagagcagcgagacctgcagatgcagcatcctggcctgcagcgcctacgtggccctggccctgggcgacaacctgatggccctgaaccacgccgacaagctgctgcagcagcccaagctgagcggcagcctgaagttcctgggccacctgtacgccgccgaggccctgatcagcctggacagaatcagcgacgccatcacccacctgaaccccgagaacgtgaccgacgtgagcctgggcatcagcagcaacgagcaggaccagggcagcgacaagggcgagaacgaggccatggagagcagcggcaagagagccccccagtgctaccccagcagcgtgaacagcgccagaaccgtgatgctgttcaacctgggcagcgcctactgcctgagaagcgagtacgacaaggccagaaagtgcctgcaccaggccgccagcatgatccaccccaaggaggtgccccccgaggccatcctgctggccgtgtacctggagctgcagaacggcaacacccagctggccctgcagatcatcaagagaaaccagctgctgcccgccgtgaagacccacagcgaggtgagaaagaagcccgtgttccagcccgtgcaccccatccagcccatccagatgcccgccttcaccaccgtgcagagaaagtag

SEQ ID NO: 10070 - DNA, 1488 bp, synthetic construct
  source 1..1488: mol_type = other DNA; note = Synthetic coding sequence
atggaggccctgctggagggcatccagaacagaggccacggcggcggcttcctgaccagctgcgaggccgagctgcaggagctgatgaagcagatcgacatcatggtggcccacaagaagagcgagtgggagggcagaacccacgccctggagacctgcctgaagatcagagagcaggagctgaagagcctgagaagccagctggacgtgacccacaaggaggtgggcatgctgcaccagcaggtggaggagcacgagaagatcaagcaggagatgaccatggagtacaagcaggagctgaagaagctgcacgaggagctgtgcatcctgaagagaagctacgagaagctgcagaagaagcagatgagagagttcagaggcaacaccaagaaccacagagaggacagaagcgagatcgagagactgaccgccaagatcgaggagttcagacagaagagcctggactgggagaagcagagactgatctaccagcagcaggtgagcagcctggaggcccagagaaaggccctggccgagcagagcgagatcatccaggcccagctggtgaacagaaagcagaagctggagagcgtggagctgagcagccagagcgagatccagcacctgagcagcaagctggagagagccaacgacaccatctgcgccaacgagctggagatcgagagactgaccatgagagtgaacgacctggtgggcaccagcatgaccgtgctgcaggagcagcagcagaaggaggagaagctgagagagagcgagaagctgctggaggccctgcaggaggagaagagagagctgaaggccgccctgcagagccaggagaacctgatccacgaggccagaatccagaaggagaagctgcaggagaaggtgaaggccaccaacacccagcacgccgtggaggccatcagcctggagagcgtgagcgccacctgcaagcagctgagccaggagctgatggagaagtacgaggagctgaagagaatggaggcccacaacaacgagtacaaggccgagatcaagaagctgaaggagcagatcctgcagggcgagcagagctacagcagcgccctggagggcatgaagatggagatcagccacctgacccaggagctgcaccagagagacatcaccatcgccagcaccaagggcagcagcagcgacatggagaagagactgagagccgagatgcagaaggccgaggacaaggccgtggagcacaaggagatcctggaccagctggagagcctgaagctggagaacagacacctgagcgagatggtgatgaagctggagctgggcctgcacgagtgcagcctgcccgtgagccccctgggcagcatcgccaccagattcctggaggaggaggagctgagaagccaccacatcctggagagactggacgcccacatcgaggagctgaagagagagagcgagaagaccgtgagacagttcaccgccctgaagtag

SEQ ID NO: 10071 - DNA, 1962 bp, synthetic construct
  source 1..1962: mol_type = other DNA; note = Synthetic coding sequence
atgatccccccccaggaggccagcgccagaagaagagagatcgaggacaagctgaagcaggaggaggagaccctgagcttcatcagagacagcctggagaagagcgaccagctgaccaagaacatggtgagcatcctgagcagcttcgagagcagactgatgaagctggagaacagcatcatccccgtgcacaagcagaccgagaacctgcagagactgcaggagaacgtggagaagaccctgagctgcctggaccacgtgatcagctactaccacgtggccagcgacaccgagaagatcatcagagagggccccaccggcagactggaggagtacctgggcagcatggccaagatccagaaggccgtggagtacttccaggacaacagccccgacagccccgagctgaacaaggtgaagctgctgttcgagagaggcaaggaggccctggagagcgagttcagaagcctgatgaccagacacagcaaggtggtgagccccgtgctgatcctggacctgatcagcggcgacgacgacctggaggcccaggaggacgtgaccctggagcacctgcccgagagcgtgctgcaggacgtgatcagaatcagcagatggctggtggagtacggcagaaaccaggacttcatgaacgtgtactaccagatcagaagcagccagctggacagaagcatcaagggcctgaaggagcacttccacaagagcagcagcagcagcggcgtgccctacagccccgccatccccaacaagagaaaggacacccccaccaagaagcccgtgaagagacccggcagagacgacatgctggacgtggagaccgacgcctacatccactgcgtgagcgccttcgtgaagctggcccagagcgagtaccagctgctggccgacatcatccccgagcaccaccagaagaagaccttcgacagcctgatccaggacgccctggacggcctgatgctggagggcgagaacatcgtgagcgccgccagaaaggccatcgtgagacacgacttcagcaccgtgctgaccgtgttccccatcctgagacacctgaagcagaccaagcccgagttcgaccaggtgctgcagggcaccgccgccagcaccaagaacaagctgcccggcctgatcaccagcatggagaccatcggcgccaaggccctggaggacttcgccgacaacatcaagaacgaccccgacaaggagtacaacatgcccaaggacggcaccgtgcacgagctgaccagcaacgccatcctgttcctgcagcagctgctggacttccaggagaccgccggcgccatgctggccagccaggagaccagcagcagcgccaccagctacagcagcgagttcagcaagagactgctgagcacctacatctgcaaggtgctgggcaacctgcagctgaacctgctgagcaagagcaaggtgtacgaggaccccgccctgagcgccatcttcctgcacaacaactacaactacatcctgaagagcctggagaagagcgagctgatccagctggtggccgtgacccagaagaccgccgagagaagctacagagagcacatcgagcagcagatccagacctaccagagaagctggctgaaggtgaccgactacatcgccgagaagaacctgcccgtgttccagcccggcgtgaagctgagagacaaggagagacagatcatcaaggagagattcaagggcttcaacgacggcctggaggagctgtgcaagatccagaaggcctgggccatccccgacaccgagcagagagacagaatcagacaggcccagaagaccatcgtgaaggagacctacggcgccttcctgcagaagttcggcagcgtgcccttcaccaagaaccccgagaagtacatcaagtacggcgtggagcaggtgggcgacatgatcgacagactgttcgacaccagcgcctag

SEQ ID NO: 10072 - DNA, 735 bp, synthetic construct
  source 1..735: mol_type = other DNA; note = Synthetic coding sequence
atggagctgaccatcttcatcctgagactggccatctacatcctgaccttccccctgtacctgctgaacttcctgggcctgtggagctggatctgcaagaagtggttcccctacttcctggtgagattcaccgtgatctacaacgagcagatggccagcaagaagagagagctgttcagcaacctgcaggagttcgccggccccagcggcaagctgagcctgctggaggtgggctgcggcaccggcgccaacttcaagttctacccccccggctgcagagtgacctgcatcgaccccaaccccaacttcgagaagttcctgatcaagagcatcgccgagaacagacacctgcagttcgagagattcgtggtggccgccggcgagaacatgcaccaggtggccgacggcagcgtggacgtggtggtgtgcaccctggtgctgtgcagcgtgaagaaccaggagagaatcctgagagaggtgtgcagagtgctgagacccggcggcgccttctacttcatggagcacgtggccgccgagtgcagcacctggaactacttctggcagcaggtgctggaccccgcctggcacctgctgttcgacggctgcaacctgaccagagagagctggaaggccctggagagagccagcttcagcaagctgaagctgcagcacatccaggcccccctgagctgggagctggtgagaccccacatctacggctacgccgtgaagtag

SEQ ID NO: 10073 - DNA, 3522 bp, synthetic construct
  source 1..3522: mol_type = other DNA; note = Synthetic coding sequence
atggccgtggagaccctgagccccgactgggagttcgacagagtggacgacggcagccagaagatccacgccgaggtgcagctgaagaactacggcaagttcctggaggagtacaccagccagctgagaagaatcgaggacgccctggacgacagcatcggcgacgtgtgggacttcaacctggaccccatcgccctgaagctgctgccctacgagcagagcagcctgctggagctgatcaagaccgagaacaaggtgctgaacaaggtgatcaccgtgtacgccgccctgtgctgcgagatcaagaagctgaagtacgaggccgagaccaagttctacaacggcctgctgttctacggcgagggcgccaccgacgccagcatggtggagggcgactgccagatccagatgggcagattcatcagcttcctgcaggagctgagctgcttcgtgaccagatgctacgaggtggtgatgaacgtggtgcaccagctggccgccctgtacatcagcaacaagatcgcccccaagatcatcgagaccaccggcgtgcacttccagaccatgtacgagcacctgggcgagctgctgaccgtgctgctgaccctggacgagatcatcgacaaccacatcaccctgaaggaccactggaccatgtacaagagactgctgaagagcgtgcaccacaaccccagcaagttcggcatccaggaggagaagctgaagcccttcgagaagttcctgctgaagctggagggccagctgctggacggcatgatcttccaggcctgcatcgagcagcagttcgacagcctgaacggcggcgtgagcgtgagcaagaacagcaccttcgccgaggagttcgcccacagcatcagaagcatcttcgccaacgtggaggccaagctgggcgagcccagcgagatcgaccagagagacaagtacgtgggcatctgcggcctgttcgtgctgcacttccagatcttcagaaccatcgacaagaagttctacaagagcctgctggacatctgcaagaaggtgcccgccatcaccctgaccgccaacatcatctggttccccgacaacttcctgatccagaagatccccgccgccgccaagctgctggacagaaagagcctgcaggccatcaagatccacagagacaccttcctgcagcagaaggcccagagcctgaccaaggacgtgcagagctactacgtgttcgtgagcagctggatgatgaagatggagagcatcctgagcaaggagcagagaatggacaagttcgccgaggacctgaccaacagatgcaacgtgttcatccagggcttcctgtacgcctacagcatcagcaccatcatcaagaccaccatgaacctgtacatgagcatgcagaagcccatgaccaagaccagcgtgaaggccctgtgcagactggtggagctgctgaaggccatcgagcacatgttctacagaagaagcatggtggtggccgacagcgtgagccacatcacccagcacctgcagcaccaggccctgcacagcatcagcgtggccaagaagagagtgatcagcgacaagaagtacagcgagcagagactggacgtgctgagcgccctggtgctggccgagaacaccctgaacggccccagcaccaagcagagaagactgatcgtgagcctggccctgagcgtgggcacccagatgaagaccttcaaggacgaggagctgttccccctgcaggtggtgatgaagaagctggacctgatcagcgagctgagagagagagtgcagacccagtgcgactgctgcttcctgtactggcacagagccgtgttccccatctacctggacgacgtgtacgagaacgccgtggacgccgccagactgcactacatgttcagcgccctgagagactgcgtgcccgccatgatgcacgccagacacctggagagctacgagatcctgctggactgctacgacaaggagatcatggagatcctgaacgagcacctgctggacaagctgtgcaaggagatcgagaaggacctgagactgagcgtgcacacccacctgaagctggacgacagaaaccccttcaaggtgggcatgaaggacctggccctgttcttcagcctgaaccccatcagattcttcaacagattcatcgacatcagagcctacgtgacccactacctggacaagaccttctacaacctgaccaccgtggccctgcacgactgggccacctacagcgagatgagaaacctggccacccagagatacggcctggtgatgaccgaggcccacctgcccagccagaccctggagcagggcctggacgtgctggagatcatgagaaacatccacatcttcgtgagcagatacctgtacaacctgaacaaccagatcttcatcgagagaaccagcaacaacaagcacctgaacaccatcaacatcagacacatcgccaacagcatcagaacccacggcaccggcatcatgaacaccaccgtgaacttcacctaccagttcctgaagaagaagttctacatcttcagccagttcatgtacgacgagcacatcaagagcagactgatcaaggacatcagattcttcagagagatcaaggaccagaacgaccacaagtaccccttcgacagagccgagaagttcaacagaggcatcagaaagctgggcgtgacccccgagggccagagctacctggaccagttcagacagctgatcagccagatcggcaacgccatgggctacgtgagaatgatcagaagcggcggcctgcactgcagcagcaacgccatcagattcgtgcccgacctggaggacatcgtgaacttcgaggagctggtgaaggaggagggcctggccgaggagaccctgaaggccgccagacacctggacagcgtgctgagcgaccacaccagaaacagcgccgagggcaccgagtacttcaagatgctggtggacgtgttcgcccccgagttcagaagacccaagaacatccacctgagaaacttctacatcatcgtgccccccctgaccctgaacttcgtggagcacagcatcagctgcaaggagaagctgaacaagaagaacaagatcggcgccgccttcaccgacgacggcttcgccatgggcgtggcctacatcctgaagctgctggaccagtacagagagttcgacagcctgcactggttccagagcgtgagagagaagtacctgaaggagatcagagccgtggccaagcagcagaacgtgcagagcgccagccaggacgagaagctgctgcagaccatgaacctgacccagaagagactggacgtgtacctgcaggagttcgagctgctgtacttcagcctgagcagcgccagaatcttcttcagagccgacaagaccgccgccgaggagaaccaggagaagaaggagaaggaggaggagaccaagaccagcaacggcgacctgagcgacagcaccgtgagcgccgaccccgtggtgaagtag

SEQ ID NO: 10074 - DNA, 972 bp, synthetic construct
  source 1..972: mol_type = other DNA; note = Synthetic coding sequence
atgctgagatggaccgtgcacctggagggcggccccagaagagtgaaccacgccgccgtggccgtgggccacagagtgtacagcttcggcggctactgcagcggcgaggactacgagaccctgagacagatcgacgtgcacatcttcaacgccgacacccacaagtggttcacccccagagtgagcggcaccgtgcccggcgccagagacggccacagcgcctgcgtgctgggcaagatcatgtacatcttcggcggctacgagcagcaggccgactgcttcagcaacgacatccacaagctggacaccagcaccatgacctggaccctgatctgcaccaagggcagccccgccagatggagagacttccacagcgccaccatgctgggcagccacatgtacgtgttcggcggcagagccgacagattcggccccttccacagcaacaacgagatctactgcaacagaatcagagtgttcgacaccagaaccgaggcctggctggactgcccccccacccccgtgctgcccgagggcagaagaagccacagcgccttcggctacaacggcgagctgtacatcttcggcggctacaacgccagactgaacagacacttccacgacctgtggaagttcaaccccgtgagcttcacctggaagaagatcgagcccaagggcaagggcccctgccccagaagaagacagtgctgctgcatcgtgggcgacaagatcgtgctgttcggcggcaccagccccagccccgaggagggcctgggcgacgagttcgacctgatcgaccacagcgacctgcacatcctggacttcagccccagcctgaagaccctgtgcaagctggccgtgatccagtacaacctggaccagagctgcctgccccacgacatcagatgggagctgaacgccatgaccaccaacagcaacatcagcagacccatcgtgagcagccacggctag

SEQ ID NO: 10075 - DNA, 2517 bp, synthetic construct
  source 1..2517: mol_type = other DNA; note = Synthetic coding sequence
atgaccggcgccgagatcgagcccagcgcccaggccaagcccgagaagaaggccggcgaggaggtgatcgccggccccgagagagagaacgacgtgcccctggtggtgagacccaaggtgagaacccaggccaccaccggcgccagacccaagaccgagaccaagagcgtgcccgccgccagacccaagaccgaggcccaggccatgagcggcgccagacccaagaccgaggtgcaggtgatgggcggcgccagacccaagaccgaggcccagggcatcaccggcgccagacccaagaccgacgccagagccgtgggcggcgccagaagcaagaccgacgccaaggccatccccggcgccagacccaaggacgaggcccaggcctgggcccagagcgagttcggcaccgaggccgtgagccaggccgagggcgtgagccagaccaacgccgtggcctggcccctggccaccgccgagagcggcagcgtgaccaagagcaagggcctgagcatggacagagagctggtgaacgtggacgccgagaccttccccggcacccagggccagaagggcatccagccctggttcggccccggcgaggagaccaacatgggcagctggtgctacagcagacccagagccagagaggaggccagcaacgagagcggcttctggagcgccgacgagaccagcaccgccagcagcttctggaccggcgaggagaccagcgtgagaagctggcccagagaggagagcaacaccagaagcagacacagagccaagcaccagaccaaccccagaagcagacccagaagcaagcaggaggcctacgtggacagctggagcggcagcgaggacgaggccagcaaccccttcagcttctgggtgggcgagaacaccaacaacctgttcagacccagagtgagagaggaggccaacatcagaagcaagctgagaaccaacagagaggactgcttcgagagcgagagcgaggacgagttctacaagcagagctgggtgctgcccggcgaggaggccaacagcagattcagacacagagacaaggaggaccccaacaccgccctgaagctgagagcccagaaggacgtggacagcgacagagtgaagcaggagcccagattcgaggaggaggtgatcatcggcagctggttctgggccgagaaggaggccagcctggagggcggcgccagcgccatctgcgagagcgagcccggcaccgaggagggcgccatcggcggcagcgcctactgggccgaggagaagagcagcctgggcgccgtggccagagaggaggccaagcccgagagcgaggaggaggccatcttcggcagctggttctgggacagagacgaggcctgcttcgacctgaacccctgccccgtgtacaaggtgagcgacagattcagagacgccgccgaggagctgaacgccagcagcagaccccagacctgggacgaggtgaccgtggagttcaagcccggcctgttccacggcgtgggcttcagaagcaccagccccttcggcatccccgaggaggccagcgagatgctggaggccaagcccaagaacctggagctgagccccgagggcgaggagcaggagagcctgctgcagcccgaccagcccagccccgagttcaccttccagtacgaccccagctacagaagcgtgagagagatcagagagcacctgagagccagagagagcgccgagagcgagagctggagctgcagctgcatccagtgcgagctgaagatcggcagcgaggagttcgaggagttcctgctgctgatggacaagatcagagaccccttcatccacgagatcagcaagatcgccatgggcatgagaagcgccagccagttcaccagagacttcatcagagacagcggcgtggtgagcctgatcgagaccctgctgaactaccccagcagcagagtgagaaccagcttcctggagaacatgatccacatggcccccccctaccccaacctgaacatgatcgagaccttcatctgccaggtgtgcgaggagaccctggcccacagcgtggacagcctggagcagctgaccggcatcagaatgctgagacacctgaccatgaccatcgactaccacaccctgatcgccaactacatgagcggcttcctgagcctgctgaccaccgccaacgccagaaccaagttccacgtgctgaagatgctgctgaacctgagcgagaaccccgccgtggccaagaagctgttcagcgccaaggccctgagcatcttcgtgggcctgttcaacatcgaggagaccaacgacaacatccagatcgtgatcaagatgttccagaacatcagcaacatcatcaagagcggcaagatgagcctgatcgacgacgacttcagcctggagcccctgatcagcgccttcagagagttcgaggagctggccaagcagctgcaggcccagatcgacaaccagaacgaccccgaggtgggccagcagagctag

SEQ ID NO: 10076 - DNA, 2649 bp, synthetic construct
  source 1..2649: mol_type = other DNA; note = Synthetic coding sequence
atgcccggcagagccagaaccagagccagaggcagagccagaagaagagagagctaccagcaggaggcccccggcggccccagagcccccggcagcgccaccacccaggagcccccccagctgcagagcacccccagacccctgcaggaggaggtgcccgtggtgagacccctgcagcccagagccgccagaggcggcgccggcggcggcgcccagagccagggcgtgaaggagcccggccccgaggccggcctgcacaccgcccccctgcaggagagaagaatcggcggcgtgttccaggacctggtggtgaacaccagacaggacatgaagcacgtgaaggacagcaagaccggcagcgagggcaccgtggtgcagctgctggccaaccacttcagagtgatcagcagaccccagtgggtggcctacaagtacaacgtggactacaagcccgacatcgaggacggcaacctgagaaccatcctgctggaccagcacagaagaaagttcggcgagagacacatcttcgacggcaacagcctgctgctgagcagacccctgaaggagagaagagtggagtggctgagcaccaccaaggacaagaacatcgtgaagatcaccgtggagttcagcaaggagctgacccccaccagccccgactgcctgagatactacaacatcctgttcagaagaaccttcaagctgctggacttcgagcaggtgggcagaaactactacaccaagaagaaggccatccagctgtacagacacggcaccagcctggagatctggctgggctacgtgaccagcgtgctgcagtacgagaacagcatcaccctgtgcgccgacgtgagccacaagctgctgagaatcgagaccgcctacgacttcatcaagagaaccagcgcccaggcccagaccggcaacatcagagaggaggtgaccaacaagctgatcggcagcatcgtgctgaccaagtacaacaacaagacctacagagtggacgacatcgactggaagcagaaccccgaggacaccttcaacaagagcgacggcagcaagatcacctacatcgactactacagacagcagcacaaggagatcgtgaccgtgaagaagcagcccctgctggtgagccagggcagatggaagaagggcctgaccggcacccagagagagcccatcctgctgatcccccagctgtgccacatgaccggcctgaccgacgagatctgcaaggactacagcatcgtgaaggagctggccaagcacaccagactgagccccagaagaagacaccacaccctgaaggagttcatcaacaccctgcaggacaacaagaaggtgagagagctgctgcagctgtgggacctgaagttcgacaccaacttcctgagcgtgcccggcagagtgctgaagaacgccaacatcgtgcagggcagaagaatggtgaaggccaacagccagggcgactggagcagagagatcagagagctgcccctgctgaacgccatgcccctgcacagctggctgatcctgtacagcagaagcagccacagagaggccatgagcctgaagggccacctgcagagcgtgaccgcccccatgggcatcaccatgaagcccgccgagatgatcgaggtggacggcgacgccaacagctacatcgacaccctgagaaagtacaccagacccaccctgcagatgggcatgagctgcctgctggtgttcaaggtgatctgcatcctgcccaacgacgacaagagaagatacgacagcatcaagagatacctgtgcaccaagtgccccatccccagccagtgcgtggtgaagaagaccctggagaaggtgcaggccagaaccatcgtgaccaagatcgcccagcagatgaactgcaagatgggcggcgccctgtggaaggtggagaccgacgtgcagagaaccatgttcgtgggcatcgactgcttccacgacatcgtgaacagacagaagagcatcgccggcttcgtggccagcaccaacgccgagctgaccaagtggtacagccagtgcgtgatccagaagaccggcgaggagctggtgaaggagctggagatctgcctgaaggccgccctggacgtgtggtgcaagaacgagagcagcatgccccacagcgtgatcgtgtacagagacggcgtgggcgacggccagctgcaggccctgctggaccacgaggccaagaagatgagcacctacctgaagaccatcagccccaacaacttcaccctggccttcatcgtggtgaagaagagaatcaacaccagattcttcctgaagcacggcagcaacttccagaaccccccccccggcaccgtgatcgacgtggagctgaccagaaacgagtggtacgacttcttcatcgtgagccagagcgtgcaggacggcaccgtgacccccacccactacaacgtgatctacgacaccatcggcctgagccccgacaccgtgcagagactgacctactgcctgtgccacatgtactacaacctgcccggcatcatcagagtgcccgccccctgccactacgcccacaagctggcctacctggtgggccagagcatccaccaggagcccaacagaagcctgagcaccagactgttctacctgtag

SEQ ID NO: 10077 - DNA, 1917 bp, synthetic construct
  source 1..1917: mol_type = other DNA; note = Synthetic coding sequence
atgaacagacaggtgtgcaagaagagcttcagcggcagaagccagggcttcagcggcagaagcgccgtggtgagcggcagcagcagaatgagctgcgtggccagaagcggcggcgccggcggcggcgcctgcggcttcagaagcggcgccggcagcttcggcagcagaagcctgtacaacctgggcagcaacaagagcatcagcatcagcgtggccgccggcagcagcagagccggcggcttcggcggcggcagaagcagctgcggcttcgccggcggctacggcggcggcttcggcggcagctacggcggcggcttcggcggcggcagaggcgtgggcagcggcttcggcggcgccggcggcttcggcggcgccggcggcttcggcggccccggcgtgttcggcggccccggcagcttcggcggccccggcggcttcggccccggcggcttccccggcggcatccaggaggtgatcgtgaaccagagcctgctgcagcccctgaacgtggagatcgacccccagatcggccaggtgaaggcccaggagagagagcagatcaagaccctgaacaacaagttcgccagcttcatcgacaaggtgagattcctggagcagcagaacaaggtgctggagaccaagtgggagctgctgcagcagcagaccaccggcagcggccccagcagcctggagccctgcttcgagagctacatcagcttcctgtgcaagcagctggacagcctgctgggcgagagaggcaacctggagggcgagctgaagagcatgcaggacctggtggaggacttcaagaagaagtacgaggacgagatcaacaagagaaccgccgccgagaacgagttcgtgggcctgaagaaggacgtggacgccgccttcatgaacaaggtggagctgcaggccaaggtggacagcctgaccgacgaggtgagcttcctgagaaccctgtacgagatggagctgagccagatgcagagccacgccagcgacaccagcgtggtgctgagcatggacaacaacagatgcctggacctgggcagcatcatcgccgaggtgagagcccagtacgaggagatcgcccagagaagcaagagcgaggccgaggccctgtaccagaccaagctgggcgagctgcagaccaccgccggcagacacggcgacgacctgagaaacaccaagagcgagatcatggagctgaacagaatgatccagagactgagagccgagatcgagaacgtgaagaagcagaacgccaacctgcagaccgccatcgccgaggccgagcagagaggcgagatggccctgaaggacgccaacgccaagctgcaggacctgcagaccgccctgcagaaggccaaggacgacctggccagactgctgagagactaccaggagctgatgaacgtgaagctggccctggacgtggagatcgccacctacagaaagctgctggagggcgaggagtgcagaatgagcggcgagtgccagagcgccgtgtgcatcagcgtggtgagcaacgtgaccagcaccagcggcagcagcggcagcagcagaggcgtgttcggcggcgtgagcggcagcggcagcggcggctacaagggcggcagcagcagcagcagcagcagcggctacggcgtgagcggcggcagcggcagcggctacggcggcgtgagcagcggcagcaccggcggcagaggcagcagcggcagctaccagagcagcagcagcggcagcagactgggcggcgccggcagcatcagcgtgagccacagcggcatgggcagcagcagcggcagcatccagaccagcggcggcagcggctacaagagcggcggcggcggcagcaccagcatcagattcagccagaccaccagcagcagccagcacagcagcaccaagtag

SEQ ID NO: 10078 - DNA, 1080 bp, synthetic construct
  source 1..1080: mol_type = other DNA; note = Synthetic coding sequence
atggccgagcccttcctgagcgagtaccagcaccagccccagaccagcaactgcaccggcgccgccgccgtgcaggaggagctgaaccccgagagaccccccggcgccgaggagagagtgcccgaggaggacagcagatggcagagcagagccttcccccagctgggcggcagacccggccccgagggcgagggcagcctggagagccagcccccccccctgcagacccaggcctgccccgagagcagctgcctgagagagggcgagaagggccagaacggcgacgacagcagcgccggcggcgacttccccccccccgccgaggtggagcccacccccgaggccgagctgctggcccagccctgccacgacagcgaggccagcaagctgggcgcccccgccgccggcggcgaggaggagtggggccagcagcagagacagctgggcaagaagaagcacagaagaagacccagcaagaagaagagacactggaagccctactacaagctgacctgggaggagaagaagaagttcgacgagaagcagagcctgagagccagcagaatcagagccgagatgttcgccaagggccagcccgtggccccctacaacaccacccagttcctgatggacgaccacgaccaggaggagcccgacctgaagaccggcctgtacagcaagagagccgccgccaagagcgacgacaccagcgacgacgacttcatggaggagggcggcgaggaggacggcggcagcgacggcatgggcggcgacggcagcgagttcctgcagagagacttcagcgagacctacgagagataccacaccgagagcctgcagaacatgagcaagcaggagctgatcaaggagtacctggagctggagaagtgcctgagcagaatggaggacgagaacaacagactgagactggagagcaagagactgggcggcgacgacgccagagtgagagagctggagctggagctggacagactgagagccgagaacctgcagctgctgaccgagaacgagctgcacagacagcaggagagagcccccctgagcaagttcggcgactag

SEQ ID NO: 10079 - DNA, 2889 bp, synthetic construct
  source 1..2889: mol_type = other DNA; note = Synthetic coding sequence
atggacgagcaggccctgctgggcctgaaccccaacgccgacagcgacttcagacagagagccctggcctacttcgagcagctgaagatcagccccgacgcctggcaggtgtgcgccgaggccctggcccagagaacctacagcgacgaccacgtgaagttcttctgcttccaggtgctggagcaccaggtgaagtacaagtacagcgagctgaccaccgtgcagcagcagctgatcagagagaccctgatcagctggctgcaggcccagatgctgaacccccagcccgagaagaccttcatcagaaacaaggccgcccaggtgttcgccctgctgttcgtgaccgagtacctgaccaagtggcccaagttcttcttcgacatcctgagcgtggtggacctgaaccccagaggcgtggacctgtacctgagaatcctgatggccatcgacagcgagctggtggacagagacgtggtgcacaccagcgaggaggccagaagaaacaccctgatcaaggacaccatgagagagcagtgcatccccaacctggtggagagctggtaccagatcctgcagaactaccagttcaccaacagcgaggtgacctgccagtgcctggaggtggtgggcgcctacgtgagctggatcgacctgagcctgatcgccaacgacagattcatcaacatgctgctgggccacatgagcatcgaggtgctgagagaggaggcctgcgactgcctgttcgaggtggtgaacaagggcatggaccccgtggacaagatgaagctggtggagagcctgtgccaggtgctgcagagcgccggcttcttcagcatcgaccaggaggaggacgtggacttcctggccagattcagcaagctggtgaacggcatgggccagagcctgatcgtgagctggagcaagctgatcaagaacggcgacatcaagaacgcccaggaggccctgcaggccatcgagaccaaggtggccctgatgctgcagctgctgatccacgaggacgacgacatcagcagcaacatcatcggcttctgctacgactacctgcacatcctgaagcagctgaccgtgctgagcgaccagcagaaggccaacgtggaggccatcatgctggccgtgatgaagaagctgacctacgacgaggagtacaacttcgagaacgagggcgaggacgaggccatgttcgtggagtacagaaagcagctgaagctgctgctggacagactggcccaggtgagccccgagctgctgctggccagcgtgagaagagtgttcagcagcaccctgcagaactggcagaccaccagattcatggaggtggaggtggccatcagactgctgtacatgctggccgaggccctgcccgtgagccacggcgcccacttcagcggcgacgtgagcaaggccagcgccctgcaggacatgatgagaaccctggtgaccagcggcgtgagcagctaccagcacaccagcgtgaccctggagttcttcgagaccgtggtgagatacgagaagttcttcaccgtggagccccagcacatcccctgcgtgctgatggccttcctggaccacagaggcctgagacacagcagcgccaaggtgagaagcagaaccgcctacctgttcagcagattcgtgaagagcctgaacaagcagatgaaccccttcatcgaggacatcctgaacagaatccaggacctgctggagctgagcccccccgagaacggccaccagagcctgctgagcagcgacgaccagctgttcatctacgagaccgccggcgtgctgatcgtgaacagcgagtaccccgccgagagaaagcaggccctgatgagaaacctgctgacccccctgatggagaagttcaagatcctgctggagaagctgatgctggcccaggacgaggagagacaggccagcctggccgactgcctgaaccacgccgtgggcttcgccagcagaaccagcaaggccttcagcaacaagcagaccgtgaagcagtgcggctgcagcgaggtgtacctggactgcctgcagaccttcctgcccgccctgagctgccccctgcagaaggacatcctgagaagcggcgtgagaaccttcctgcacagaatgatcatctgcctggaggaggaggtgctgcccttcatccccagcgccagcgagcacatgctgaaggactgcgaggccaaggacctgcaggagttcatccccctgatcaaccagatcaccgccaagttcaagatccaggtgagccccttcctgcagcagatgttcatgcccctgctgcacgccatcttcgaggtgctgctgagacccgccgaggagaacgaccagagcgccgccctggagaagcagatgctgagaagaagctacttcgccttcctgcagaccgtgaccggcagcggcatgagcgaggtgatcgccaaccagggcgccgagaacgtggagagagtgctggtgaccgtgatccagggcgccgtggagtaccccgaccccatcgcccagaagacctgcttcatcatcctgagcaagctggtggagctgtggggcggcaaggacggccccgtgggcttcgccgacttcgtgtacaagcacatcgtgcccgcctgcttcctggcccccctgaagcagaccttcgacctggccgacgcccagaccgtgctggccctgagcgagtgcgccgtgaccctgaagaccatccacctgaagagaggccccgagtgcgtgcagtacctgcagcaggagtacctgcccagcctgcaggtggcccccgagatcatccaggagttctgccaggccctgcagcagcccgacgccaaggtgttcaagaactacctgaaggtgttcttccagagagccaagccctag

SEQ ID NO: 10080 - DNA, 2976 bp, synthetic construct
  source 1..2976: mol_type = other DNA; note = Synthetic coding sequence
atggccgagagcttcttcagcgacttcggcctgctgtggtacctgaaggagctgagaaaggaggagttctggaagttcaaggagctgctgaagcagcccctggagaagttcgagctgaagcccatcccctgggccgagctgaagaaggccagcaaggaggacgtggccaagctgctggacaagcactaccccggcaagcaggcctgggaggtgaccctgaacctgttcctgcagatcaacagaaaggacctgtggaccaaggcccaggaggagatgagaaacaagctgaacccctacagaaagcacatgaaggagaccttccagctgatctgggagaaggagacctgcctgcacgtgcccgagcacttctacaaggagaccatgaagaacgagtacaaggagctgaacgacgcctacaccgccgccgccagaagacacaccgtggtgctggagggccccgacggcatcggcaagaccaccctgctgagaaaggtgatgctggactgggccgagggcaacctgtggaaggacagattcaccttcgtgttcttcctgaacgtgtgcgagatgaacggcatcgccgagaccagcctgctggagctgctgagcagagactggcccgagagcagcgagaagatcgaggacatcttcagccagcccgagagaatcctgttcatcatggacggcttcgagcagctgaagttcaacctgcagctgaaggccgacctgagcgacgactggagacagagacagcccatgcccatcatcctgagcagcctgctgcagaagaagatgctgcccgagagcagcctgctgatcgccctgggcaagctggccatgcagaagcactacttcatgctgagacaccccaagctgatcaagctgctgggcttcagcgagagcgagaagaagagctacttcagctacttcttcggcgagaagagcaaggccctgaaggtgttcaacttcgtgagagacaacggccccctgttcatcctgtgccacaaccccttcacctgctggctggtgtgcacctgcgtgaagcagagactggagagaggcgaggacctggagatcaacagccagaacaccacctacctgtacgccagcttcctgaccaccgtgttcaaggccggcagccagagcttcccccccaaggtgaacagagccagactgaagagcctgtgcgccctggccgccgagggcatctggacctacaccttcgtgttcagccacggcgacctgagaagaaacggcctgagcgagagcgagggcgtgatgtgggtgggcatgagactgctgcagagaagaggcgactgcttcgccttcatgcacctgtgcatccaggagttctgcgccgccatgttctacctgctgaagagacccaaggacgaccccaaccccgccatcggcagcatcacccagctggtgagagccagcgtggtgcagccccagaccctgctgacccaggtgggcatcttcatgttcggcatcagcaccgaggagatcgtgagcatgctggagaccagcttcggcttccccctgagcaaggacctgaagcaggagatcacccagtgcctggagagcctgagccagtgcgaggccgacagagaggccatcgccttccaggagctgttcatcggcctgttcgagacccaggagaaggagttcgtgaccaaggtgatgaacttcttcgaggaggtgttcatctacatcggcaacatcgagcacctggtgatcgccagcttctgcctgaagcactgccagcacctgaccaccctgagaatgtgcgtggagaacatcttccccgacgacagcggctgcatcagcgactacaacgagaagctggtgtactggagagagctgtgcagcatgttcatcaccaacaagaacttccagatcctggacatggagaacaccagcctggacgaccccagcctggccatcctgtgcaaggccctggcccagcccgtgtgcaagctgagaaagctgatcttcaccagcgtgtacttcggccacgacagcgagctgttcaaggccgtgctgcacaacccccacctgaagctgctgagcctgtacggcaccagcctgagccagagcgacatcagacacctgtgcgagaccctgaagcaccccatgtgcaagatcgaggagctgatcctgggcaagtgcgacatcagcagcgaggtgtgcgaggacatcgccagcgtgctggcctgcaacagcaagctgaagcacctgagcctggtggagaaccccctgagagacgagggcatgaccctgctgtgcgaggccctgaagcacagccactgcgccctggagagactgatgctgatgtactgctgcctgaccagcgtgagctgcgacagcatcagcgaggtgctgctgtgcagcaagagcctgagcctgctggacctgggcagcaacgccctggaggacaacggcgtggccagcctgtgcgccgccctgaagcaccccggctgcagcatcagagagctgtggctgatgggctgcttcctgaccagcgacagctgcaaggacatcgccgccgtgctgatctgcaacggcaagctgaagaccctgaagctgggccacaacgagatcggcgacaccggcgtgagacagctgtgcgccgccctgcagcacccccactgcaagctggagtgcctgggcctgcagacctgccccatcaccagagcctgctgcgacgacatcgccgccgccctgatcgcctgcaagaccctgagaagcctgaacctggactggatcgccctggacgccgacgccgtggtggtgctgtgcgaggccctgagccaccccgactgcgccctgcagatgctgggcctgcacaagagcggcttcgacgaggagacccagaagatcctgatgagcgtggaggagaagatcccccacctgaccatcagccacggcccctggatcgacgaggagtacaagatcagaggcgtgctgctgtag

SEQ ID NO: 10081 - DNA, 534 bp, synthetic construct
  source 1..534: mol_type = other DNA; note = Synthetic coding sequence
atggccgccgtgaaggccagcaccagcaaggccaccagaccctggtacagccaccccgtgtacgccagatactggcagcactaccaccaggccatggcctggatgcagagccaccacaacgcctacagaaaggccgtggagagctgcttcaacctgccctggtacctgcccagcgccctgctgccccagagcagctacgacaacgaggccgcctacccccagagcttctacgaccaccacgtggcctggcaggactacccctgcagcagcagccacttcagaagaagcggccagcaccccagatacagcagcagaatccaggccagcaccaaggaggaccaggccctgagcaaggaggaggagatggagaccgagagcgacgccgaggtggagtgcgacctgagcaacatggagatcaccgaggagctgagacagtacttcgccgagaccgagagacacagagaggagagaagaagacagcagcagctggacgccgagagactggacagctacgtgaacgccgaccacgactag

SEQ ID NO: 10082 - DNA, 1503 bp, synthetic construct
  source 1..1503: mol_type = other DNA; note = Synthetic coding sequence
atggtgggcagaagctgcggcgtggccacccagagacagggcggcggccagagacccaccaacctggccctgaccctgagcagcagccccgcccacagcaccgccctgccctggctgccccccagaagcctgcagctgctgagcggccacagcgtgcccgcccagcccaccccccacctgcccagcgcctgcggcggccccaccagagtgaccctgggcgaggagagagcctggagaagccacggcagcaacgccggcggccacacctgcctgcccagaagaaccgccggcgccggcagcctgacccccggcggcgagagaggcggcaacaacgccggccacaccgtggtggtggacggcaaggagtacgacttccacctgctgcccagcggcatcatcaacaccaaggccgtgagcttcatcggcaacggcgtggtgatccacctgcccggcctgttcgaggaggccgagaagaacgagaagaagggcctgaaggactgggagaagagactgatcatcagcgacagagcccacctggtgttcgacttccaccaggccgtggacggcctgcaggaggtgcagagacaggcccaggagggcaagaacatcggcaccaccaagaagggcatcggccccacctacagcagcaaggccgccagaaccggcctgagaatctgcgacctgctgagcgacttcgacgagttcagcagcagattcaagaacctggcccaccagcaccagagcatgttccccaccctggagatcgacatcgagggccagctgaagagactgaagggcttcgccgagagaatcagacccatggtgagagacggcgtgtacttcatgtacgaggccctgcacggcccccccaagaagatcctggtggagggcgccaacgccgccctgctggacatcgacttcggcacctaccccttcgtgaccagcagcaactgcaccgtgggcggcgtgtgcaccggcctgggcatccccccccagaacatcggcgacgtgtacggcgtggtgaaggcctacaccaccagagtgggcatcggcgccttccccaccgagcagatcaacgagatcggcggcctgctgcagaccagaggccacgagtggggcgtgaccaccggcagaaagagaagatgcggctggctggacctgatgatcctgagatacgcccacatggtgaacggcttcaccgccctggccctgaccaagctggacatcctggacgtgctgggcgaggtgaaggtgggcgtgagctacaagctgaacggcaagagaatcccctacttccccgccaaccaggagatgctgcagaaggtggaggtggagtacgagaccctgcccggctggaaggccgacaccaccggcgccagaagatgggaggacctgcccccccaggcccagaactacatcagattcgtggagaaccacgtgggcgtggccgtgaagtgggtgggcgtgggcaagagcagagagagcatgatccagctgttctag

SEQ ID NO: 10083 - DNA, 468 bp, synthetic construct
  source 1..468: mol_type = other DNA; note = Synthetic coding sequence
atggtgaacagctgctgcggcagcgtgtgcagcgaccagggctgcggccaggacctgtgccaggagacctgctgctgccccagctgctgccagaccacctgctgcagaaccacctgctacagacccagctacagcgtgagctgctgctgcagaccccagtgctgccagagcgtgtgctgccagcccacctgctgcagacccagctgctgcgtgcccacctgctgccaccccagctgctgcatcagcagctgctgcagacccagctgctgcgtgagcagctgctgcaagccccagtgctgccagagcgtgtgctgccagcccaactgctgcagacccagctgctgcagaccctgctgctgcctgagacccgtgtgcggcagagtgagctgccacaccacctgctacagacccgcctgcgtgatcagcacctgccccagacccgtgtgctgcgccagcagctgctgctag

SEQ ID NO: 10084 - DNA, 2124 bp, synthetic construct
  source 1..2124: mol_type = other DNA; note = Synthetic coding sequence
atggccgccgaggccctggccgccgaggccgtggccagcagactggagagacaggaggaggacatcagatggctgtggagcgaggtggagagactgagagacgagcagctgaacgccccctacagctgccaggccgagggcccctgcctgaccagagaggtggcccagctgagagccgagaactgcgacctgagacacagactgtgcagcctgagactgtgcctggccgaggagagaagcagacaggccaccctggagagcgccgagctggaggccgcccaggaggccggcgcccagcccccccccagccagagccaggacaaggacatgaagaagaagaagatgaaggagagcgaggccgacagcgaggtgaagcaccagcccatcttcatcaaggagagactgaagctgttcgagatcctgaagaaggaccaccagctgctgctggccatctacggcaagaagggcgacaccagcaacatcatcaccgtgagagtggccgacggccagaccgtgcagggcgaggtgtggaagaccaccccctaccaggtggccgccgagatcagccaggagctggccgagagcaccgtgatcgccaaggtgaacggcgagctgtgggacctggacagacccctggagggcgacagcagcctggagctgctgaccttcgacaacgagaaggtgaacaccgccaccaccaccgtgtacagatgcggccccctgatcgacctgtgcaagggcccccacgtgagacacaccggcaagatcaagaccatcaagatcttcaagaacagcagcacctactgggagggcaaccccgagatggagaccctgcagagaatctacggcatcagcttccccgacaacaagatgatgagagactgggagaagttccaggaggaggccaagaacagagaccacagaaagatcggcaaggagcaggagctgttcttcttccacgacctgagccccggcagctgcttcttcctgcccagaggcgccttcatctacaacaccctgaccgacttcatcagagaggagtaccacaagagagacttcaccgaggtgctgagccccaacatgtacaacagcaagctgtgggaggccagcggccactggcagcactacagcgagaacatgttcaccttcgagatcgagaaggacaccttcgccctgaagcccatgaactgccccggccactgcctgatgttcgcccacagacccagaagctggagagagatgcccatcagattcgccgacttcggcgtgctgcacagaaacgagctgagcggcaccctgagcggcctgaccagagtgagaagattccagcaggacgacgcccacatcttctgcaccgtggagcagatcgaggaggagatcaagggctgcctgcagttcctgcagagcgtgtacagcaccttcggcttcagcttccagctgaacctgagcaccagacccgagaacttcctgggcgagatcgagatgtggaacgaggccgagaagcagctgcagaacagcctgatggacttcggcgagccctggaagatgaaccccggcgacggcgccttctacggccccaagatcgacatcaagatcaaggacgccatcggcagataccaccagtgcgccaccatccagctggacttccagctgcccatcagattcaacctgacctacgtgagcaaggacggcgacgacaagaagagacccgtgatcatccacagagccatcctgggcagcgtggagagaatgatcgccatcctgagcgagaactacggcggcaagtggcccttctggctgagccccagacaggtgatggtgatccccgtgggccccacctgcgagaagtacgccctgcaggtgagcagcgagttcttcgaggagggcttcatggccgacgtggacctggaccacagctgcaccctgaacaagaagatcagaaacgcccagctggcccagtacaacttcatcctggtggtgggcgagaaggagaagatcgacaacgccgtgaacgtgagaaccagagacaacaagatccacggcgagatcctggtgaccagcgccatcgacaagctgaagaacctgagaaagaccagaaccctgaacgccgaggaggccttctag

SEQ ID NO: 10085 - DNA, 816 bp, synthetic construct
  source 1..816: mol_type = other DNA; note = Synthetic coding sequence
atggccggcctggaggtgctgttcgccagcgccgcccccgccatcacctgcagacaggacgccctggtgtgcttcctgcactgggaggtggtgacccacggctacttcggcctgggcgtgggcgaccagcccggccccaacgacaagaagagcgagctgctgcccgccggctggaacaacaacaaggacctgtacgtgctgagatacgagtacaaggacggcagcagaaagctgctggtgaaggccatcaccgtggagagcagcatgatcctgaacgtgctggagtacggcagccagcaggtggccgacctgaccctgaacctggacgactacatcgacgccgagcacctgggcgacttccacagaacctacaagaacagcgaggagctgagaagcagaatcgtgagcggcatcatcacccccatccacgagcagtgggagaaggccaacgtgagcagcccccacagagagttcccccccgccaccgccagagaggtggaccccctgagaatccccccccaccacccccacaccagcagacagcccccctggtgcgaccccctgggccccttcgtggtgggcggcgaggacctggaccccttcggccccagaagaggcggcatgatcgtggaccccctgagaagcggcttccccagagccctgatcgaccccagcagcggcctgcccaacagactgccccccggcgccgtgccccccggcgccagattcgaccccttcggccccatcggcaccagcccccccggccccaaccccgaccacctgcccccccccggctacgacgacatgtacctgtag

SEQ ID NO: 10086 - DNA, 474 bp, synthetic construct
  source 1..474: mol_type = other DNA; note = Synthetic coding sequence
atggccaccccccccaagagaagagccgtggaggccaccggcgagaaggtgctgagatacgagaccttcatcagcgacgtgctgcagagagacctgagaaaggtgctggaccacagagacaaggtgtacgagcagctggccaagtacctgcagctgagaaacgtgatcgagagactgcaggaggccaagcacagcgagctgtacatgcaggtggacctgggctgcaacttcttcgtggacaccgtggtgcccgacaccagcagaatctacgtggccctgggctacggcttcttcctggagctgaccctggccgaggccctgaagttcatcgacagaaagagcagcctgctgaccgagctgagcaacagcctgaccaaggacagcatgaacatcaaggcccacatccacatgctgctggagggcctgagagagctgcagggcctgcagaacttccccgagaagccccaccactag

SEQ ID NO: 10087 - DNA, 543 bp, synthetic construct
  source 1..543: mol_type = other DNA; note = Synthetic coding sequence
atgcaggccgagggcagaggcaccggcggcagcaccggcgacgccgacggccccggcggccccggcatccccgacggccccggcggcaacgccggcggccccggcgaggccggcgccaccggcggcagaggccccagaggcgccggcgccgccagagccagcggccccggcggcggcgcccccagaggcccccacggcggcgccgccagcggcctgaacggctgctgcagatgcggcgccagaggccccgagagcagactgctggagttctacctggccatgcccttcgccacccccatggaggccgagctggccagaagaagcctggcccaggacgccccccccctgcccgtgcccggcgtgctgctgaaggagttcaccgtgagcggcaacatcctgaccatcagactgaccgccgccgaccacagacagctgcagctgagcatcagcagctgcctgcagcagctgagcctgctgatgtggatcacccagtgcttcctgcccgtgttcctggcccagccccccagcggccagagaagatag

SEQ ID NO: 10088 - DNA, 621 bp, synthetic construct
  source 1..621: mol_type = other DNA; note = Synthetic coding sequence
atgaccgccagcgtgctgagaagcatcagcctggccctgagacccaccagcggcctgctgggcacctggcagacccagctgagagagacccaccagagagccagcctgctgagcttctgggagctgatccccatgagaagcgagcccctgagaaagaagaagaaggtggaccccaagaaggaccaggaggccaaggagagactgaagagaaagatcagaaagctggagaaggccacccaggagctgatccccatcgaggacttcatcacccccctgaagttcctggacaaggccagagagagaccccaggtggagctgaccttcgaggagaccgagagaagagccctgctgctgaagaagtggagcctgtacaagcagcaggagagaaagatggagagagacaccatcagagccatgctggaggcccagcaggaggccctggaggagctgcagctggagagccccaagctgcacgccgaggccatcaagagagaccccaacctgttccccttcgagaaggagggcccccactacaccccccccatccccaactaccagccccccgagggcagatacaacgacatcaccaaggtgtacacccaggtggagttcaagagatag

SEQ ID NO: 10089 - DNA, 6963 bp, synthetic construct
  source 1..6963: mol_type = other DNA; note = Synthetic coding sequence
atggccgagcccagcagcgccagaagacccgtgcccctgatcgagagcgagctgtacttcctgatcgccagatacctgagcgccggcccctgcagaagagccgcccaggtgctggtgcaggagctggagcagtaccagctgctgcccaagagactggactgggagggcaacgagcacaacagaagctacgaggagctggtgctgagcaacaagcacgtggcccccgaccacctgctgcagatctgccagagaatcggccccatgctggacaaggagatcccccccagcatcagcagagtgaccagcctgctgggcgccggcagacagagcctgctgagaaccgccaaggactgcagacacaccgtgtggaagggcagcgccttcgccgccctgcacagaggcagaccccccgagatgcccgtgaactacggcagcccccccaacctggtggagatccacagaggcaagcagctgaccggctgcagcaccttcagcaccgccttccccggcaccatgtaccagcacatcaagatgcacagaagaatcctgggccacctgagcgccgtgtactgcgtggccttcgacagaaccggccacagaatcttcaccggcagcgacgactgcctggtgaagatctggagcacccacaacggcagactgctgagcaccctgagaggccacagcgccgagatcagcgacatggccgtgaactacgagaacaccatgatcgccgccggcagctgcgacaagatcatcagagtgtggtgcctgagaacctgcgcccccgtggccgtgctgcagggccacaccggcagcatcaccagcctgcagttcagccccatggccaagggcagccagagatacatggtgagcaccggcgccgacggcaccgtgtgcttctggcagtgggacctggagagcctgaagttcagccccagacccctgaagttcaccgagaagcccagacccggcgtgcagatgctgtgcagcagcttcagcgtgggcggcatgttcctggccaccggcagcaccgaccacgtgatcagaatgtacttcctgggcttcgaggcccccgagaagatcgccgagctggagagccacaccgacaaggtggacagcatccagttctgcaacaacggcgacagattcctgagcggcagcagagacggcaccgccagaatctggagattcgagcagctggagtggagaagcatcctgctggacatggccaccagaatcagcggcgacctgagcagcgaggaggagagattcatgaagcccaaggtgaccatgatcgcctggaaccagaacgacagcatcgtggtgaccgccgtgaacgaccacgtgctgaaggtgtggaacagctacaccggccagctgctgcacaacctgatgggccacgccgacgaggtgttcgtgctggagacccaccccttcgacagcagaatcatgctgagcgccggccacgacggcagcatcttcatctgggacatcaccaagggcaccaagatgaagcactacttcaacatgatcgagggccagggccacggcgccgtgttcgactgcaagttcagccaggacggccagcacttcgcctgcaccgacagccacggccacctgctgatcttcggcttcggctgcagcaagccctacgagaagatccccgaccagatgttcttccacaccgactacagacccctgatcagagacagcaacaactacgtgctggacgagcagacccagcaggccccccacctgatgcccccccccttcctggtggacgtggacggcaacccccaccccaccaagtaccagagactggtgcccggcagagagaacagcgccgacgagcacctgatcccccagctgggctacgtggccaccagcgacggcgaggtgatcgagcagatcatcagcctgcagaccaacgacaacgacgagagaagccccgagagcagcatcctggacggcatgatcagacagctgcagcagcagcaggaccagagaatgggcgccgaccaggacaccatccccagaggcctgagcaacggcgaggagacccccagaagaggcttcagaagactgagcctggacatccagagcccccccaacatcggcctgagaagaagcggccaggtggagggcgtgagacagatgcaccagaacgcccccagaagccagatcgccaccgagagagacctgcaggcctggaagagaagagtggtggtgcccgaggtgcccctgggcatcttcagaaagctggaggacttcagactggagaagggcgaggaggagagaaacctgtacatcatcggcagaaagagaaagaccctgcagctgagccacaagagcgacagcgtggtgctggtgagccagagcagacagagaacctgcagaagaaagtaccccaactacggcagaagaaacagaagctggagagagctgagcagcggcaacgagagcagcagcagcgtgagacacgagaccagctgcgaccagagcgagggcagcggcagcagcgaggaggacgagtggagaagcgacagaaagagcgagagctacagcgagagcagcagcgacagcagcagcagatacagcgactggaccgccgacgccggcatcaacctgcagccccccctgagaaccagctgcagaagaagaatcaccagattctgcagcagcagcgaggacgagatcagcaccgagaacctgagcccccccaagagaagaagaaagagaaagaaggagaacaagcccaagaaggagaacctgagaagaatgacccccgccgagctggccaacatggagcacctgtacgagttccacccccccgtgtggatcaccgacaccaccctgagaaagagccccttcgtgccccagatgggcgacgaggtgatctacttcagacagggccacgaggcctacatcgaggccgtgagaagaaacaacatctacgagctgaaccccaacaaggagccctggagaaagatggacctgagagaccaggagctggtgaagatcgtgggcatcagatacgaggtgggcccccccaccctgtgctgcctgaagctggccttcatcgaccccgccaccggcaagctgatggacaagagcttcagcatcagataccacgacatgcccgacgtgatcgacttcctggtgctgagacagttctacgacgaggccagacagagaaactggcagagctgcgacagattcagaagcatcatcgacgacgcctggtggttcggcaccgtgctgagccaggagccctaccagccccagtaccccgacagccacttccagtgctacatcgtgagatgggacaacaccgagatcgagaagctgagcccctgggacatggagcccatccccgacaacgtggacccccccgaggagctgggcgccagcatcagcgtgaccaccgacgagctggagaagctgctgtacaagccccaggccggcgagtggggccagaagagcagagacgaggagtgcgacagaatcatcagcggcatcgaccagctgctgaacctggacatcgccgccgccttcgccggccccgtggacctgtgcacctaccccaagtactgcaccgtggtggcctaccccaccgacctgtacaccatcagaatgagactggtgaacagattctacagaagactgagcgccctggtgtgggaggtgagatacatcgagcacaacgccagaaccttcaacgagcccgagagcgtgatcgccagaagcgccaagaagatcaccgaccagctgctgaagttcatcaagaaccagcactgcaccaacatcagcgagctgagcaacaccagcgagaacgacgagcagaacgccgaggacctggacgacagcgacctgcccaagaccagcagcggcagaagaagagtgcacgacggcaagaagagcatcagagccaccaactacgtggagagcaactggaagaagcagtgcaaggagctggtgaacctgatcttccagtgcgaggacagcgagcccttcagacagcccgtggacctggtggagtaccccgactacagagacatcatcgacacccccatggacttcggcaccgtgagagagaccctggacgccggcaactacgacagccccctggagttctgcaaggacatcagactgatcttcagcaacgccaaggcctacacccccaacaagagaagcaagatctacagcatgaccctgagactgagcgccctgttcgaggagaagatgaagaagatcagcagcgacttcaagatcggccagaagttcaacgagaagctgagaagaagccagagattcaagcagagacagaactgcaagggcgacagccagcccaacaagagcatcagaaacctgaagcccaagagactgaagagccagaccaagatcatccccgagctggtgggcagccccacccagagcaccagcagcagaaccgcctacctgggcacccacaagaccagcgccggcatcagcagcggcgtgaccagcggcgacagcagcgacagcgccgagagcagcgagagaagaaagagaaacagacccatcaccaacggcagcaccctgagcgagagcgaggtggaggacagcctggccaccagcctgagcagcagcgccagcagcagcagcgaggagagcaaggagagcagcagagccagagagagcagcagcagaagcggcctgagcagaagcagcaacctgagagtgaccagaaccagagccgcccagagaaagaccggccccgtgagcctggccaacggctgcggcagaaaggccaccagaaagagagtgtacctgagcgacagcgacaacaacagcctggagaccggcgagatcctgaaggccagagccggcaacaacagaaaggtgctgagaaagtgcgccgccgtggccgccaacaagatcaagctgatgagcgacgtggaggagaacagcagcagcgagagcgtgtgcagcggcagaaagctgccccacagaaacgccagcgccgtggccagaaagaagctgctgcacaacagcgaggacgagcagagcctgaagagcgagatcgaggaggaggagctgaaggacgagaaccagctgctgcccgtgagcagcagccacaccgcccagagcaacgtggacgagagcgagaacagagacagcgagagcgagagcgacctgagagtggccagaaagaactggcacgccaacggctacaagagccacacccccgcccccagcaagaccaagttcctgaagatcgagagcagcgaggaggacagcaagagccacgacagcgaccacgcctgcaacagaaccgccggccccagcaccagcgtgcagaagctgaaggccgagagcatcagcgaggaggccgacagcgagcccggcagaagcggcggcagaaagtacaacaccttccacaagaacgccagcttcttcaagaagaccaagatcctgagcgacagcgaggacagcgagagcgaggagcaggacagagaggacggcaagtgccacaagatggagatgaaccccatcagcggcaacctgaactgcgaccccatcgccatgagccagtgcagcagcgaccacggctgcgagaccgacctggacagcgacgacgacaagatcgagaagcccaacaacttcatgaaggacagcgccagccaggacaacggcctgagcagaaagatcagcagaaagagagtgtgcagcagcgacagcgacagcagcctgcaggtggtgaagaagagcagcaaggccagaaccggcctgctgagaatcaccagaagatgcgccgccaccgccgccaacaagatcaagctgatgagcgacgtggaggacgtgagcctggagaacgtgcacaccagaagcaagaacggcagaaagaagcccctgcacctggcctgcaccaccgccaagaagaagctgagcgactgcgagggcagcgtgcactgcgaggtgcccagcgagcagtacgcctgcgagggcaagccccccgaccccgacagcgagggcagcaccaaggtgctgagccaggccctgaacggcgacagcgacagcgaggacatgctgaacagcgagcacaagcacagacacaccaacatccacaagatcgacgcccccagcaagagaaagagcagcagcgtgaccagcagcggcgaggacagcaagagccacatccccggcagcgagaccgacagaaccttcagcagcgagagcaccctggcccagaaggccaccgccgagaacaacttcgaggtggagctgaactacggcctgagaagatggaacggcagaagactgagaacctacggcaaggcccccttcagcaagaccaaggtgatccacgacagccaggagaccgccgagaaggaggtgaagagaaagagaagccaccccgagctggagaacgtgaagatcagcgagaccaccggcaacagcaagttcagacccgacaccagcagcaagagcagcgacctgggcagcgtgaccgagagcgacatcgactgcaccgacaacaccaagaccaagagaagaaagaccaagggcaaggccaaggtggtgagaaaggagttcgtgcccagagacagagagcccaacaccaaggtgagaacctgcatgcacaaccagaaggacgccgtgcagatgcccagcgagaccctgaaggccaagatggtgcccgagaaggtgcccagaagatgcgccaccgtggccgccaacaagatcaagatcatgagcaacctgaaggagaccatcagcggccccgagaacgtgtggatcagaaagagcagcagaaagctgccccacagaaacgccagcgccgccgccaagaagaagctgctgaacgtgtacaaggaggacgacaccaccatcaacagcgagagcgagaaggagctggaggacatcaacagaaagatgctgttcctgagaggcttcagaagctggaaggagaacgcccagtag

SEQ ID NO: 10090 - DNA, 2961 bp, synthetic construct
  source 1..2961: mol_type = other DNA; note = Synthetic coding sequence
atggccgagagcttcttcagcgacttcggcctgctgtggtacctgaaggagctgagaaaggaggagttctggaagttcaaggagctgctgaagcagcccctggagaagttcgagctgaagcccatcccctgggccgagctgaagaaggccagcaaggaggacgtggccaagctgctggacaagcactaccccggcaagcaggcctgggaggtgaccctgaacctgttcctgcagatcaacagaaaggacctgtggaccaaggcccaggaggagatgagaaacaagctgaacccctacagaaagcacatgaaggagaccttccagctgatctgggagaaggagacctgcctgcacgtgcccgagcacttctacaaggagaccatgaagaacgagtacaaggagctgaacgacgcctacaccgccgccgccagaagacacaccgtggtgctggagggccccgacggcatcggcaagaccaccctgctgagaaaggtgatgctggactgggccgagggcaacctgtggaaggacagattcaccttcgtgttcttcctgaacgtgtgcgagatgaacggcatcgccgagaccagcctgctggagctgctgagcagagactggcccgagagcagcgagaagatcgaggacatcttcagccagcccgagagaatcctgttcatcatggacggcttcgagcagctgaagttcaacctgcagctgaaggccgacctgagcgacgactggagacagagacagcccatgcccatcatcctgagcagcctgctgcagaagaagatgctgcccgagagcagcctgctgatcgccctgggcaagctggccatgcagaagcactacttcatgctgagacaccccaagctgatcaagctgctgggcttcagcgagagcgagaagaagagctacttcagctacttcttcggcgagaagagcaaggccctgaaggtgttcaacttcgtgagagacaacggccccctgttcatcctgtgccacaaccccttcacctgctggctggtgtgcacctgcgtgaagcagagactggagagaggcgaggacctggagatcaacagccagaacaccacctacctgtacgccagcttcctgaccaccgtgttcaaggccggcagccagagcttcccccccaaggtgaacagagccagactgaagagcctgtgcgccctggccgccgagggcatctggacctacaccttcgtgttcagccacggcgacctgagaagaaacggcctgagcgagagcgagggcgtgatgtgggtgggcatgagactgctgcagagaagaggcgactgcttcgccttcatgcacctgtgcatccaggagttctgcgccgccatgttctacctgctgaagagacccaaggacgaccccaaccccgccatcggcagcatcacccagctggtgagagccagcgtggtgcagccccagaccctgctgacccaggtgggcatcttcatgttcggcatcagcaccgaggagatcgtgagcatgctggagaccagcttcggcttccccctgagcaaggacctgaagcaggagatcacccagtgcctggagagcctgagccagtgcgaggccgacagagaggccatcgccttccaggagctgttcatcggcctgttcgagacccaggagaaggagttcgtgaccaaggtgatgaacttcttcgaggaggtgttcatctacatcggcaacatcgagcacctggtgatcgccagcttctgcctgaagcactgccagcacctgaccaccctgagaatgtgcgtggagaacatcttccccgacgacagcggctgcatcagcgactacaacgagaagctggtgtactggagagagctgtgcagcatgttcatcaccaacaagaacttccagatcctggacatggagaacaccagcctggacgaccccagcctggccatcctgtgcaaggccctggcccagcccgtgtgcaagctgagaaagctgatcttcaccagcgtgtacttcggccacgacagcgagctgttcaaggccgtgctgcacaacccccacctgaagctgctgagcctgtacggcaccagcctgagccagagcgacatcagacacctgtgcgagaccctgaagcaccccatgtgcaagatcgaggagctgatcctgggcaagtgcgacatcagcagcgaggtgtgcgaggacatcgccagcgtgctggcctgcaacagcaagctgaagcacctgagcctggtggagaaccccctgagagacgagggcatgaccctgctgtgcgaggccctgaagcacagccactgcgccctggagagactgatgctgatgtactgctgcctgaccagcgtgagctgcgacagcatcagcgaggtgctgctgtgcagcaagagcctgagcctgctggacctgggcagcaacgccctggaggacaacggcgtggccagcctgtgcgccgccctgaagcaccccggctgcagcatcagagagctgtggctgatgggctgcttcctgaccagcgacagctgcaaggacatcgccgccgtgctgatctgcaacggcaagctgaagaccctgaagctgggccacaacgagatcggcgacaccggcgtgagacagctgtgcgccgccctgcagcacccccactgcaagctggagtgcctgggcctgcagacctgccccatcaccagagcctgctgcgacgacatcgccgccgccctgatcgcctgcaagaccctgagaagcctgaacctggactggatcgccctggacgccgacgccgtggtggtgctgtgcgaggccctgagccaccccgactgcgccctgcagatgctgggcaactgccagaagagcctgggcgacaccgtggcccccggcgagaaccactgcagcatcaagcacctgctgctgaccctgcccatcaacatgcagagacagctgagactgcagaagtag

SEQ ID NO: 10091 - DNA, 3039 bp, synthetic construct
  source 1..3039: mol_type = other DNA; note = Synthetic coding sequence
atggacgccctggacgccagcaagctgctggacgaggagctgtacagcagacagctgtacgtgctgggcagccccgccatgcagagaatccagggcgccagagtgctggtgagcggcctgcagggcctgggcgccgaggtggccaagaacctggtgctgatgggcgtgggcagcctgaccctgcacgacccccaccccacctgctggagcgacctggccgcccagttcctgctgagcgagcaggacctggagagaagcagagccgaggccagccaggagctgctggcccagctgaacagagccgtgcaggtggtggtgcacaccggcgacatcaccgaggacctgctgctggacttccaggtggtggtgctgaccgccgccaagctggaggagcagctgaaggtgggcaccctgtgccacaagcacggcgtgtgcttcctggccgccgacaccagaggcctggtgggccagctgttctgcgacttcggcgaggacttcaccgtgcaggaccccaccgaggccgagcccctgaccgccgccatccagcacatcagccagggcagccccggcatcctgaccctgagaaagggcgccaacacccactacttcagagacggcgacctggtgaccttcagcggcatcgagggcatggtggagctgaacgactgcgaccccagaagcatccacgtgagagaggacggcagcctggagatcggcgacaccaccaccttcagcagatacctgagaggcggcgccatcaccgaggtgaagagacccaagaccgtgagacacaagagcctggacaccgccctgctgcagccccacgtggtggcccagagcagccaggaggtgcaccacgcccactgcctgcaccaggccttctgcgccctgcacaagttccagcacctgcacggcagacccccccagccctgggaccccgtggacgccgagaccgtggtgggcctggccagagacctggagcccctgaagagaaccgaggaggagcccctggaggagcccctggacgaggccctggtgagaaccgtggccctgagcagcgccggcgtgctgagccccatggtggccatgctgggcgccgtggccgcccaggaggtgctgaaggccatcagcagaaagttcatgcccctggaccagtggctgtacttcgacgccctggactgcctgcccgaggacggcgagctgctgcccagccccgaggactgcgccctgagaggcagcagatacgacggccagatcgccgtgttcggcgccggcttccaggagaagctgagaagacagcactacctgctggtgggcgccggcgccatcggctgcgagctgctgaaggtgttcgccctggtgggcctgggcgccggcaacagcggcggcctgaccgtggtggacatggaccacatcgagagaagcaacctgagcagacagttcctgttcagaagccaggacgtgggcagacccaaggccgaggtggccgccgccgccgccagaggcctgaaccccgacctgcaggtgatccccctgacctaccccctggaccccaccaccgagcacatctacggcgacaacttcttcagcagagtggacggcgtggccgccgccctggacagcttccaggccagaagatacgtggccgccagatgcacccactacctgaagcccctgctggaggccggcaccagcggcacctggggcagcgccaccgtgttcatgccccacgtgaccgaggcctacagagcccccgccagcgccgccgccagcgaggacgccccctaccccgtgtgcaccgtgagatacttccccagcaccgccgagcacaccctgcagtgggccagacacgagttcgaggagctgttcagactgagcgccgagaccatcaaccaccaccagcaggcccacaccagcctggccgacatggacgagccccagaccctgaccctgctgaagcccgtgctgggcgtgctgagagtgagaccccagaactggcaggactgcgtggcctgggccctgggccactggaagctgtgcttccactacggcatcaagcagctgctgagacacttcccccccaacaaggtgctggaggacggcacccccttctggagcggccccaagcagtgcccccagcccctggagttcgacaccaaccaggacacccacctgctgtacgtgctggccgccgccaacctgtacgcccagatgcacggcctgcccggcagccaggactggaccgccctgagagagctgctgaagctgctgccccagcccgacccccagcagatggcccccatcttcgccagcaacctggagctggccagcgccagcgccgagttcggccccgagcagcagaaggagctgaacaaggccctggaggtgtggagcgtgggcccccccctgaagcccctgatgttcgagaaggacgacgacagcaacttccacgtggacttcgtggtggccgccgccagcctgagatgccagaactacggcatcccccccgtgaacagagcccagagcaagagaatcgtgggccagatcatccccgccatcgccaccaccaccgccgccgtggccggcctgctgggcctggagctgtacaaggtggtgagcggccccagacccagaagcgccttcagacacagctacctgcacctggccgagaactacctgatcagatacatgcccttcgcccccgccatccagaccttccaccacctgaagtggaccagctgggacagactgaaggtgcccgccggccagcccgagagaaccctggagagcctgctggcccacctgcaggagcagcacggcctgagagtgagaatcctgctgcacggcagcgccctgctgtacgccgccggctggagccccgagaagcaggcccagcacctgcccctgagagtgaccgagctggtgcagcagctgaccggccaggcccccgcccccggccagagagtgctggtgctggagctgagctgcgagggcgacgacgaggacaccgccttcccccccctgcactacgagctgtag

SEQ ID NO: 10092 - DNA, 360 bp, synthetic construct
  source 1..360: mol_type = other DNA; note = Synthetic coding sequence
atggtgagaaccaagacctggaccctgaagaagcacttcgtgggctaccccaccaacagcgacttcgagctgaagaccgccgagctgccccccctgaagaacggcgaggtgctgctggaggccctgttcctgaccgtggacccctacatgagagtggtggagagcaagaacgtggccctgcccaagggcaccatcgtgctggccagccccggctggaccacccacagcatcagcgacggcaaggacctggagaagctgctgaccgagtggcccgacaccatccccctgagcctggccctgggcaccgtgggcatgcccggcctgaccgcctacttcggcctgctggagatctgcggctag

SEQ ID NO: 10093 - DNA, 1797 bp, synthetic construct
  source 1..1797: mol_type = other DNA; note = Synthetic coding sequence
atgggcggctgcttcagcaagcccaagcccgtggagctgaagatcgaggtggtgctgcccgagaaggagagaggcaaggaggagctgagcgccagcggcaagggcagccccagagcctaccagggcaacggcaccgccagacacttccacaccgaggagagactgagcaccccccacccctaccccagcccccaggactgcgtggaggccgccgtgtgccacgtgaaggacctggagaacggccagatgagagaggtggagctgggctggggcaaggtgctgctggtgaaggacaacggcgagttccacgccctgggccacaagtgcccccactacggcgcccccctggtgaagggcgtgctgagcagaggcagagtgagatgcccctggcacggcgcctgcttcaacatcagcaccggcgacctggaggacttccccggcctggacagcctgcacaagttccaggtgaagatcgagaaggagaaggtgtacgtgagagccagcaagcaggccctgcagctgcagagaagaaccaaggtgatggccaagtgcatcagccccagcgccggctacagcagcagcaccaacgtgctgatcgtgggcgccggcgccgccggcctggtgtgcgccgagaccctgagacaggagggcttcagcgacagaatcgtgctgtgcaccctggacagacacctgccctacgacagacccaagctgagcaagagcctggacacccagcccgagcagctggccctgagacccaaggagttcttcagagcctacggcatcgaggtgctgaccgaggcccaggtggtgaccgtggacgtgagaaccaagaaggtggtgttcaaggacggcttcaagctggagtacagcaagctgctgctggcccccggcagcagccccaagaccctgagctgcaagggcaaggaggtggagaacgtgttcaccatcagaacccccgaggacgccaacagagtggtgagactggccagaggcagaaacgtggtggtggtgggcgccggcttcctgggcatggaggtggccgcctacctgaccgagaaggcccacagcgtgagcgtggtggagctggaggagacccccttcagaagattcctgggcgagagagtgggcagagccctgatgaagatgttcgagaacaacagagtgaagttctacatgcagaccgaggtgagcgagctgagaggccaggagggcaagctgaaggaggtggtgctgaagagcagcaaggtggtgagagccgacgtgtgcgtggtgggcatcggcgccgtgcccgccaccggcttcctgagacagagcggcatcggcctggacagcagaggcttcatccccgtgaacaagatgatgcagaccaacgtgcccggcgtgttcgccgccggcgacgccgtgaccttccccctggcctggagaaacaacagaaaggtgaacatcccccactggcagatggcccacgcccagggcagagtggccgcccagaacatgctggcccaggaggccgagatgagcaccgtgccctacctgtggaccgccatgttcggcaagagcctgagatacgccggctacggcgagggcttcgacgacgtgatcatccagggcgacctggaggagctgaagttcgtggccttctacaccaagggcgacgaggtgatcgccgtggccagcatgaactacgaccccatcgtgagcaaggtggccgaggtgctggccagcggcagagccatcagaaagagagaggtggagaccggcgacatgagctggctgaccggcaagggcagctag

SEQ ID NO: 10094 - DNA, 1854 bp, synthetic construct
  source 1..1854: mol_type = other DNA; note = Synthetic coding sequence
atgggcagctacctgagcgtgcccgcctacttcaccagcagagacctgttcagatgcagcgagtgccaggacagcctgaccaactggtactacgagaaggacggcaagctgtactgccccaaggactactggggcaagttcggcgagttctgccacggctgcagcctgctgatgaccggccccttcatggtggccggcgagttcaagtaccaccccgagtgcttcgcctgcatgagctgcaaggtgatcatcgaggacggcgacgcctacgccctggtgcagcacgccaccctgtactgcggcaagtgccacaacgaggtggtgctggcccccatgttcgagagactgagcaccgagagcgtgcaggagcagctgccctacagcgtgaccctgatcagcatgcccgccaccaccgagggcagaagaggcttcagcgtgagcgtggagagcgcctgcagcaactacgccaccaccgtgcaggtgaaggaggtgaacagaatgcacatcagccccaacaacagaaacgccatccaccccggcgacagaatcctggagatcaacggcacccccgtgagaaccctgagagtggaggaggtggaggacgccatcagccagaccagccagaccctgcagctgctgatcgagcacgaccccgtgagccagagactggaccagctgagactggaggccagactggccccccacatgcagaacgccggccacccccacgccctgagcaccctggacaccaaggagaacctggagggcaccctgagaagaagaagcctgagaagaagcaacagcatcagcaagagccccggccccagcagccccaaggagcccctgctgttcagcagagacatcagcagaagcgagagcctgagatgcagcagcagctacagccagcagatcttcagaccctgcgacctgatccacggcgaggtgctgggcaagggcttcttcggccaggccatcaaggtgacccacaaggccaccggcaaggtgatggtgatgaaggagctgatcagatgcgacgaggagacccagaagaccttcctgaccgaggtgaaggtgatgagaagcctggaccaccccaacgtgctgaagttcatcggcgtgctgtacaaggacaagaagctgaacctgctgaccgagtacatcgagggcggcaccctgaaggacttcctgagaagcatggaccccttcccctggcagcagaaggtgagattcgccaagggcatcgccagcggcatggcctacctgcacagcatgtgcatcatccacagagacctgaacagccacaactgcctgatcaagctggacaagaccgtggtggtggccgacttcggcctgagcagactgatcgtggaggagagaaagagagcccccatggagaaggccaccaccaagaagagaaccctgagaaagaacgacagaaagaagagatacaccgtggtgggcaacccctactggatggcccccgagatgctgaacggcaagagctacgacgagaccgtggacatcttcagcttcggcatcgtgctgtgcgagatcatcggccaggtgtacgccgaccccgactgcctgcccagaaccctggacttcggcctgaacgtgaagctgttctgggagaagttcgtgcccaccgactgcccccccgccttcttccccctggccgccatctgctgcagactggagcccgagagcagacccgccttcagcaagctggaggacagcttcgaggccctgagcctgtacctgggcgagctgggcatccccctgcccgccgagctggaggagctggaccacaccgtgagcatgcagtacggcctgaccagagacagccccccctag

SEQ ID NO: 10095 - DNA, 1338 bp, synthetic construct
  source 1..1338: mol_type = other DNA; note = Synthetic coding sequence
atgagagagatcgtgcacatccaggccggccagtgcggcaaccagatcggcgccaagttctgggaggtgatcagcgacgagcacggcatcgaccccaccggcagctaccacggcgacagcgacctgcagctggagagaatcaacgtgtactacaacgaggccgccggcaacaagtacgtgcccagagccatcctggtggacctggagcccggcaccatggacagcgtgagaagcggccccttcggccagatcttcagacccgacaacttcgtgttcggccagagcggcgccggcaacaactgggccaagggccactacaccgagggcgccgagctggtggacagcgtgctggacgtggtgagaaaggagagcgagagctgcgactgcctgcagggcttccagctgacccacagcctgggcggcggcaccggcagcggcatgggcaccctgctgatcagcaagatcagagaggagtaccccgacagaatcatgaacaccttcagcgtgatgcccagccccaaggtgagcgacaccgtggtggagccctacaacgccaccctgagcgtgcaccagctggtggagaacaccgacgagacctacagcatcgacaacgaggccctgtacgacatctgcttcagaaccctgaagctgaccacccccacctacggcgacctgaaccacctggtgagcgccaccatgagcggcgtgaccacctgcctgagattccccggccagctgaacgccgacctgagaaagctggccgtgaacatggtgcccttccccagactgcacttcttcatgcccggcttcgcccccctgaccagcagaggcagccagcagtacagagccctgaccgtgcccgagctgacccagcagatgttcgacagcaagaacatgatggccgcctgcgaccccagacacggcagatacctgaccgtggccgccatcttcagaggcagaatgagcatgaaggaggtggacgagcagatgctgaacgtgcagaacaagaacagcagctacttcgtggagtggatccccaacaacgtgaagaccgccgtgtgcgacatcccccccagaggcctgaagatgagcgccaccttcatcggcaacagcaccgccatccaggagctgttcaagagaatcagcgagcagttcaccgccatgttcagaagaaaggccttcctgcactggtacaccggcgagggcatggacgagatggagttcaccgaggccgagagcaacatgaacgacctggtgagcgagtaccagcagtaccaggacgccaccgccgacgagcagggcgagttcgaggaggaggagggcgaggacgaggcctag

SEQ ID NO: 10096 - DNA, 2028 bp, synthetic construct
  source 1..2028: mol_type = other DNA; note = Synthetic coding sequence
atggccaagcacggcgccgacgagcccagcagcagaagcggcagccccgacagagagggcagagccagcgaggacagaagcctgctgcaccagagactggccgtgagagagctgatcgacaccgaggtgagctacctgcacatgctgcagctgtgcgccagcgacatcagaagcagactgcagcagctgccccagggcgacctggacgtgctgttcagcaacatcgacgacatcatcaaggtgaacagcagattcctgcacgacctgcaggagaccgccagcaaggaggaggagcaggtgcagctggtgggcaacatcttcctggagttccaggaggagctggagcaggtgtacaaggtgtactgcgccagctacgaccaggccctgctgctggtggacacctacagaaaggagcccgagctgcagagacacatccagggcatcgtggaggccgtggtgccccaggccggcagcagcggcctgagcttcctgctggtgatccccctgcagagaatcaccagataccccctgctgctgcagaagatcctggagaacaccgtgcccgacgccagcgcctaccccgtgctgcagagagccgtgagcgccctgcaggacgtgaacaccaacatcaacgagtacaagatgagaaaggaggtggccagcaagtacaccaaggtggagcagctgaccctgagagagagactggccagaatcaacacccacaccctgagcaagaagaccaccagactgagccagctgctgaagcaggaggccggcctgatccccagaaccgaggacaaggagttcgacgacctggaggagagattccagtgggtgagcctgtgcgtgaccgagctgaagaacaacgtggccgcctacctggacaacctgcaggccttcctgtacttcagaccccacgagtacaacctggacatccccgagggccccgccgtgcagtactgcaacctggccagagacctgcacctggaggccttcctgaagttcaagcagagactggagggcctggtgtggcagcccctgtgcagcctggccaaggccctgctgggcccccagaacctgatcaagaagagactggacaagctgctggacttcgagagagtggaggagaagctgctggaggtgggcagcgtgacctaccaggaggaggccgccagacacacctaccaggccctgaacagcctgctggtggccgagctgccccagttcaaccagctggtgatgcagtggctgggccagatcatgtgcaccttcgtgaccctgcagagagacctggccaagcaggtgctgcagagagccgagggcagcatggcccagctgccccaccaccacgtgcccgagcccgccttcagaaagctggtggaggacgccctgggcagaaccagcaaccagctgagaagcttccaggagaccttcgagaaggtgcagcccccccccaccacccagcccctgctgcccggcagcgagagacaggtgcaggccctgctgagcagatacggccccggcaagctgtaccaggtgaccagcaacatcagcggcaccggcaccctggacctgaccctgcccagaggccagatcgtggccatcctgcagaacaaggacaccaagggcaacagcggcagatggctggtggacaccggcggccacagaggctacgtgcccgccggcaagctgcagctgtaccacgtggtgcccagcgccgaggagctgagaagacaggccggcctgaacaaggaccccagatgcctgacccccgagcccagccccgccctggtgcccagcatccccaccatgaaccaggtgatcgccgcctaccccttcgtggccagaagcagccacgaggtgagcctgcaggccggccagcccgtgaccatcctggaggcccaggacaagaagggcaaccccgagtggagcctggtggaggtgaacggccagagaggctacgtgcccagcggcttcctggccagagccagaagccccgtgctgtggggctggagcctgcccagctag

SEQ ID NO: 10097 - DNA, 3399 bp, synthetic construct
  source 1..3399: mol_type = other DNA; note = Synthetic coding sequence
atggccagcgacggcgccagcgccctgcccggccccgacatgagcatgaagcccagcgccgcccccagccccagccccgccctgcccttcctgccccccaccagcgacccccccgaccacccccccagagagccccccccccagcccatcatgcccagcgtgttcagccccgacaaccccctgatgctgagcgccttccccagcagcctgctggtgaccggcgacggcggcccctgcctgagcggcgccggcgccggcaaggtgatcgtgaaggtgaagaccgagggcggcagcgccgagcccagccagacccagaacttcatcctgacccagaccgccctgaacagcaccgcccccggcaccccctgcggcggcctggagggccccgccccccccttcgtgaccgccagcaacgtgaagaccatcctgcccagcaaggccgtgggcgtgagccaggagggcccccccggcctgcccccccagccccccccccccgtggcccagctggtgcccatcgtgcccctggagaaggcctggcccggcccccacggcaccaccggcgagggcggccccgtggccaccctgagcaagcccagcctgggcgacagaagcaagatcagcaaggacgtgtacgagaacttcagacagtggcagagatacaaggccctggccagaagacacctgagccagagccccgacaccgaggccctgagctgcttcctgatccccgtgctgagaagcctggccagactgaagcccaccatgaccctggaggagggcctgcccctggccgtgcaggagtgggagcacaccagcaacttcgacagaatgatcttctacgagatggccgagagattcatggagttcgaggccgaggagatgcagatccagaacacccagctgatgaacggcagccagggcctgagccccgccacccccctgaagctggaccccctgggccccctggccagcgaggtgtgccagcagcccgtgtacatccccaagaaggccgccagcaagaccagagcccccagaagaagacagagaaaggcccagagaccccccgcccccgaggcccccaaggagatcccccccgaggccgtgaaggagtacgtggacatcatggagtggctggtgggcacccacctggccaccggcgagagcgacggcaagcaggaggaggagggccagcagcaggaggaggagggcatgtaccccgaccccggcctgctgagctacatcaacgagctgtgcagccagaaggtgttcgtgagcaaggtggaggccgtgatccacccccagttcctggccgacctgctgagccccgagaagcagagagaccccctggccctgatcgaggagctggagcaggaggagggcctgaccctggcccagctggtgcagaagagactgatggccctggaggaggaggaggacgccgaggccccccccagcttcagcggcgcccagctggacagcagccccagcggcagcgtggaggacgaggacggcgacggcagactgagacccagccccggcctgcagggcgccggcggcgccgcctgcctgggcaaggtgagcagcagcggcaagagagccagagaggtgcacggcggccaggagcaggccctggacagccccagaggcatgcacagagacggcaacaccctgcccagccccagcagctgggacctgcagcccgagctggccgccccccagggcacccccggccccctgggcgtggagagaagaggcagcggcaaggtgatcaaccaggtgagcctgcaccaggacggccacctgggcggcgccggcccccccggccactgcctggtggccgacagaaccagcgaggccctgcccctgtgctggcagggcggcttccagcccgagagcacccccagcctggacgccggcctggccgagctggcccccctgcagggccagggcctggagaagcaggtgctgggcctgcagaagggccagcagaccggcggcagaggcgtgctgccccagggcaaggagcccctggccgtgccctgggagggcagcagcggcgccatgtggggcgacgacagaggcacccccatggcccagagctacgaccagaaccccagccccagagccgccggcgagagagacgacgtgtgcctgagccccggcgtgtggctgagcagcgagatggacgccgtgggcctggagctgcccgtgcagatcgaggaggtgatcgagagcttccaggtggagaagtgcgtgaccgagtaccaggagggctgccagggcctgggcagcagaggcaacatcagcctgggccccggcgagaccctggtgcccggcgacaccgagagcagcgtgatcccctgcggcggcaccgtggccgccgccgccctggagaagagaaactactgcagcctgcccggccccctgagagccaacagcccccccctgagaagcaaggagaaccaggagcagagctgcgagaccgtgggccaccccagcgacctgtgggccgagggctgcttccccctgctggagagcggcgacagcaccctgggcagcagcaaggagaccctgccccccacctgccagggcaacctgctgatcatgggcaccgaggacgccagcagcctgcccgaggccagccaggaggccggcagcagaggcaacagcttcagccccctgctggagaccatcgagcccgtgaacatcctggacgtgaaggacgactgcggcctgcagctgagagtgagcgaggacacctgccccctgaacgtgcacagctacgacccccagggcgagggcagagtggaccccgacctgagcaagcccaagaacctggcccccctgcaggagagccaggagagctacaccaccggcacccccaaggccaccagcagccaccagggcctgggcagcaccctgcccagaagaggcaccagaaacgccatcgtgcccagagagaccagcgtgagcaagacccacagaagcgccgacagagccaagggcaaggagaagaagaagaaggaggccgaggaggaggacgaggagctgagcaacttcgcctacctgctggccagcaagctgagcctgagccccagagagcaccccctgagcccccaccacgccagcggcggccagggcagccagagagccagccacctgctgcccgccggcgccaagggccccagcaagctgccctaccccgtggccaagagcggcaagagagccctggccggcggccccgcccccaccgagaagaccccccacagcggcgcccagctgggcgtgcccagagagaagcccctggccctgggcgtggtgagacccagccagcccagaaagagaagatgcgacagcttcgtgaccggcagaagaaagaagagaagaagaagccagtag

SEQ ID NO: 10098 - DNA, 522 bp, synthetic construct
  source 1..522: mol_type = other DNA; note = Synthetic coding sequence
atggccgtggccgtgggcgtgagagccgcccccgtgctgggcctggccagagccctggtgctgggcctgagaggcagccaggccgccagatggagaggctggggcaccgccgcccccggcagcctgtgggccctgtgcgagtgccccgccggctgcagagagctgtggttcagaggcagagccgcctgggccgccagaagcgagagactgctgcaccccgcccaggacagcgacggcgagagagaggacagcgccgccgagagagccagacagcagctggaggccctgctgaacaagaccatgagaatcagaatgaccgacggcagaaccctggtgggctgcttcctgtgcaccgacagagactgcaacgtgatcctgggcagcgcccaggagttcctgaagcccagcgacagcttcagcgccggcgagcccagagtgctgggcctggccatggtgcccggccaccacatcgtgagcatcgaggtgcagagagagagcctgaccggccccccctacctgtag

SEQ ID NO: 10099 - DNA, 558 bp, synthetic construct
  source 1..558: mol_type = other DNA; note = Synthetic coding sequence
atggtgaacagctgctgcggcagcgtgtgcagcgaccagggctgcggccaggacctgtgccaggagacctgctgctgccccagctgctgccagaccacctgctgcagaaccacctgctacagacccagctacagcgtgagctgctgctgcagaccccagtgctgccagagcgtgtgctgccagcccacctgctgcagacccagctgctgcgtgagcagctgctgcaagccccagtgctgccagagcgtgtgctgccagcccacctgctgccaccccagctgctgcatcagcagctgctgcagacccagctgctgcgtgagcagctgctgcaagccccagtgctgccagagcgtgtgctgccagcccaactgctgcagacccagctgcagcatcagcagctgctgcagacccagctgctgcgagagcagctgctgcagaccctgctgctgcctgagacccgtgtgcggcagagtgagctgccacaccacctgctacagacccgcctgcgtgatcagcacctgccccagacccgtgtgctgcgccagcagctgctgctag

SEQ ID NO: 10100 - DNA, 252 bp, synthetic construct
  source 1..252: mol_type = other DNA; note = Synthetic coding sequence
atgtgctgcaactactacagaaactgctgcggcggctgcggctacggcagcggctggagcagcggctgcggctacggctgcggctacggctgcggctacggcagcggctgcagatacggcagcggctacggcaccggctgcggctacggctgcggctacggcagcggctgcggctacggctgcggctacagcagcagctgctgcggctacagacccctgtgctacagaagatgctacagcagctgctactag

SEQ ID NO: 10101 - DNA, 993 bp, synthetic construct
  source 1..993: mol_type = other DNA; note = Synthetic coding sequence
atgggcagcagaaagaaggagatcgccctgcaggtgaacatcagcacccaggagctgtgggaggagatgctgagcagcaagggcctgaccgtggtggacgtgtaccagggctggtgcggcccctgcaagcccgtggtgagcctgttccagaagatgagaatcgaggtgggcctggacctgctgcacttcgccctggccgaggccgacagactggacgtgctggagaagtacagaggcaagtgcgagcccaccttcctgttctacgccggcggcgagctggtggccgtggtgagaggcgccaacgcccccctgctgcagaagaccatcctggaccagctggaggccgagaagaaggtgctggccgagggcagagagagaaaggtgatcaaggacgaggccctgagcgacgaggacgagtgcgtgagccacggcaagaacaacggcgaggacgaggacatggtgagcagcgagagaacctgcaccctggccatcatcaagcccgacgccgtggcccacggcaagaccgacgagatcatcatgaagatccaggaggccggcttcgagatcctgaccaacgaggagagaaccatgaccgaggccgaggtgagactgttctaccagcacaaggccggcgaggaggccttcgagaagctggtgcaccacatgtgcagcggccccagccacctgctgatcctgaccagaaccgagggcttcgaggacgtggtgaccacctggagaaccgtgatgggccccagagaccccaacgtggccagaagagagcagcccgagagcctgagagcccagtacggcaccgagatgcccttcaacgccgtgcacggcagcagagacagagaggacgccgacagagagctggccctgctgttccccagcctgaagttcagcgacaaggacaccgaggccccccagggcggcgaggccgaggccaccgccggccccaccgaggccctgtgcttccccgaggacgtggactag

SEQ ID NO: 10102 - DNA, 606 bp, synthetic construct
  source 1..606: mol_type = other DNA; note = Synthetic coding sequence
atggtgagcagctgctgcggcagcgtgtgcagcgaccagggctgcggccaggacctgtgccaggagacctgctgcagacccagctgctgcgagaccacctgctgcagaaccacctgctgcagacccagctgctgcgtgagcagctgctgcagaccccagtgctgccagagcgtgtgctgccagcccacctgcagcagacccagctgctgccagaccacctgctgcagaaccacctgctacagacccagctgctgcgtgagcagctgctgcagaccccagtgctgccagcccgcctgctgccagcccacctgctgcagaccccccagatgctgcatcagcagctgctgcagacccagctgctgcgtgagcagctgctgcaagccccagtgctgccagagcgtgtgctgccagcccaactgctgcagacccagctgcagcatcagcagctgctgcagacccagctgctgcgagagcagctgctgcagaccctgctgctgcgtgagacccgtgtgcggcagagtgagctgccacaccacctgctacagacccacctgcgtgatcagcagctgccccagacccctgtgctgcgccagcagctgctgctag

SEQ ID NO: 10103 - DNA, 792 bp, synthetic construct
  source 1..792: mol_type = other DNA; note = Synthetic coding sequence
atgggcgacatccccgccgtgggcctgagcagctggaaggccagccccggcaaggtgaccgaggccgtgaaggaggccatcgacgccggctacagacacttcgactgcgcctacttctaccacaacgagagagaggtgggcgccggcatcagatgcaagatcaaggagggcgccgtgagaagagaggacctgttcatcgccaccaagctgtggtgcacctgccacaagaagagcctggtggagaccgcctgcagaaagagcctgaaggccctgaagctgaactacctggacctgtacctgatccactggcccatgggcttcaagcccccccaccccgagtggatcatgagctgcagcgagctgagcttctgcctgagccaccccagagtgcaggacctgcccctggacgagagcaacatggtgatccccagcgacaccgacttcctggacacctgggaggccatggaggacctggtgatcaccggcctggtgaagaacatcggcgtgagcaacttcaaccacgagcagctggagagactgctgaacaagcccggcctgagattcaagcccctgaccaaccagatcctgatcagattccagatccagagaaacgtgatcgtgatccccggcagcatcacccccagccacatcaaggagaacatccaggtgttcgacttcgagctgacccagcacgacatggacaacatcctgagcctgaacagaaacctgagactggccatgttccccatcaccaagaaccacaaggactaccccttccacatcgagtactag

SEQ ID NO: 10104 - DNA, 177 bp, synthetic construct
  source 1..177: mol_type = other DNA; note = Synthetic coding sequence
atgagatactacggcagctactacagaggcctgggctacggctgcggcggcttcggcggcctgggctacggctgcggctgcggcggctacagatacggcagcggctacggcggctacagatacggctgctgcagacccagctgcagagagggctacggcttcagcggcttctactag

SEQ ID NO: 10105 - DNA, 159 bp, synthetic construct
  source 1..159: mol_type = other DNA; note = Synthetic coding sequence
atgtgctacggctacggctgcggctgcggcagcttctgcagactgggctacggctgcggctacgagggctgcagatacggctgcggccacagaggctgcggcgacggctgctgctgccccagctgctacagaagatacagattcaccggcttctactag

SEQ ID NO: 10106 - DNA, 255 bp, synthetic construct
  source 1..255: mol_type = other DNA; note = Synthetic coding sequence
atgagctactacggcagctactacagaggcctgggctacggctgcggcggcttcggcggcctgggctacggctacggctgcggctgcggcagcttcagaagactgggctacggctgcggcttcggcggcaacggctacggctactgcagacccagctgctacggcggctacggcttcagcatcctgctgaagagctaccccgaggacaccatcagcgaggtgatcagaagaagcttcaacctgaccaagtactag

SEQ ID NO: 10107 - DNA, 246 bp, synthetic construct
  source 1..246: mol_type = other DNA; note = Synthetic coding sequence
atgagctactacggcagctactacggcggcctgggctacggctgcggcggcttcggcggcctgggctacggctacggctgcggctgcggcagcttcagaagactgggcagcggctgcggctacggcggctacggctacggcagcggcttcggcggctacggctacggcagcggcttcggcggctacggctacggctgctacagacccagctactacggcggctacggcttcagcggcttctactag

SEQ ID NO: 10108 - DNA, 414 bp, synthetic construct
  source 1..414: mol_type = other DNA; note = Synthetic coding sequence
atgagctacaactgcagcagcggcaacttcagcagctgctgcttcggcagctacctgagataccccgtgagcacctacaacctgttctaccccagcaacgccatctacagccccaacacctgccagctgggcagcagcctgtacaacggctgccaggagacctactgcgagcccaccagctgccagaccagctgcaccctggccagaagctaccagaccagctgctactgccccaagaacagcatcttctgcagccccagacagaccaactacatcagaagcctgggctgcggcaacaccggcctgggcagcctgggctgcggcagcaccggcttccagagcctggactgcggcagcagcttctaccaccccaccaccttcagcagcagaaacttccaggccacctgctactag

SEQ ID NO: 10109 - DNA, 483 bp, synthetic construct
  source 1..483: mol_type = other DNA; note = Synthetic coding sequence
atgagctacaactgctgcagcagaaacttcagcagcagaagcttcggcggctacctgtactaccccggcagctaccccagcagcctggtgtacagcaccgccctgtgcagccccagcacctgccagctgagaagcagcctgtacagagactgccagaagacctgctgggagcccgccagctgccagaagagctgctacagacccagaaccagcatcctgtgctgcccctgccagaccacctgcagcggcagcctgggcttcagaagcagcagctgcagaagccagggctacggcagcagatgctgctacagcctgggcaacggcagcagcggcttcagattcctgaagtacggcggctgcggcttccccagcctgagctacggcagcagattctgctaccccaactacctggccagcggcgcctggcagagcagctgctacagacccatctgcggcagcagattctaccagttcacctgctag

SEQ ID NO: 10110 - DNA, 684 bp, synthetic construct
  source 1..684: mol_type = other DNA; note = Synthetic coding sequence
atgctgaaccccgacggcgtgtacctgggcaactacagatgcagcctgatgggcttcgacctgaacagacactggctggaccccagcccctgggtgcaccccaccctgcacggcgtgaagcagctgatcgtgcagatgtacaacgaccccaagaccagcctggagttctacatcgacatccacgcccacagcaccatgatgaacggcttcatgtacggcaacatcttcgaggacgaggagagattccagagacaggccatcttccccaagctgctgtgccagaacgccgaggacttcagctacagcagcaccagcttcaacagagacgccgtgaaggccggcaccggcagaagattcctgggcggcctgctggaccacaccagctactgctacaccctggaggtgagcttctacagctacatcatcagcggcaccaccgccgccgtgccctacaccgaggaggcctacatgaagctgggcagaaacgtggccagaaccttcctggactactacagactgaaccccgtggtggagaaggtggccatccccatgcccagactgagaaaggagaagagccccccctacaagcaccccctgctgagaggccccgccagcaactaccccaacagcaagggcgacaagaagagcagcgtgaaccacaaggaccccagcacccccttctag

SEQ ID NO: 10111 - DNA, 465 bp, synthetic construct
  source 1..465: mol_type = other DNA; note = Synthetic coding sequence
atgacccactgctgcagcccctgctgccagcccacctgctgcagaaccacctgctgcagaaccacctgctggaagcccaccaccgtgaccacctgcagcagcaccccctgctgccagcccagctgctgcgtgagcagctgctgccagccctgctgcagacccacctgctgccagaacacctgctgccagcccacctgcgtgaccagctgctgccagcccagctgctgcagcaccccctgctgccagcccacctgctgcggcagcagctgcgaccagagcagcagctgcgcccccgtgtactgcagaagaacctgctactaccccaccaccgtgtgcctgcccggctgcctgaaccagagctgcggcagcaactgctgccagccctgctgcagacccgcctgctgcgagaccacctgcttccagcccacctgcgtgagcagctgctgccagcccttctgctgctag

SEQ ID NO: 10112 - DNA, 7062 bp, synthetic construct
  source 1..7062: mol_type = other DNA; note = Synthetic coding sequence
atgaagcagagaaagggccagggcagcggcggcagcagaggcagaaagaagagaggcctgagcgacatcagccccagcaccagcctgccccccctggtggagggccagctgagatgcttcctgaagctgaccgtgaacagagtgatctggaagatcgccaagccccccacctgcgtgctggtgagagtgagatggtggggcgagaccagcgacggcaccctgttctgccccagagacgccctgcagaccgagcccaaggccgtgagaaccaccaccagatacgccatcagatgcggccccaagcagttcaccagctacctgaccgacatggccgtgctggtgctggaggtgatcaccaagctggacggcctgcccatcggcagagtgcagatcaacggcctggcccagctgagccccacccaccagatcaacggcttcttcaccatcgtgagcagcaccagcaagaagctgggcgagctgcaggtgagcctggccctggagcccctgagcgagacctacgacagctaccaccccctgcccaccaccgacatgaccgagaacgtgctgctgagcaagcagggcttcagagagaacaccgagcccagcagcacccagttccaggtgcccagcagacccagagacatccacaccatcaagatcgacggcaaggagctggccgccaacagcagcagaagcaccacccccagaggcaaggaccacgtgtgcttcgccgagaaccccgacaccatcaaggacagcagcttcggcctgcagcacagcctgaacagcggccagagcctggagagcgtgaccctgaagggcagagcccccagaaagcagatgagcctgctgaacagcagcgagttccagccccagatcagaaccgtggccaagagccacagcgacagctgcatcctgagcagcaacaacctgcccaccaaggacctgctgagcgccctgctggagcagggcaacaagctgagaaacgccatggtgatcagcgccatgaagagcagccccgagaccagcatgctgctggaccaggtgcacccccccatcaacgaggacagcctgagagccagcacccagatcagagccttcagcagaaacagattcaaggaccacatcgaggaccacctgctgcccagcaccgagaacaccttctggagacacgacaccaaggccgacaccagagccatccagctgctgctgggcagcgccgagctgagccagggcaacttctgggacggcctgggcagcccccccgacagccccagccccggcagcgacgtgtactgcatcagcgagctgaacgacccccagtacgaccagagcctgctggagaacctgttctacaccgcccccaagagcgacaccagcatcagcgacttcctgagcgaggaggacgacatcgtgcccagcaagaagatcagccagagcaccgccctggccagaagcagcaaggtgctggagagcagcgaccacaagctgaagaagagaagcgccggcaagagaaacagaaacctggtggagcagcagatgctgagcgagacccccgaggacgcccagaccatgaccctgagcgtggacagactggccctgctgggcagaacccacagcgtgagaatcatcatcgagaccatgggcgtgccccccgacagcccccagatgacccccggcaagaagagctacgccggccccccccccaaggtgaccaccgccaagaagagaaccttcttcgtggagtaccacttccccgtgggcttcagcgagagcggcctgggcaagaccgccctgatcaccgaggtggtgagactggccagcagcaagatcaccgacggcaaggtgaagttccagcagagattcgtgttccccgtgcagttcggcggccccatgatcgagcactggtggaacagcaacctgaccttccagatctacgtgaagaagaccccccagaagaagcccgaggtgatcggcagcgtgagcctgagcctgagagccgtgatccagagcgagctgctgagcttcagcgaccagctgcccgtgcagcaggagaacggccagagccccttcggccccctgaaggtgaccatggagctgatcaccgacaacaaggacttcaccggcatcaacaccaagctgagcggcaacacccactacacccccctgtgcgcccccaccagccccaacaaggccctgcccgagctgaaccaggacatgacctgcaccaagaacccccagaacctgaaccagatccacgaggagaccgccaagaaggcccagaacctggtgctgcccaacagaaagagccccagccccgtggccccccaccccagcaccttcgtggccacccccgccagccacaacctggtgaaccagaccaacggcaccaccaaggagagcgccctgctgctgcacgtgctgctgatggtgcccgacggcaaggacttcatcagcggcgagagcgagaagcagagcccctgcaacgtgtacctgaactgcaagctgttcagcaccgaggaggtgaccagaagcgtgatcgcctggggcaccacccagcccgtgttcaacttcagccaggtgatccccgtgagcctgagcagcaagtacctggagagactgaagaacaacgtgatggtgatcgagacctggaacaaggtgagaagccccggccaggacaagctgctgggcctggtgaagctgcccctgcaccagttctacatgagcttcaaggacgccaagatcagcagactgctgctggacgcccagtaccccgtggtggccgtggacagctacatgcccgtgatcgacgtgttcagcggccaccagaacggcagcctgagagtgttcctggccatgggcagcagcaaccagatcatggccctgcagagactgaagaacgaggagggcaccctgccccccttcagccccagacccgcccacttcctggaccagcccaccgccgccagcgtggccatggccgaggacagaggcaacggcctgatggagcactgcttcgagatccacatcgagatggtgaagggcctggcccccctgcaggccaccgtgtggggcgaggccgactgctacgtgcagtactacttccccgtgcagcacagccagagcagcgtgctgaagggccccgagttcctggagaacggcatcaccctgaagcccttcagaaccgccaccaccctgtgcgtgcccgaccccatcttcaacagcgagcaccaccacagcctgctgctgcccgccgaggtgcccgtgcagagactgctgctgagcgccttcagcgcccagggcctggtgcccggcggcggcgtgcagttcgagatctggtgcagatactactaccccaacgtgagagaccagaaggtggccaagggcaccctgcccctgagcagaatctgcgccatggtgaccacccagcacagagaggacgtgggcatccagaccttcaacctgcccctgacccccagaatcgagaacagaaaggagctgagaaaccagagcagcggcctgctggacgtgggcctgagatacagaagaagccccagaaccgccgagggcgtgctggccgccagaaccgtgagcatcagcgtgcagatcatcagagcctgcggcctgcaggccgccgccaaggccctggccgagagagagcccgccctgcagttcagcgccaccgtgggcgtgaacgccagcgtgaccacccacctgagcttcctgccccagggcgagcagagaagaacccaccccgtggcctgcagcttctgccccgagttcagccaccacgtggagttcacctgcaacctggtgacccagcactgcagcggcgaggcctgcttcctggccgagctgctggagttcgccgaggtgatcttcgccgtgtaccacgagaacaccaagagcgccagcgacatcatcagcatcgagagctgcaaggagtacctgctgggcgtggtgaaggtgcccaccaaggagctgctgatcaagagaagcggcatcaccggctggtaccccatcatcctgcccgaggacggcggcctgccccacggcctggagctgatgcagaagatcgtgggcggcctggagctgagcatcagcttcacccacagaggcgacagagagagagtgctggaggccgccgagcacctgggctggagcttcgagaacagcctgaaggacttcgtgagaatggacgagggcgagcccgccaccgtgaccatcagcacccccagactgtggctgcccatccactgcgtgctgctggccggccacaaccacatccacaagaacacctactgctacctgagatacaagttctacgaccacgaggccttctggacccccctgaagaagcccaaggagagcgtgaacaagaagcagatcatggtgaccttcaaggccagcaagagagccgaggtgaccagaggccccagcctgctgtggtacttcagagaggagagactggagatccaggtgtggagagcctacggcaacgacagcgtggagagaccccaccagaccgacagctggatcggcagcgcctacgtggacctggccagactgggcgagagaagcgccagaaccctgaccgtgagcggcgtgtaccccctgttcggcagaaacgccagcaacctgagcggcgccgccctgagagtgcacgtggtgctgagcagcctgagcagccacctggagcccacccacgagctggacagcatggactgcagcagccacagcgagagcgagcagctgcccagaagaaacgacgaggtgcagctgagcccccccgaggtgatcagctgccaccagaagagccccgccagcacccaggtgccctgcagcagcaccaccgccgaggtgagactgacccaggagggccccgccgacctggacggcaccttcgccgtgagcatcctggtggagagagccatgcacctgagcctgaagggcagccccctgaccgagagaaaggtgagcatccccagctgctgcgtgagcttcgccaccgccgacgagagcagccccgtgtacacccaggtggtggagaacaccgacagccccatctggaacttccagcagcagagcagactgagcaaggagctgctgctggacccccagcagaccctggtgttcaaggtgtggcacaagggcgacgaggagagagtgatcggcttcgccagcgtggacctgagccccctgctgagcggcttccagttcgtgtgcggctggtacaacatcaccgacttcagcggcgagtgccagggccagatcaaggtggccgtgagccccctggagagcctgatccacttcaaggaggagagacaggccagaagaggcgtggagaccagcaagagcctgatccccatctacagccccttcagcttccccgccagcgacacctacgccgccttcagcagccacatggccagacagaccctggaccagctggcccacgccagcagcaaggagctggacttcagcagccccggcagaagcgacaccaccagaagccaggccagcagacacgaggagcacgtgcagaacatcagaagattccacgagagcctgcacctgcagggcgaggcccccctgccctgcgacgacaagctgaccaccagccccctgagcagccagaccagcatcctgaccagcctgagaaagaacctgagcgagctggaccagatccagagatacttcagacagaagctgaccaagcccttcctgcccctgagcccccagacccagaccgccatcagccagcaccaggagagctgcagagaccacctgggccccggcgccagcagcctggaccccggcagccagtgcatcctggagaagagcagcaacctggtgctgcaggtgagcagcctgatcaccgacctgcagaccatcaccagagacagccaggccgccctgagcagccacagagccagaagcagaagcaacaaggccaccaccctgcccgacgcccaggacaccgaggccctgcaggagagatgcaccatgcccgacgagcccctggtgagagcccccgacaagggcaccgacagccccagccccccccccctggaggagaccagcaacggcggcagaatgctgcacgagagcctgagacacgccgtgcccatcaccagaatgcagagcagcgaggacaccgaggccggccccgcctacagcgacgaggactacgaggaggacatcatcgagcccagaaccctgaacgagatcaccaccgtgaccgacaagaccagcccctggagcagcgtgatcagcgacaccagcgaggtgatcagcccccagcccgacgaggtgcagagagagggccccagctgccccagccccggccccttctgcagagaggagctgatggtgaagagcagcttcctgagcagccccgagagagccgtgaacccccacctgcccagacagggcagccccagccagagcctggtggcctgcgagtgcgaggccagcaaggccagagtgggcggcgagagcgccagcgccaacccccagcccatcccctgccccaccctgagcggcgcccagcagagcagcaccttcgtgggctggagcagcccccagaccgaccagaacaaggagcccaagagcgaggcccccgccgagaacgaggccgccaccagcgagctgggcgacagcgccgacagcttcaagaagctgcccctgaacctggccagccagagcagaagagagaaccacaagggcccccccatcgacagcagcgacatcagacagagacaggtgaccaccggcagcgagaccagcaccaagcagagcctgctgctgcccggccccatcgtggtgcccaacttcttcctgcccccccagcagctggaggccagcctgagaatgctgagcctgagcgccaccctgccccccgccgccaccaccgaccaggacaagagcgaggccaccagaggcgccctgagccagagaccctgcagacccagacccaacagcctgcccctgaacctgcccgaggaggagaccctgagaatcgccagaatcttcagcagccagtacagccagaaggactag

SEQ ID NO: 10113 - DNA, 219 bp, synthetic construct
  source 1..219: mol_type = other DNA; note = Synthetic coding sequence
atgaactactacggcaactactacggcggcctgggctacggctacggcggcttcgacgacctgggctacggctacggctgcggctgcggcagcttcagaagactgggctacggcggcggctacggcggctacggctacggcagcggcttcggcggctacggctacagaagctgcagacccagctgctacggcggctacggcttcagcggcttctactag

SEQ ID NO: 10114 - DNA, 198 bp, synthetic construct
  source 1..198: mol_type = other DNA; note = Synthetic coding sequence
atgagctacaactgctgctgcggcaacttcagcagccacagctgcgagggctacctgtgctacagcggctacagcagaggcggcagcagctaccccagcaacctggtgtacagcaccgagcccctgatcagccagcacctgcccgccggcttcctgagcctgcagggcctgagcggcgacctgctgggcaacccctag

SEQ ID NO: 10115 - DNA, 384 bp, synthetic construct
  source 1..384: mol_type = other DNA; note = Synthetic coding sequence
atggtgaacagctgctgcggcagcgtgtgcagcgaccagggctgcgaccagggcctgtgccaggagacctgctgcagacccagctgctgccagaccacctgctgctgccccagctgcgtggtgagcagctgctgcagacccagctgcagccagaccacctgctgccagaccacctgctgcagacccagctgctgccaccccgtgtgctgccagaccacctgcagacccagctgcggcgtgagcagctgctgcagacccctgtgctgccagaccacctgcagacccagctgcggcgtgagcagctgctgcagacccctgtgctgccagaccacctgctgcagagccacctgctgcagacccagctgctgcggcagcagctgctag

SEQ ID NO: 10116 - DNA, 318 bp, synthetic construct
  source 1..318: mol_type = other DNA; note = Synthetic coding sequence
atgggctgctgccccggcgactgcttcacctgctgcacccaggagcagaactgctgcgaggagtgctgctgccagcccggctgctgcggctgctgcggcagctgctgcggctgcggcggcagcggctgcggcggcagcggctgcggcggcagctgctgcggcagcagctgctgcggcagcggctgcggcggctgcggcggctgcggcggctgcggcggcggctgctgcggcagcagctgctgcggcagcagctgctgcggcagcggctgctgcggccccgtgtgctgccagcccacccccatctgcgacaccaagtag

SEQ ID NO: 10117 - DNA, 3915 bp, synthetic construct
  source 1..3915: mol_type = other DNA; note = Synthetic coding sequence
atggaggagatccccgtgaaggtggccgtgagaatcagacccctgctgtgcaaggaggccctgcacaaccaccaggtgtgcgtgagagtgatccccaacagccagcaggtgatcatcggcagagacagagtgttcaccttcgacttcgtgttcggcaagaacagcacccaggacgaggtgtacaacacctgcatcaagcccctggtgctgagcctgatcgagggctacaacgccaccgtgttcgcctacggccagaccggcagcggcaagacctacaccatcggcggcggccacatcgccagcgtggtggagggccagaagggcatcatccccagagccatccaggagatcttccagagcatcagcgagcaccccagcatcgacttcaacgtgaaggtgagctacatcgaggtgtacaaggaggacctgagagacctgctggagctggagaccagcatgaaggacctgcacatcagagaggacgagaagggcaacaccgtgatcgtgggcgccaaggagtgccacgtggagagcgccggcgaggtgatgagcctgctggagatgggcaacgccgccagacacaccggcaccacccagatgaacgagcacagcagcagaagccacgccatcttcaccatcagcatctgccaggtgcacaagaacatggaggccgccgaggacggcagctggtacagccccagacacatcgtgagcaagttccacttcgtggacctggccggcagcgagagagtgaccaagaccggcaacaccggcgagagattcaaggagagcatccagatcaacagcggcctgctggccctgggcaacgtgatcagcgccctgggcgaccccagaagaaagagcagccacatcccctacagagacgccaagatcaccagactgctgaaggacagcctgggcggcagcgccaagaccgtgatgatcacctgcgtgagccccagcagcagcaacttcgacgagagcctgaacagcctgaagtacgccaacagagccagaaacatcagaaacaagcccaccgtgaacttcagccccgagagcgacagaatcgacgagatggagttcgagatcaagctgctgagagaggccctgcagagccagcaggccggcgtgagccagaccacccagatcaacagagagggcagccccgacaccaacagaatccacagcctggaggagcaggtggcccagctgcagggcgagtgcctgggctaccagtgctgcgtggaggaggccttcaccttcctggtggacctgaaggacaccgtgagactgaacgagaagcagcagcacaagctgcaggagtggttcaacatgatccaggaggtgagaaaggccgtgctgaccagcttcagaggcatcggcggcaccgccagcctggaggagggcccccagcacgtgaccgtgctgcagctgaagagagagctgaagaagtgccagtgcgtgctggccgccgacgaggtggtgttcaaccagaaggagctggaggtgaaggagctgaagaaccaggtgcagatgatggtgcaggagaacaagggccacgccgtgagcctgaaggaggcccagaaggtgaacagactgcagaacgagaagatcatcgagcagcagctgctggtggaccagctgagcgaggagctgaccaagctgaacctgagcgtgaccagcagcgccaaggagaactgcggcgacggccccgacgccagaatccccgagagaagaccctacaccgtgcccttcgacacccacctgggccactacatctacatccccagcagacaggacagcagaaaggtgcacaccagcccccccatgtacagcctggacagaatcttcgccggcttcagaaccagaagccagatgctgctgggccacatcgaggagcaggacaaggtgctgcactgccagttcagcgacaacagcgacgacgaggagagcgagggccaggagaagagcggcaccagatgcagaagcagaagctggatccagaagcccgacagcgtgtgcagcctggtggagctgagcgacacccaggacgagacccagaagagcgacctggagaacgaggacctgaagatcgactgcctgcaggagagccaggagctgaacctgcagaagctgaagaacagcgagagaatcctgaccgaggccaagcagaagatgagagagctgaccatcaacatcaagatgaaggaggacctgatcaaggagctgatcaagaccggcaacgacgccaagagcgtgagcaagcagtacagcctgaaggtgaccaagctggagcacgacgccgagcaggccaaggtggagctgatcgagacccagaagcagctgcaggagctggagaacaaggacctgagcgacgtggccatgaaggtgaagctgcagaaggagttcagaaagaagatggacgccgccaagctgagagtgcaggtgctgcagaagaagcagcaggacagcaagaagctggccagcctgagcatccagaacgagaagagagccaacgagctggagcagagcgtggaccacatgaagtaccagaagatccagctgcagagaaagctgagagaggagaacgagaagagaaagcagctggacgccgtgatcaagagagaccagcagaagatcaaggccctgaacaccgacagcctgaagatcagcaccagactgaacctgctggagcaggagctgagcgagaagaacgtgcagctgcagaccagcaccgccgaggagaagaccaagatcagcgagcaggtggaggtgctgcagaaggagaaggaccagctgcagaagagaagacacaacgtggacgagaagctgaagaacggcagagtgctgagccccgaggaggagcacgtgctgttccagctggaggagggcatcgaggccctggaggccgccatcgagtacagaaacgagagcatccagaacagacagaagagcctgagagccagcttccacaacctgagcagaggcgaggccaacgtgctggagaagctggcctgcctgagccccgtggagatcagaaccatcctgttcagatacttcaacaaggtggtgaacctgagagaggccgagagaaagcagcagctgtacaacgaggagatgaagatgaaggtgctggagagagacaacatggtgagagagctggagagcgccctggaccacctgaagctgcagtgcgacagaagactgaccctgcagcagaaggagcacgagcagaagatgcagctgctgctgcaccacttcaaggagcaggacggcgagggcatcatggagaccttcaagacctacgaggacaagatccagcagctggagaaggacctgtacttctacaagaagaccagcagagaccacaagaagaagctgaaggagctggtgggcgaggccatcagaagacagctggcccccagcgagtaccaggaggccggcgacggcgtgctgaagcccgagggcggcggcatgctgagcgaggagctgaagtgggccagcagacccgagagcatgaagctgagcggcagagagagagagatggacagcagcgccagcagcctgagaacccagcccaacccccagaagctgtgggaggacatccccgagctgccccccatccacagcagcctggccccccccagcggccacatgctgggcaacgagaacaagaccgagaccgacgacaaccagttcaccaagagccacagcagactgagcagccagatccaggtggtgggcaacgtgggcagactgcacggcgtgacccccgtgaagctgtgcagaaaggagctgagacagatcagcgccctggagctgagcctgagaagaagcagcctgggcgtgggcatcggcagcatggccgccgacagcatcgaggtgagcagaaagcccagagacctgaagacctag

SEQ ID NO: 10118 - DNA, 903 bp, synthetic construct
  source 1..903: mol_type = other DNA; note = Synthetic coding sequence
atggaggaggaggccagcagccccggcctgggctgcagcaagccccacctggagaagctgaccctgggcatcaccagaatcctggagagcagccccggcgtgaccgaggtgaccatcatcgagaagccccccgccgagagacacatgatcagcagctgggagcagaagaacaactgcgtgatgcccgaggacgtgaagaacttctacctgatgaccaacggcttccacatgacctggagcgtgaagctggacgagcacatcatccccctgggcagcatggccatcaacagcatcagcaagctgacccagctgacccagagcagcatgtacagcctgcccaacgcccccaccctggccgacctggaggacgacacccacgaggccagcgacgaccagcccgagaagccccacttcgacagcagaagcgtgatcttcgagctggacagctgcaacggcagcggcaaggtgtgcctggtgtacaagagcggcaagcccgccctggccgaggacaccgagatctggttcctggacagagccctgtactggcacttcctgaccgacaccttcaccgcctactacagactgctgatcacccacctgggcctgccccagtggcagtacgccttcaccagctacggcatcagcccccaggccaagcagtggttcagcatgtacaagcccatcacctacaacaccaacctgctgaccgaggagaccgacagcttcgtgaacaagctggaccccagcaaggtgttcaagagcaagaacaagatcgtgatccccaagaagaagggccccgtgcagcccgccggcggccagaagggccccagcggccccagcggccccagcaccagcagcaccagcaagagcagcagcggcagcggcaaccccaccagaaagtag

SEQ ID NO: 10119 - DNA, 390 bp, synthetic construct
  source 1..390: mol_type = other DNA; note = Synthetic coding sequence
atgatgaccgacctgaagcagagccacagcgtgagactgaacgacggccccttcatgcccgtgctgggcttcggcacctacgcccccgaccacacccccaagagccaggccgccgaggccaccaaggtggccatcgacgtgggcttcagacacatcgacagcgcctacctgtaccagaacgaggaggaggtgggccaggccatctgggagaagatcgccgacggcaccgtgaagagagaggagatcttctacaccatcaagctgtgggccaccttcttcagagccgagctggtgcaccccgccctggagagaagcctgaagaagctgggccccgactacgtggacctgttcatcatccacgtgcccttcgccatgaagggcagcagctag

SEQ ID NO: 10120 - DNA, 1257 bp, synthetic construct
  source 1..1257: mol_type = other DNA; note = Synthetic coding sequence
atgcaccccgagcccagcgagcccgccaccggcggcgccgccgagctggactgcgcccaggagcccggcgtggaggagagcgccggcgaccacggcagcgccggcagaggcggctgcaaggaggagatcaacgaccccaaggagatctgcgtgggcagcagcgacaccagctaccacagccagcagaagcagagcggcgacaacggcagcggcggccacttcgcccaccccagagaggacagagaggacagaggccccagaatgaccaagagcagcctgcagaagctgtgcaagcagcacaagctgtacatcacccccgccctgaacgacaccctgtacctgcacttcaagggcttcgacagaatcgagaacctggaggagtacaccggcctgagatgcctgtggctgcagagcaacggcatccagaagatcgagaacctggaggcccagaccgagctgagatgcctgttcctgcagatgaacctgctgagaaagatcgagaacctggagcccctgcagaagctggacgccctgaacctgagcaacaactacatcaagaccatcgagaacctgagctgcctgcccgtgctgaacaccctgcagatggcccacaaccacctggagaccgtggaggacatccagcacctgcaggagtgcctgagactgtgcgtgctggacctgagccacaacaagctgagcgaccccgagatcctgagcatcctggagagcatgcccgacctgagagtgctgaacctgatgggcaaccccgtgatcagacagatccccaactacagaagaaccgtgaccgtgagactgaagcacctgacctacctggacgacagacccgtgttccccaaggacagagcctgcgccgaggcctgggccagaggcggctacgccgccgagaaggaggagagacagcagtgggagagcagagagagaaagaagatcaccgacagcatcgaggccctggccatgatcaagcagagagccgaggagagaaagagacagagagagagccaggagagaggcgagatgaccagcagcgacgacggcgagaacgtgcccgccagcgccgagggcaaggaggagccccccggcgacagagagaccagacagaagatggagctgttcgtgaaggagagcttcgaggccaaggacgagctgtgccccgagaagcccagcggcgaggagccccccgtggaggccaagagagaggacggcgaccccgccaccgtgaccgcctgcgagggctag

SEQ ID NO: 10121 - DNA, 2472 bp, synthetic construct
  source 1..2472: mol_type = other DNA; note = Synthetic coding sequence
atgggcaagaagagaaccaagggcaagaccgtgcccatcgacgacagcagcgagaccctggagcccgtgtgcagacacatcagaaagggcctggagcagggcaacctgaagaaggccctggtgaacgtggagtggaacatctgccaggactgcaagaccgacaacaaggtgaaggacaaggccgaggaggagaccgaggagaagcccagcgtgtggctgtgcctgaagtgcggccaccagggctgcggcagaaacagccaggagcagcacgccctgaagcactacctgacccccagaagcgagccccactgcctggtgctgagcctggacaactggagcgtgtggtgctacgtgtgcgacaacgaggtgcagtactgcagcagcaaccagctgggccaggtggtggactacgtgagaaagcaggccagcatcaccacccccaagcccgccgagaaggacaacggcaacatcgagctggagaacaagaagctggagaaggagagcaagaacgagcaggagagagagaagaaggagaacatggccaaggagaacccccccatgaacagcccctgccagatcaccgtgaagggcctgagcaacctgggcaacacctgcttcttcaacgccgtgatgcagaacctgagccagacccccgtgctgagagagctgctgaaggaggtgaagatgagcggcaccatcgtgaagatcgagccccccgacctggccctgaccgagcccctggagatcaacctggagccccccggccccctgaccctggccatgagccagttcctgaacgagatgcaggagaccaagaagggcgtggtgacccccaaggagctgttcagccaggtgtgcaagaaggccgtgagattcaagggctaccagcagcaggacagccaggagctgctgagatacctgctggacggcatgagagccgaggagcaccagagagtgagcaagggcatcctgaaggccttcggcaacagcaccgagaagctggacgaggagctgaagaacaaggtgaaggactacgagaagaagaagagcatgcccagcttcgtggacagaatcttcggcggcgagctgaccagcatgatcatgtgcgaccagtgcagaaccgtgagcctggtgcacgagagcttcctggacctgagcctgcccgtgctggacgaccagagcggcaagaagagcgtgaacgacaagaacctgaagaagaccgtggaggacgaggaccaggacagcgaggaggagaaggacaacgacagctacatcaaggagagaagcgacatccccagcggcaccagcaagcacctgcagaagaaggccaagaagcaggccaagaagcaggccaagaaccagagaagacagcagaagatccagggcaaggtgctgcacctgaacgacatctgcaccatcgaccaccccgaggacagcgagtacgaggccgagatgagcctgcagggcgaggtgaacatcaagagcaaccacatcagccaggagggcgtgatgcacaaggagtactgcgtgaaccagaaggacctgaacggccaggccaagatgatcgagagcgtgaccgacaaccagaagagcaccgaggaggtggacatgaagaacatcaacatggacaacgacctggaggtgctgaccagcagccccaccagaaacctgaacggcgcctacctgaccgagggcagcaacggcgaggtggacatcagcaacggcttcaagaacctgaacctgaacgccgccctgcaccccgacgagatcaacatcgagatcctgaacgacagccacacccccggcaccaaggtgtacgaggtggtgaacgaggaccccgagaccgccttctgcaccctggccaacagagaggtgttcaacaccgacgagtgcagcatccagcactgcctgtaccagttcaccagaaacgagaagctgagagacgccaacaagctgctgtgcgaggtgtgcaccagaagacagtgcaacggccccaaggccaacatcaagggcgagagaaagcacgtgtacaccaacgccaagaagcagatgctgatcagcctggccccccccgtgctgaccctgcacctgaagagattccagcaggccggcttcaacctgagaaaggtgaacaagcacatcaagttccccgagatcctggacctggcccccttctgcaccctgaagtgcaagaacgtggccgaggagaacaccagagtgctgtacagcctgtacggcgtggtggagcacagcggcaccatgagaagcggccactacaccgcctacgccaaggccagaaccgccaacagccacctgagcaacctggtgctgcacggcgacatcccccaggacttcgagatggagagcaagggccagtggttccacatcagcgacacccacgtgcaggccgtgcccaccaccaaggtgctgaacagccaggcctacctgctgttctacgagagaatcctgtag

SEQ ID NO: 10122 - DNA, 3204 bp, synthetic construct
  source 1..3204: mol_type = other DNA; note = Synthetic coding sequence
atgaacagcatggacagacacatccagcagaccaacgacagactgcagtgcatcaagcagcacctgcagaaccccgccaacttccacaacgccgccaccgagctgctggactggtgcggcgaccccagagccttccagagacccttcgagcagagcctgatgggctgcctgaccgtggtgagcagagtggccgcccagcagggcttcgacctggacctgggctacagactgctggccgtgtgcgccgccaacagagacaagttcacccccaagagcgccgccctgctgagcagctggtgcgaggagctgggcagactgctgctgctgagacaccagaagagcagacagagcgacccccccggcaagctgcccatgcagccccccctgagcagcatgagcagcatgaagcccaccctgagccacagcgacggcagcttcccctacgacagcgtgccctggcagcagaacaccaaccagccccccggcagcctgagcgtggtgaccaccgtgtggggcgtgaccaacaccagccagagccaggtgctgggcaaccccatggccaacgccaacaaccccatgaaccccggcggcaaccccatggccagcggcatgaccaccagcaaccccggcctgaacagcccccagttcgccggccagcagcagcagttcagcgccaaggccggccccgcccagccctacatccagcagagcatgtacggcagacccaactaccccggcagcggcggcttcggcgccagctaccccggcggccccaacgcccccgccggcatgggcatccccccccacaccagaccccccgccgacttcacccagcccgccgccgccgccgccgccgccgccgtggccgccgccgccgccaccgccaccgccaccgccaccgccaccgtggccgccctgcaggagacccagaacaaggacatcaaccagtacggccccatgggccccacccaggcctacaacagccagttcatgaaccagcccggccccagaggccccgccagcatgggcggcagcatgaaccccgccagcatggccgccggcatgacccccagcggcatgagcggcccccccatgggcatgaaccagcccagaccccccggcatcagccccttcggcacccacggccagagaatgccccagcagacctaccccggccccagaccccagagcctgcccatccagaacatcaagagaccctaccccggcgagcccaactacggcaaccagcagtacggccccaacagccagttccccacccagcccggccagtaccccgcccccaacccccccagacccctgaccagccccaactaccccggccagagaatgcccagccagcccagcagcggccagtaccccccccccaccgtgaacatgggccagtactacaagcccgagcagttcaacggccagaacaacaccttcagcggcagcagctacagcaactacagccagggcaacgtgaacagaccccccagacccgtgcccgtggccaactacccccacagccccgtgcccggcaaccccaccccccccatgacccccggcagcagcatccccccctacctgagccccagccaggacgtgaagccccccttcccccccgacatcaagcccaacatgagcgccctgccccccccccccgccaaccacaacgacgagctgagactgaccttccccgtgagagacggcgtggtgctggagcccttcagactggagcacaacctggccgtgagcaaccacgtgttccacctgagacccaccgtgcaccagaccctgatgtggagaagcgacctggagctgcagttcaagtgctaccaccacgaggacagacagatgaacaccaactggcccgccagcgtgcaggtgagcgtgaacgccacccccctgaccatcgagagaggcgacaacaagaccagccacaagcccctgcacctgaagcacgtgtgccagcccggcagaaacaccatccagatcaccgtgaccgcctgctgctgcagccacctgttcgtgctgcagctggtgcacagacccagcgtgagaagcgtgctgcagggcctgctgaagaagagactgctgcccgccgagcactgcatcaccaagatcaagagaaacttcagcagcgtggccgccagcagcggcaacaccaccctgaacggcgaggacggcgtggagcagaccgccatcaaggtgagcctgaagtgccccatcaccttcagaagaatccagctgcccgccagaggccacgactgcaagcacgtgcagtgcttcgacctggagagctacctgcagctgaactgcgagagaggcacctggagatgccccgtgtgcaacaagaccgccctgctggagggcctggaggtggaccagtacatgtggggcatcctgaacgccatccagcacagcgagttcgaggaggtgaccatcgaccccacctgcagctggagacccgtgcccatcaagagcgacctgcacatcaaggacgaccccgacggcatccccagcaagagattcaagaccatgagccccagccagatgatcatgcccaacgtgatggagatgatcgccgccctgggccccggccccagcccctaccccctgccccccccccccggcggcaccaacagcaacgactacagcagccagggcaacaactaccagggccacggcaacttcgacttcccccacggcaaccccggcggcaccagcatgaacgacttcatgcacggccccccccagctgagccacccccccgacatgcccaacaacatggccgccctggagaagcccctgagccaccccatgcaggagaccatgccccacgccggcagcagcgaccagccccaccccagcatccagcagggcctgcacgtgccccaccccagcagccagagcggcccccccctgcaccacagcggcgcccccccccccccccccagccagccccccagacagcccccccaggccgcccccagcagccacccccacagcgacctgaccttcaaccccagcagcgccctggagggccaggccggcgcccagggcgccagcgacatgcccgagcccagcctggacctgctgcccgagctgaccaaccccgacgagctgctgagctacctggacccccccgacctgcccagcaacagcaacgacgacctgctgagcctgttcgagaacaactag

SEQ ID NO: 10123 - DNA, 1038 bp, synthetic construct
  source 1..1038: mol_type = other DNA; note = Synthetic coding sequence
atggacggcgaggacatccccgacttcagcagcctgaaggaggagaccgcctactggaaggagctgagcctgaagtacaagcagagcttccaggaggccagagacgagctggtggagttccaggagggcagcagagagctggaggccgagctggaggcccagctggtgcaggccgagcagagaaacagagacctgcaggccgacaaccagagactgaagtacgaggtggaggccctgaaggagaagctggagcaccagtacgcccagagctacaagcaggtgagcgtgctggaggacgacctgagccagaccagagccatcaaggagcagctgcacaagtacgtgagagagctggagcaggccaacgacgacctggagagagccaagagagccaccatcgtgagcctggaggacttcgagcagagactgaaccaggccatcgagagaaacgccttcctggagagcgagctggacgagaaggagagcctgctggtgagcgtgcagagactgaaggacgaggccagagacctgagacaggagctggccgtgagagagagacagcaggaggtgaccagaaagagcgcccccagcagccccaccctggactgcgagaagatggacagcgccgtgcaggccagcctgagcctgcccgccacccccgtgggcaagggcaccgagaacaccttccccagccccaaggccatccccaacggcttcggcaccagccccctgacccccagcgccagaatcagcgccctgaacatcgtgggcgacctgctgagaaaggtgggcgccctggagagcaagctggccgcctgcagaaacttcgccaaggaccaggccagcagaaagagctacatcagcggcaacgtgaactgcggcgtgctgaacggcaacggcaccaagttcagcagaagcggccacaccagcttcttcgacaagggcgccgtgaacggcttcgaccccgccccccccccccccggcctgggcagcagcagacccagcagcgcccccggcatgctgcccctgagcgtgtag

SEQ ID NO: 10124 - DNA, 588 bp, synthetic construct
  source 1..588: mol_type = other DNA; note = Synthetic coding sequence
atgggcagcagagccagcaccctgctgagagacgaggagctggaggagatcaagaaggagaccggcttcagccacagccagatcaccagactgtacagcagattcaccagcctggacaagggcgagaacggcaccctgagcagagaggacttccagagaatccccgagctggccatcaaccccctgggcgacagaatcatcaacgccttcttccccgagggcgaggaccaggtgaacttcagaggcttcatgagaaccctggcccacttcagacccatcgaggacaacgagaagagcaaggacgtgaacggccccgagcccctgaacagcagaagcaacaagctgcacttcgccttcagactgtacgacctggacaaggacgagaagatcagcagagacgagctgctgcaggtgctgagaatgatggtgggcgtgaacatcagcgacgagcagctgggcagcatcgccgacagaaccatccaggaggccgaccaggacggcgacagcgccatcagcttcaccgagttcgtgaaggtgctggagaaggtggacgtggagcagaagatgagcatcagattcctgcactag

SEQ ID NO: 10125 - DNA, 780 bp, synthetic construct
  source 1..780: mol_type = other DNA; note = Synthetic coding sequence
atggccgacgcctgctgcaccagaacctacgtgatcgccgccagcaccatgagcgtgtgcagcagcgacgtgggccacgtgagcagagtgagcagccccagcacctgcaccggcagcagctggcaggtggacaactgccaggagagctgctgcgagcccagaagctgcgccagcagctgctgcacccccagctgctgcgcccccgccccctgcctggccctggtgtgcgcccccgtgagctgcgagcccagcccctgccagagcggctgcaccgacagctgcacccccagctgctgccagcagagcagctgccagcccgcctgctgcaccagcagcccctgccagcaggcctgctgcgtgcccgtgtgctgcaagagcaactgctgcaagcccgtgtgctgcgtgagcatctgcagcggcgccagcagcccctgctgccagcagagcagctgccagagcgcctgctgcaccttcagcccctgccagcaggcctgctgcgtgcccatctgctgcaagcccatctgctgcgtgcccgtgtgcagcggcgccagcagcctgtgctgccagaagagcagctgccagcccgcctgctgcaccaccagctgctgcagacccagcagcagcgtgagcctgctgtgcagacccgtgtgcagacccgcctgctgcgtgcccgtgcccagctgctgcgtgcccgccagcagctgccagcccagctgctgccaccccgccagctgcctgagcttcctgtgcagacccgcctgcagcagactggcctgctag

SEQ ID NO: 10126 - DNA, 171 bp, synthetic construct
  source 1..171: mol_type = other DNA; note = Synthetic coding sequence
atgatctactacagcaactactacggcggctacggctacggcggcctgggctgcggctacggctgcggctacagaggctacggctgcggctacggcggctacggcggctacggcaacggctactactgccccagctgctacggcagatactggagctacggcttctactag

SEQ ID NO: 10127 - DNA, 897 bp, synthetic construct
  source 1..897: mol_type = other DNA; note = Synthetic coding sequence
atggccgccagcaccatgagcgtgtgcagcagcgcctacagcgacagctggcaggtggacgactgccccgagagctgctgcgagcccccctgcagcgcccccagctgctgcgcccccgcccccagcctgagcctggtgtgcacccccgtgagctgcgtgagcagcccctgctgccaggccgcctgcgagcccagcgcctgccagagcggctgcaccagcagctgcacccccagctgctgccagcagagcagctgccagcccgcctgctgcaccagcagcccctgccagcaggcctgctgcgtgcccgtgtgctgcaagaccgtgtgctgcaagcccgtgtgctgcgtgcccgtgtgctgcggcgccgccagcagctgctgcagacagagcagctgccagcccgcctgctgcgccagcagcagctgccagcccgcctgctgcgtgcccgtgtgctgcaagcccgtgtgctgcgtgagcacctgcagcgaggacagcagcagctgctgccagcagagcagctgccagcccgcctgctgcaccagcagcagctaccagcaggcctgctgcgtgcccgtgtgctgcaagaccgtgtactgcaagcccatctgctgcgtgcccgtgtgcagcagagccagcagcagcagatgccagcagcccagctgccagcccgcctgctgcaccaccagctgctgcagacccagcagcagcgtgagcctgctgtgccaccccgtgtgcagaagcacctgctgcgtgcccgtgagcagctgctgcgcccccaccagcagctgccagagcagctgctgcagacccgccagctgcgtgagcctgctgtgcagacccgccagcagcagactggcctgctacagcctgtgcagcggcaagaagagcagctgctag

SEQ ID NO: 10128 - DNA, 567 bp, synthetic construct
  source 1..567: mol_type = other DNA; note = Synthetic coding sequence
atgaccgcccccagctgcgccttccccgtgcagttcagacagcccagcgtgagcggcctgagccagatcaccaagagcctgtacatcagcaacggcgtggccgccaacaacaagctgatgctgagcagcaaccagatcaccatggtgatcaacgtgagcgtggaggtggtgaacaccctgtacgaggacatccagtacatgcaggtgcccgtggccgacagccccaacagcagactgtgcgacttcttcgaccccatcgccgaccacatccacagcgtggagatgaagcagggcagaaccctgctgcactgcgccgccggcgtgagcagaagcgccgccctgtgcctggcctacctgatgaagtaccacgccatgagcctgctggacgcccacacctggaccaagagctgcagacccatcatcagacccaacagcggcttctgggagcagctgatccactacgagttccagctgttcggcaagaacaccgtgcacatggtgagcagccccgtgggcatgatccccgacatctacgagaaggaggtgagactgatgatccccctgtag

SEQ ID NO: 10129 - DNA, 147 bp, synthetic construct
  source 1..147: mol_type = other DNA; note = Synthetic coding sequence
atgagcttcgacaacaactaccacggcggccagggctacgccaagggcggcctgggctgcagctacggctgcggcctgagcggctacggctacgcctgctactgcccctggtgctacgagagaagctggttcagcggctgcttctag

SEQ ID NO: 10130 - DNA, 192 bp, synthetic construct
  source 1..192: mol_type = other DNA; note = Synthetic coding sequence
atgagctacagcggcagctactacggcggcctgggctacggctgcggcggcttcggcggcctgggctacggctacagctgcggctgcggcagcttcagaagactgggctacggctgcggctacggcggctacagatacagctgctgccaccccagctgctacggcggctactggagcagcggcttctactag

SEQ ID NO: 10131 - DNA, 189 bp, synthetic construct
  source 1..189: mol_type = other DNA; note = Synthetic coding sequence
atgtgcggcagctactacggcaactactacggcgaccacggctacggctgctgcggctacgagggcctgggctacggctacggcagcctgagatgcggctacagcagctgctgcggctacggccacggctacggcagcagattcttctgcggctgcggctacggctgcggcagcggctactactactag

SEQ ID NO: 10132 - DNA, 4227 bp, synthetic construct
  source 1..4227: mol_type = other DNA; note = Synthetic coding sequence
atgtggagcctgaccgccagcgagggcgagagcaccaccgcccacttcttcctgggcgccggcgacgagggcctgggcaccagaggcatcggcatgagacccgaggagagcgacagcgagctgctggaggacgaggaggacgaggtgccccccgagccccagatcatcgtgggcatctgcgccatgaccaagaagagcaagagcaagcccatgacccagatcctggagagactgtgcagattcgactacctgaccgtggtgatcctgggcgaggacgtgatcctgaacgagcccgtggagaactggcccagctgccactgcctgatcagcttccacagcaagggcttccccctggacaaggccgtggcctacagcaagctgagaaaccccttcctgatcaacgacctggccatgcagtactacatccaggacagaagagaggtgtacagaatcctgcaggaggagggcatcgacctgcccagatacgccgtgctgaacagagaccccgccagacccgaggagtgcaacctgatcgagggcgaggaccaggtggaggtgaacggcgccgtgttccccaagcccttcgtggagaagcccgtgagcgccgaggaccacaacgtgtacatctactaccccagcagcgccggcggcggcagccagagactgttcagaaagatcggcagcagaagcagcgtgtacagccccgagagcagcgtgagaaagaccggcagctacatctacgaggagttcatgcccaccgacggcaccgacgtgaaggtgtacaccgtgggccccgactacgcccacgccgaggccagaaagagccccgccctggacggcaaggtggagagagacagcgagggcaaggagatcagataccccgtgatgctgaccgccatggagaagctggtggccagaaaggtgtgcgtggccttcaagcagaccgtgtgcggcttcgacctgctgagagccaacggccacagcttcgtgtgcgacgtgaacggcttcagcttcgtgaagaacagcatgaagtactacgacgactgcgccaagatcctgggcaacaccatcatgagagagctggccccccagttccagatcccctggagcatccccaccgaggccgaggacatccccatcgtgcccaccaccagcggcaccatgatggagctgagatgcgtgatcgccatcatcagacacggcgacagaacccccaagcagaagatgaagatggaggtgaagcaccccagattcttcgccctgttcgagaagcacggcggctacaagaccggcaagctgaagctgaagagacccgagcagctgcaggaggtgctggacatcaccagactgctgctggccgagctggagaaggagcccggcggcgagatcgaggagaagaccggcaagctggagcagctgaagagcgtgctggagatgtacggccacttcagcggcatcaacagaaaggtgcagctgacctactacccccacggcgtgaaggccagcaacgagggccaggacccccagagagagaccctggcccccagcctgctgctggtgctgaagtggggcggcgagctgacccccgccggcagagtgcaggccgaggagctgggcagagccttcagatgcatgtaccccggcggccagggcgactacgccggcttccccggctgcggcctgctgagactgcacagcaccttcagacacgacctgaagatctacgccagcgacgagggcagagtgcagatgaccgccgccgccttcgccaagggcctgctggccctggagggcgagctgacccccatcctggtgcagatggtgaagagcgccaacatgaacggcctgctggacagcgacggcgacagcctgagcagctgccagcacagagtgaaggccagactgcaccacatcctgcagcaggacgcccccttcggccccgaggactacgaccagctggcccccaccagaagcaccagcctgctgaacagcatgaccatcatccagaaccccgtgaaggtgtgcgaccaggtgttcgccctgatcgagaacctgacccaccagatcagagagagaatgcaggaccccagaagcgtggacctgcagctgtaccacagcgagaccctggagctgatgctgcagagatggagcaagctggagagagacttcagacagaagagcggcagatacgacatcagcaagatccccgacatctacgactgcgtgaagtacgacgtgcagcacaacggcagcctgggcctgcagggcaccgccgagctgctgagactgagcaaggccctggccgacgtggtgatcccccaggagtacggcatcagcagagaggagaagctggagatcgccgtgggcttctgcctgcccctgctgagaaagatcctgctggacctgcagagaacccacgaggacgagagcgtgaacaagctgcaccccctgtacagcagaggcgtgctgagccccggcagacacgtgagaaccagactgtacttcaccagcgagagccacgtgcacagcctgctgagcgtgttcagatacggcggcctgctggacgagacccaggacgcccagtggcagagagccctggactacctgagcgccatcagcgagctgaactacatgacccagatcgtgatcatgctgtacgaggacaacacccaggaccccctgagcgaggagagattccacgtggagctgcacttcagccccggcgtgaagggcgtggaggaggagggcagcgcccccgccggctgcggcttcagacccgccagcagcgagaacgaggagatgaagaccaaccagggcagcatggagaacctgtgccccggcaaggccagcgacgagcccgacagagccctgcagaccagcccccagccccccgagggccccggcctgcccagaagaagccccctgatcagaaacagaaaggccggcagcatggaggtgctgagcgagaccagcagcagcagacccggcggctacagactgttcagcagcagcagaccccccaccgagatgaagcagagcggcctgggcagccagtgcaccggcctgttcagcaccaccgtgctgggcggcagcagcagcgcccccaacctgcaggactacgccagaagccacggcaagaagctgccccccgccagcctgaagcacagagacggcttcgagggctgcagcatggtgcccaccatctaccccctggagaccctgcacaacgccctgagcctgagacaggtgagcgagttcctgagcagagtgtgccagagacacaccgacgcccaggcccaggccagcgccgccctgttcgacagcatgcacagcagccaggccagcgacaaccccttcagcccccccagaaccctgcacagcccccccctgcagctgcagcagagaagcgagaagcccccctggtacagcagcggccccagcagcaccgtgagcagcgccggccccagcagccccaccaccgtggacggcaacagccagttcggcttcagcgaccagcccagcctgaacagccacgtggccgaggagcaccagggcctgggcctgctgcaggagacccccggcagcggcgcccaggagctgagcatcgagggcgagcaggagctgttcgagcccaaccagagcccccaggtgccccccatggagaccagccagccctacgaggaggtgagccagccctgccaggaggtgcccgacatcagccagccctgccaggacatcagcgaggccctgagccagccctgccagaaggtgcccgacatcagccagcagtgccaggagaaccacgacaacggcaaccacacctgccaggaggtgccccacatcagccagccctgccagaagagcagccagctgtgccagaaggtgagcgaggaggtgtgccagctgtgcctggagaacagcgaggaggtgagccagccctgccagggcgtgagcgtggaggtgggcaagctggtgcacaagttccacgtgggcgtgggcagcctggtgcaggagaccctggtggaggtgggcagccccgccgaggagatccccgaggaggtgatccagccctaccaggagttcagcgtggaggtgggcagactggcccaggagaccagcgccatcaacctgctgagccagggcatccccgagatcgacaagcccagccaggagttccccgaggagatcgacctgcaggcccaggaggtgcccgaggagatcaactag

SEQ ID NO: 10133 - DNA, 705 bp, synthetic construct
  source 1..705: mol_type = other DNA; note = Synthetic coding sequence
atggagggcgccagcagaaacctggccagcacccccagagtgcacgccaaggtgatgatgtacagaaaggagcagtacctggacgtgctgcacgccctgaaggtggtgagattcgtgagcgacgccaccccccaggccgaggtgtacctgagaatgtaccagctggagagcggcaagctgcccagaagccccagcttccccctggagcccgacgacgaggtgttcctggccatcgccaaggccatggaggagatggtggaggacagcgtggactgctactggatcaccagaagattcgtgaaccagctgaacaccaagtacagagacagcctgccccagctgcccaaggccttcgagcagtacctgaacctggaggacggcagactgctgacccacctgagaatgtgcagcgccgcccccaagctgccctacgacctgtggttcaagagatgcttcgccggctgcctgcccgagagcagcctgcagagagtgtgggacaaggtggtgagcggcagctgcaagatcctggtgttcgtggccgtggagatcctgctgaccttcaagatcaaggtgatggccctgaacagcgccgagaagatcaccaagttcctggagaacatcccccaggacagcagcgacgccatcgtgagcaaggccatcgacctgtggcacaagcactgcggcacccccgtgcacagcagctag

SEQ ID NO: 10134 - DNA, 537 bp, synthetic construct
  source 1..537: mol_type = other DNA; note = Synthetic coding sequence
atgaccaccctgagagccttcacctgcgacgacctgttcagattcaacaacatcaacctggaccccctgaccgagacctacggcatccccttctacctgcagtacctggcccactggcccgagtacttcatcgtggccgaggcccccggcggcgagctgatgggctacatcatgggcaaggccgagggcagcgtggccagagaggagtggcacggccacgtgaccgccctgagcgtggcccccgagttcagaagactgggcctggccgccaagctgatggagctgctggaggagatcagcgagagaaagggcggcttcttcgtggacctgttcgtgagagtgagcaaccaggtggccgtgaacatgtacaagcagctgggctacagcgtgtacagaaccgtgatcgagtactacagcgccagcaacggcgagcccgacgaggacgcctacgacatgagaaaggccctgagcagagacaccgagaagaagagcatcatccccctgccccaccccgtgagacccgaggacatcgagtag

SEQ ID NO: 10135 - DNA, 2373 bp, synthetic construct; identical to SEQ ID NO: 9490
  source 1..2373: mol_type = other DNA; note = Synthetic coding sequence

SEQ ID NO: 10136 - DNA, 3588 bp, synthetic construct
  source 1..3588: mol_type = other DNA; note = Synthetic coding sequence
atgtggagcctgaccgccagcgagggcgagagcaccaccgcccacttcttcctgggcgccggcgacgagggcctgggcaccagaggcatcggcatgagacccgaggagagcgacagcgagctgctggaggacgaggaggacgaggtgccccccgagccccagatcatcgtgggcatctgcgccatgaccaagaagagcaagagcaagcccatgacccagatcctggagagactgtgcagattcgactacctgaccgtggtgatcctgggcgaggacgtgatcctgaacgagcccgtggagaactggcccagctgccactgcctgatcagcttccacagcaagggcttccccctggacaaggccgtggcctacagcaagctgagaaaccccttcctgatcaacgacctggccatgcagtactacatccagggcgacagaagagaggtgtacagaatcctgcaggaggagggcatcgacctgcccagatacgccgtgctgaacagagaccccgccagacccgaggagtgcaacctgatcgagggcgaggaccaggtggaggtgaacggcgccgtgttccccaagcccttcgtggagaagcccgtgagcgccgaggaccacaacgtgtacatctactaccccagcagcgccggcggcggcagccagagactgttcagaaagatcggcagcagaagcagcgtgtacagccccgagagcagcgtgagaaagaccggcagctacatctacgaggagttcatgcccaccgacggcaccgacgtgaaggtgtacaccgtgggccccgactacgcccacgccgaggccagaaagagccccgccctggacggcaaggtggagagagacagcgagggcaaggagatcagataccccgtgatgctgaccgccatggagaagctggtggccagaaaggtgtgcgtggccttcaagcagaccgtgtgcggcttcgacctgctgagagccaacggccacagcttcgtgtgcgacgtgaacggcttcagcttcgtgaagaacagcatgaagtactacgacgactgcgccaagatcctgggcaacaccatcatgagagagctggccccccagttccagatcccctggagcatccccaccgaggccgaggacatccccatcgtgcccaccaccagcggcaccatgatggagctgagatgcgtgatcgccatcatcagacacggcgacagaacccccaagcagaagatgaagatggaggtgaagcaccccagattcttcgccctgttcgagaagcacggcggctacaagaccggcaagctgaagctgaagagacccgagcagctgcaggaggtgctggacatcaccagactgctgctggccgagctggagaaggagcccggcggcgagatcgaggagaagaccggcaagctggagcagctgaagagcgtgctggagatgtacggccacttcagcggcatcaacagaaaggtgcagctgacctactacccccacggcgtgaaggccagcaacgagggccaggacccccagagagagaccctggcccccagcctgctgctggtgctgaagtggggcggcgagctgacccccgccggcagagtgcaggccgaggagctgggcagagccttcagatgcatgtaccccggcggccagggcgactacgccggcttccccggctgcggcctgctgagactgcacagcaccttcagacacgacctgaagatctacgccagcgacgagggcagagtgcagatgaccgccgccgccttcgccaagggcctgctggccctggagggcgagctgacccccatcctggtgcagatggtgaagagcgccaacatgaacggcctgctggacagcgacggcgacagcctgagcagctgccagcacagagtgaaggccagactgcaccacatcctgcagcaggacgcccccttcggccccgaggactacgaccagctggcccccaccagaagcaccagcctgctgaacagcatgaccatcatccagaaccccgtgaaggtgtgcgaccaggtgttcgccctgatcgagaacctgacccaccagatcagagagagaatgcaggaccccagaagcgtggacctgcagctgtaccacagcgagaccctggagctgatgctgcagagatggagcaagctggagagagacttcagacagaagagcggcagatacgacatcagcaagatccccgacatctacgactgcgtgaagtacgacgtgcagcacaacggcagcctgggcctgcagggcaccgccgagctgctgagactgagcaaggccctggccgacgtggtgatcccccaggagtacggcatcagcagagaggagaagctggagatcgccgtgggcttctgcctgcccctgctgagaaagatcctgctggacctgcagagaacccacgaggacgagtacagcagaggcgtgctgagccccggcagacacgtgagaaccagactgtacttcaccagcgagagccacgtgcacagcctgctgagcgtgttcagatacggcggcctgctggacgagacccaggacgccgacagagccctgcagaccagcccccagccccccgagggccccggcctgcccagaagaagccccctgatcagaaacagaaaggccggcagcatggaggtgctgagcgagaccagcagcagcagacccggcggctacagactgttcagcagcagcagaccccccaccgagatgaagcagagcggcctgggcagccagtgcaccggcctgttcagcaccaccgtgctgggcggcagcagcagcgcccccaacctgcaggactacgccagaagccacggcaagaagctgccccccgccagcctgaagcacagagacgagctgctgttcgtgcccgccgtgaagagattcagcgtgagcttcgccaagcaccccaccaacggcttcgagggctgcagcatggtgcccaccatctaccccctggagaccctgcacaacgccctgagcctgagacaggtgccccccatggagaccagccagccctacgaggaggtgagccagccctgccaggaggtgcccgacatcagccagccctgccaggacatcagcgaggccctgagccagccctgccagaaggtgcccgacatcagccagcagtgccaggagaaccacgacaacggcaaccacacctgccaggaggtgccccacatcagccagccctgccagaagagcagccagctgtgccagaaggtgagcgaggaggtgtgccagctgtgcctggagaacagcgaggaggtgagccagccctgccagggcgtgagcgtggaggtgggcaagctggtgcacaagttccacgtgggcgtgggcagcctggtgcaggagaccctggtggaggtgggcagccccgccgaggagatccccgaggaggtgatccagccctaccaggagttcagcgtggaggtgggcagactggcccaggagaccagcgccatcaacctgctgagccagggcatccccgagatcgacaagcccagccaggagttccccgaggagatcgacctgcaggcccaggaggtgcccgaggagatcaactag

SEQ ID NO: 10137 - DNA, 240 bp, synthetic construct
  source 1..240: mol_type = other DNA; note = Synthetic coding sequence
atgtgctgcaactactacggcaacagctgcggctacggcagcggctgcggctgcggctacggcagcggcagcggctgcggctgcggctacggcaccggctacggctgcggctacggctgcggcttcggcagccactacggctgcggctacggcaccggctacggctgcggctacggcagcggcagcggctactgcggctacagacccttctgcttcagaagatgctacagcagctgctag

SEQ ID NO: 10138 - DNA, 1767 bp, synthetic construct
  source 1..1767: mol_type = other DNA; note = Synthetic coding sequence
atgaagctggagttcaccgagaagaactacaacagcttcgtgctgcagaacctgaacagacagagaaagagaaaggagtactgggacatggccctgagcgtggacaaccacgtgttcttcgcccacagaaacgtgctggccgccgtgagccccctggtgagaagcctgatcagcagcaacgacatgaagaccgccgacgagctgttcatcaccatcgacaccagctacctgagccccgtgaccgtggaccagctgctggactacttctacagcggcaaggtggtgatcagcgagcagaacgtggaggagctgctgagaggcgcccagtacttcaacacccccagactgagagtgcactgcaacgacttcctgatcaagagcatctgcagagccaactgcctgagatacctgttcctggccgagctgttcgagctgaaggaggtgagcgacgtggcctacagcggcatcagagacaacttccactactgggccagccccgagggcagcatgcacttcatgagatgcccccccgtgatcttcggcagactgctgagagacgagaacctgcacgtgctgaacgaggaccaggccctgagcgccctgatcaactgggtgtacttcagaaaggaggacagagagaagtacttcaagaagttcttcaactacatcaacctgaacgccgtgagcaacaagaccctggtgttcgccagcaacaagctggtgggcatggagaacaccagcagccacaccaccctgatcgagagcgtgctgatggacagaaagcaggagagaccctgcagcctgctggtgtaccagagaaagggcgccctgctggacagcgtggtgatcctgggcggccagaaggcccacggccagttcaacgacggcgtgttcgcctacatcatccaggagaacctgtggatgaagctgagcgacatgccctacagagccgccgccctgagcgccaccagcgccggcagatacatctacatcagcggcggcaccaccgagcagatcagcggcctgaagaccgcctggagatacgacatggacgacaacagctggaccaagctgcccgacctgcccatcggcctggtgttccacaccatggtgacctgcggcggcaccgtgtacagcgtgggcggcagcatcgcccccagaagatacgtgagcaacatctacagatacgacgagagaaaggaggtgtggtgcctggccggcaagatgagcatccccatggacggcaccgccgtgatcaccaagggcgacagacacctgtacatcgtgaccggcagatgcctggtgaagggctacatcagcagagtgggcgtggtggactgcttcgacaccagcaccggcgacgtggtgcagtgcatcaccttccccatcgagttcaaccacagacccctgctgagcttccagcaggacaacatcctgtgcgtgcacagccacagacagagcgtggagatcaacctgcagaaggtgaaggccagcaagaccaccaccagcgtgcccgtgctgcccaacagctgccccctggacgtgagccacgccatctgcagcatcggcgacagcaaggtgttcgtgtgcggcggcgtgaccaccgccagcgacgtgcagaccaaggactacaccatcaaccccaacgccttcctgctggaccagaagaccggcaagtggaagaccctggcccccccccccgaggccctggactgccccgcctgctgcctggccaagctgccctgcaagatcctgcagagaatctag

SEQ ID NO: 10139 - DNA, 2208 bp, synthetic construct
  source 1..2208: mol_type = other DNA; note = Synthetic coding sequence
atgatccccccccaggaggccagcgccagaagaagagagatcgaggacaagctgaagcaggaggaggagaccctgagcttcatcagagacagcctggagaagagcgaccagctgaccaagaacatggtgagcatcctgagcagcttcgagagcagactgatgaagctggagaacagcatcatccccgtgcacaagcagaccgagaacctgcagagactgcaggagaacgtggagaagaccctgagctgcctggaccacgtgatcagctactaccacgtggccagcgacaccgagaagatcatcagagagggccccaccggcagactggaggagtacctgggcagcatggccaagatccagaaggccgtggagtacttccaggacaacagccccgacagccccgagctgaacaaggtgaagctgctgttcgagagaggcaaggaggccctggagagcgagttcagaagcctgatgaccagacacagcaaggtggtgagccccgtgctgatcctggacctgatcagcggcgacgacgacctggaggcccaggaggacgtgaccctggagcacctgcccgagagcgtgctgcaggacgtgatcagaatcagcagatggctggtggagtacggcagaaaccaggacttcatgaacgtgtactaccagatcagaagcagccagctggacagaagcatcaagggcctgaaggagcacttccacaagagcagcagcagcagcggcgtgccctacagccccgccatccccaacaagagaaaggacacccccaccaagaagcccgtgaagagacccggcaccatcagaaaggcccagaacctgctgaagcagtacagccagcacggcctggacggcaagaagggcggcagcaacctgatccccctggagggcctgctgccctgcacccccagaggcggcctgcccggcccctggatcaacgccgcctgcgtgtgcgccgccgacatcagccccggccacgagcacgacttcagagtgaagcacctgagcgaggccctgaacgacaagcacggccccctggccggcagagacgacatgctggacgtggagaccgacgcctacatccactgcgtgagcgccttcgtgaagctggcccagagcgagtaccagctgctggccgacatcatccccgagcaccaccagaagaagaccttcgacagcctgatccaggacgccctggacggcctgatgctggagggcgagaacatcgtgagcgccgccagaaaggccatcgtgagacacgacttcagcaccgtgctgaccgtgttccccatcctgagacacctgaagcagaccaagcccgagttcgaccaggtgctgcagggcaccgccgccagcaccaagaacaagctgcccggcctgatcaccagcatggagaccatcggcgccaaggccctggaggacttcgccgacaacatcaagaacgaccccgacaaggagtacaacatgcccaaggacggcaccgtgcacgagctgaccagcaacgccatcctgttcctgcagcagctgctggacttccaggagaccgccggcgccatgctggccagccaggagaccagcagcagcgccaccagctacagcagcgagttcagcaagagactgctgagcacctacatctgcaaggtgctgggcaacctgcagctgaacctgctgagcaagagcaaggtgtacgaggaccccgccctgagcgccatcttcctgcacaacaactacaactacatcctgaagagcctggagaagagcgagctgatccagctggtggccgtgacccagaagaccgccgagagaagctacagagagcacatcgagcagcagatccagacctaccagagaagctggctgaaggtgaccgactacatcgccgagaagaacctgcccgtgttccagcccggcgtgaagctgagagacaaggagagacagatcatcaaggagagattcaagggcttcaacgacggcctggaggagctgtgcaagatccagaaggcctgggccatccccgacaccgagcagagagacagaatcagacaggcccagaagaccatcgtgaaggagacctacggcgccttcctgcagaagttcggcagcgtgcccttcaccaagaaccccgagaagtacatcaagtacggcgtggagcaggtgggcgacatgatcgacagactgttcgacaccagcgcctag

SEQ ID NO: 10140 - DNA, 378 bp, synthetic construct
  source 1..378: mol_type = other DNA; note = Synthetic coding sequence
atggccggcgccggccccaccatgctgctgagagaggagaacggctgctgcagcagaagacagagcagcagcagcgccggcgacagcgacggcgagagagaggacagcgccgccgagagagccagacagcagctggaggccctgctgaacaagaccatgagaatcagaatgaccgacggcagaaccctggtgggctgcttcctgtgcaccgacagagactgcaacgtgatcctgggcagcgcccaggagttcctgaagcccagcgacagcttcagcgccggcgagcccagagtgctgggcctggccatggtgcccggccaccacatcgtgagcatcgaggtgcagagagagagcctgaccggccccccctacctgtag

SEQ ID NO: 10141 - DNA, 477 bp, synthetic construct
  source 1..477: mol_type = other DNA; note = Synthetic coding sequence
atgctgctgctggactgcaaccccgaggtggacggcctgaagcacctgctggagaccggcgccagcgtgaacgccccccccgacccctgcaagcagagccccgtgcacctggccgccggcagcggcctggcctgcttcctgctgtggcagctgcagaccggcgccgacctgaaccagcaggacgtgctgggcgaggcccccctgcacaaggccgccaaggtgggcagcctggagtgcctgagcctgctggtggccagcgacgcccagatcgacctgtgcaacaagaacggccagaccgccgaggacctggcctggagctgcggcttccccgactgcgccaagttcctgaccaccatcaagtgcatgcagaccatcaaggccagcgagcaccccgacagaaacgactgcgtggccgtgctgagacagaagagaagcctgggcagcgtggagaacaccagcggcaagagaaagtgctag

SEQ ID NO: 10142 - DNA, 8712 bp, synthetic construct
  source 1..8712: mol_type = other DNA; note = Synthetic coding sequence
atgagaggcagaagaggcagaccccccaagcagcccgccgcccccgccgccgagagatgcgcccccgccccccccccccccccccccccccccaccagcggccccatcggcggcctgagaagcagacacagaggcagcagcagaggcagatgggccgccgcccaggccgaggtggcccccaagaccagactgagcagccccagaggcggcagcagcagcagaagaaagccccccccccccccccccgccccccccagcaccagcgcccccggcagaggcggcagaggcggcggcggcggcagaaccggcggcggcggcggcggcggccacctggccagaaccaccgccgccagaagagccgtgaacaaggtggtgtacgacgaccacgagagcgaggaggaggaggaggaggaggacatggtgagcgaggaggaggaggaggaggacggcgacgccgaggagacccaggacagcgaggacgacgaggaggacgagatggaggaggacgacgacgacagcgactaccccgaggagatggaggacgacgacgacgacgccagctactgcaccgagagcagcttcagaagccacagcacctacagcagcacccccggcagaagaaagcccagagtgcacagacccagaagccccatcctggaggagaaggacatcccccccctggagttccccaagagcagcgaggacctgatggtgcccaacgagcacatcatgaacgtgatcgccatctacgaggtgctgagaaacttcggcaccgtgctgagactgagccccttcagattcgaggacttctgcgccgccctggtgagccaggagcagtgcaccctgatggccgagatgcacgtggtgctgctgaaggccgtgctgagagaggaggacaccagcaacaccaccttcggccccgccgacctgaaggacagcgtgaacagcaccctgtacttcatcgacggcatgacctggcccgaggtgctgagagtgtactgcgagagcgacaaggagtaccaccacgtgctgccctaccaggaggccgaggactacccctacggccccgtggagaacaagatcaaggtgctgcagttcctggtggaccagttcctgaccaccaacatcgccagagaggagctgatgagcgagggcgtgatccagtacgacgaccactgcagagtgtgccacaagctgggcgacctgctgtgctgcgagacctgcagcgccgtgtaccacctggagtgcgtgaagccccccctggaggaggtgcccgaggacgagtggcagtgcgaggtgtgcgtggcccacaaggtgcccggcgtgaccgactgcgtggccgagatccagaagaacaagccctacatcagacacgagcccatcggctacgacagaagcagaagaaagtactggttcctgaacagaagactgatcatcgaggaggacaccgagaacgagaacgagaagaagatctggtactacagcaccaaggtgcagctggccgagctgatcgactgcctggacaaggactactgggaggccgagctgtgcaagatcctggaggagatgagagaggagatccacagacacatggacatcaccgaggacctgaccaacaaggccagaggcagcaacaagagcttcctggccgccgccaacgaggagatcctggagagcatcagagccaagaagggcgacatcgacaacgtgaagagccccgaggagaccgagaaggacaagaacgagaccgagaacgacagcaaggacgccgagaagaacagagaggagttcgaggaccagagcctggagaaggacagcgacgacaagacccccgacgacgaccccgagcagggcaagagcgaggagcccaccgaggtgggcgacaagggcaacagcgtgagcgccaacctgggcgacaacaccaccaacgccaccagcgaggagaccagccccagcgagggcagaagccccgtgggctgcctgagcgagacccccgacagcagcaacatggccgagaagaaggtggccagcgagctgccccaggacgtgcccgaggagcccaacaagacctgcgagagcagcaacaccagcgccaccaccaccagcatccagcccaacctggagaacagcaacagcagcagcgagctgaacagcagccagagcgagagcgccaaggccgccgacgaccccgagaacggcgagagagagagccacacccccgtgagcatccaggaggagatcgtgggcgacttcaagagcgagaagagcaacggcgagctgagcgagagccccggcgccggcaagggcgccagcggcagcaccagaatcatcaccagactgagaaaccccgacagcaagctgagccagctgaagagccagcaggtggccgccgccgcccacgaggccaacaagctgttcaaggagggcaaggaggtgctggtggtgaacagccagggcgagatcagcagactgagcaccaagaaggaggtgatcatgaagggcaacatcaacaactacttcaagctgggccaggagggcaagtacagagtgtaccacaaccagtacagcaccaacagcttcgccctgaacaagcaccagcacagagaggaccacgacaagagaagacacctggcccacaagttctgcctgacccccgccggcgagttcaagtggaacggcagcgtgcacggcagcaaggtgctgaccatcagcaccctgagactgaccatcacccagctggagaacaacatccccagcagcttcctgcaccccaactgggccagccacagagccaactggatcaaggccgtgcagatgtgcagcaagcccagagagttcgccctggccctggccatcctggagtgcgccgtgaagcccgtggtgatgctgcccatctggagagagagcctgggccacaccagactgcacagaatgaccagcatcgagagagaggagaaggagaaggtgaagaagaaggagaagaagcaggaggaggaggagaccatgcagcaggccacctgggtgaagtacaccttccccgtgaagcaccaggtgtggaagcagaagggcgaggagtacagagtgaccggctacggcggctggagctggatcagcaagacccacgtgtacagattcgtgcccaagctgcccggcaacaccaacgtgaactacagaaagagcctggagggcaccaagaacaacatggacgagaacatggacgagagcgacaagagaaagtgcagcagaagccccaagaagatcaagatcgagcccgacagcgagaaggacgaggtgaagggcagcgacgccgccaagggcgccgaccagaacgagatggacatcagcaagatcaccgagaagaaggaccaggacgtgaaggagctgctggacagcgacagcgacaagccctgcaaggaggagcccatggaggtggacgacgacatgaagaccgagagccacgtgaactgccaggagagcagccaggtggacgtggtgaacgtgagcgagggcttccacctgagaaccagctacaagaagaagaccaagagcagcaagctggacggcctgctggagagaagaatcaagcagttcaccctggaggagaagcagagactggagaagatcaagctggagggcggcatcaagggcatcggcaagaccagcaccaacagcagcaagaacctgagcgagagccccgtgatcaccaaggccaaggagggctgccagagcgacagcatgagacaggagcagagccccaacgccaacaacgaccagcccgaggacctgatccagggctgcagcgagagcgacagcagcgtgctgagaatgagcgaccccagccacaccaccaacaagctgtaccccaaggacagagtgctggacgacgtgagcatcagaagccccgagaccaagtgccccaagcagaacagcatcgagaacgacatcgaggagaaggtgagcgacctggccagcagaggccaggagcccagcaagagcaagaccaagggcaacgacttcttcatcgacgacagcaagctggccagcgccgacgacatcggcaccctgatctgcaagaacaagaagcccctgatccaggaggagagcgacaccatcgtgagcagcagcaagagcgccctgcacagcagcgtgcccaagagcaccaacgacagagacgccacccccctgagcagagccatggacttcgagggcaagctgggctgcgacagcgagagcaacagcaccctggagaacagcagcgacaccgtgagcatccaggacagcagcgaggaggacatgatcgtgcagaacagcaacgagagcatcagcgagcagttcagaaccagagagcaggacgtggaggtgctggagcccctgaagtgcgagctggtgagcggcgagagcaccggcaactgcgaggacagactgcccgtgaagggcaccgaggccaacggcaagaagcccagccagcagaagaagctggaggagagacccgtgaacaagtgcagcgaccagatcaagctgaagaacaccaccgacaagaagaacaacgagaacagagagagcgagaagaagggccagagaaccagcaccttccagatcaacggcaaggacaacaagcccaagatctacctgaagggcgagtgcctgaaggagatcagcgagagcagagtggtgagcggcaacgtggagcccaaggtgaacaacatcaacaagatcatccccgagaacgacatcaagagcctgaccgtgaaggagagcgccatcagacccttcatcaacggcgacgtgatcatggaggacttcaacgagagaaacagcagcgagaccaagagccacctgctgagcagcagcgacgccgagggcaactacagagacagcctggagaccctgcccagcaccaaggagagcgacagcacccagaccaccacccccagcgccagctgccccgagagcaacagcgtgaaccaggtggaggacatggagatcgagaccagcgaggtgaagaaggtgaccagcagccccatcaccagcgaggaggagagcaacctgagcaacgacttcatcgacgagaacggcctgcccatcaacaagaacgagaacgtgaacggcgagagcaagagaaagaccgtgatcaccgaggtgaccaccatgaccagcaccgtggccaccgagagcaagaccgtgatcaaggtggagaagggcgacaagcagaccgtggtgagcagcaccgagaactgcgccaagagcaccgtgaccaccaccaccaccaccgtgaccaagctgagcacccccagcaccggcggcagcgtggacatcatcagcgtgaaggagcagagcaagaccgtggtgaccaccaccgtgaccgacagcctgaccaccaccggcggcaccctggtgaccagcatgaccgtgagcaaggagtacagcaccagagacaaggtgaagctgatgaagttcagcagacccaagaagaccagaagcggcaccgccctgcccagctacagaaagttcgtgaccaagagcagcaagaagagcatcttcgtgctgcccaacgacgacctgaagaagctggccagaaagggcggcatcagagaggtgccctacttcaactacaacgccaagcccgccctggacatctggccctaccccagccccagacccaccttcggcatcacctggagatacagactgcagaccgtgaagagcctggccggcgtgagcctgatgctgagactgctgtgggccagcctgagatgggacgacatggccgccaaggccccccccggcggcggcaccaccagaaccgagaccagcgagaccgagatcaccaccaccgagatcatcaagagaagagacgtgggcccctacggcatcagaagcgagtactgcatcagaaagatcatctgccccatcggcgtgcccgagacccccaaggagacccccaccccccagagaaagggcctgagaagcagcgccctgagacccaagagacccgagacccccaagcagaccggccccgtgatcatcgagacctgggtggccgaggaggagctggagctgtgggagatcagagccttcgccgagagagtggagaaggagaaggcccaggccgtggagcagcaggccaagaagagactggagcagcagaagcccaccgtgatcgccaccagcaccaccagccccaccagcagcaccaccagcaccatcagccccgcccagaaggtgatggtggcccccatcagcggcagcgtgaccaccggcaccaagatggtgctgaccaccaaggtgggcagccccgccaccgtgaccttccagcagaacaagaacttccaccagaccttcgccacctgggtgaagcagggccagagcaacagcggcgtggtgcaggtgcagcagaaggtgctgggcatcatccccagcagcaccggcaccagccagcagaccttcaccagcttccagcccagaaccgccaccgtgaccatcagacccaacaccagcggcagcggcggcaccaccagcaacagccaggtgatcaccggcccccagatcagacccggcatgaccgtgatcagaacccccctgcagcagagcaccctgggcaaggccatcatcagaacccccgtgatggtgcagcccggcgccccccagcaggtgatgacccagatcatcagaggccagcccgtgagcaccgccgtgagcgcccccaacaccgtgagcagcacccccggccagaagagcctgaccagcgccaccagcaccagcaacatccagagcagcgccagccagccccccagaccccagcagggccaggtgaagctgaccatggcccagctgacccagctgacccagggccacggcggcaaccagggcctgaccgtggtgatccagggccagggccagaccaccggccagctgcagctgatcccccagggcgtgaccgtgctgcccggccccggccagcagctgatgcaggccgccatgcccaacggcaccgtgcagagattcctgttcacccccctggccaccaccgccaccaccgccagcaccaccaccaccaccgtgagcaccaccgccgccggcaccggcgagcagagacagagcaagctgagcccccagatgcaggtgcaccaggacaagaccctgccccccgcccagagcagcagcgtgggccccgccgaggcccagccccagaccgcccagcccagcgcccagccccagccccagacccagccccagagccccgcccagcccgaggtgcagacccagcccgaggtgcagacccagaccaccgtgagcagccacgtgcccagcgaggcccagcccacccacgcccagagcagcaagccccaggtggccgcccagagccagccccagagcaacgtgcagggccagagccccgtgagagtgcagagccccagccagaccagaatcagacccagcacccccagccagctgagccccggccagcagagccaggtgcagaccaccaccagccagcccatccccatccagccccacaccagcctgcagatccccagccagggccagccccagagccagccccaggtggtgatgaagcacaacgccgtgatcgagcacctgaagcagaagaagagcatgacccccgccgagagagaggagaaccagagaatgatcgtgtgcaaccaggtgatgaagtacatcctggacaagatcgacaaggaggagaagcaggccgccaagaagagaaagagagaggagagcgtggagcagaagagaagcaagcagaacgccaccaagctgagcgccctgctgttcaagcacaaggagcagctgagagccgagatcctgaagaagagagccctgctggacaaggacctgcagatcgaggtgcaggaggagctgaagagagacctgaagatcaagaaggagaaggacctgatgcagctggcccaggccaccgccgtggccgccccctgcccccccgtgacccccgccccccccgccccccccgcccccccccccagccccccccccccccccgccgtgcagcacaccggcctgctgagcacccccaccctgcccgccgccagccagaagagaaagagagaggaggagaaggacagcagcagcaagagcaagaagaagaagatgatcagcaccaccagcaaggagaccaagaaggacaccaagctgtactgcatctgcaagaccccctacgacgagagcaagttctacatcggctgcgacagatgccagaactggtaccacggcagatgcgtgggcatcctgcagagcgaggccgagctgatcgacgagtacgtgtgcccccagtgccagagcaccgaggacgccatgaccgtgctgacccccctgaccgagaaggactacgagggcctgaagagagtgctgagaagcctgcaggcccacaagatggcctggcccttcctggagcccgtggaccccaacgacgcccccgactactacggcgtgatcaaggagcccatggacctggccaccatggaggagagagtgcagagaagatactacgagaagctgaccgagttcgtggccgacatgaccaagatcttcgacaactgcagatactacaaccccagcgacagccccttctaccagtgcgccgaggtgctggagagcttcttcgtgcagaagctgaagggcttcaaggccagcagaagccacaacaacaagctgcagagcaccgccagctag

SEQ ID NO: 10143 - DNA, 2628 bp, synthetic construct
  source 1..2628: mol_type = other DNA; note = Synthetic coding sequence
atgaacttccaggccggcggcggccagagcccccagcagcagcagcagctggccggcggccccccccagcagttcgccctgagcaacagcgccgccatcagagccgagatccagagattcgagagcgtgcaccccaacatctacgccatctacgacctgatcgagagaatcgaggacctggccctgcagaaccagatcagagagcacgtgatcagcatcgaggacagcttcgtgaacagccaggagtggaccctgagcagaagcgtgcccgagctgaaggtgggcatcgtgggcaacctgagcagcggcaagagcgccctggtgcacagatacctgaccggcacctacgtgcaggaggagagccccgagggcggcagattcaagaaggagatcgtggtggacggccagagctacctgctgctgatcagagacgagggcggcccccccgagctgcagttcgccgcctgggtggacgccgtggtgttcgtgttcagcctggaggacgagatcagcttccagaccgtgtacaactacttcctgagactgtgcagcttcagaaacgccagcgaggtgcccatggtgctggtgggcacccaggacgccatcagcgccgccaaccccagagtgatcgacgacagcagagccagaaagctgagcaccgacctgaagagatgcacctactacgagacctgcgccacctacggcctgaacgtggagagagtgttccaggacgtggcccagaaggtggtggccctgagaaagaagcagcagctggccatcggcccctgcaagagcctgcccaacagccccagccacagcgccgtgagcgccgccagcatccccgccgtgcacatcaaccaggccaccaacggcggcggcagcgccttcagcgactacagcagcagcgtgcccagcacccccagcatcagccagagagagctgagaatcgagaccatcgccgccagcagcacccccacccccatcagaaagcagagcaagagaagaagcaacatcttcaccagcagaaagggcgccgacctggacagagagaagaaggccgccgagtgcaaggtggacagcatcggcagcggcagagccatccccatcaagcagggcatcctgctgaagagaagcggcaagagcctgaacaaggagtggaagaagaagtacgtgaccctgtgcgacaacggcctgctgacctaccaccccagcctgcacgactacatgcagaacatccacggcaaggagatcgacctgctgagaaccaccgtgaaggtgcccggcaagagactgcccagagccacccccgccaccgcccccggcaccagccccagagccaacggcctgagcgtggagagaagcaacacccagctgggcggcggcaccggcgccccccacagcgccagcagcgccagcctgcacagcgagagacccctgagcagcagcgcctgggccggccccagacccgagggcctgcaccagagaagctgcagcgtgagcagcgccgaccagtggagcgaggccaccaccagcctgccccccggcatgcagcaccccgccagcggccccgccgaggtgctgagcagcagccccaagctggaccccccccccagcccccacagcaacagaaagaagcacagaagaaagaagagcaccggcacccccagacccgacggccccagcagcgccaccgaggaggccgaggagagcttcgagttcgtggtggtgagcctgaccggccagacctggcacttcgaggccagcaccgccgaggagagagagctgtgggtgcagagcgtgcaggcccagatcctggccagcctgcagggctgcagaagcgccaaggacaagaccagactgggcaaccagaacgccgccctggccgtgcaggccgtgagaaccgtgagaggcaacagcttctgcatcgactgcgacgcccccaaccccgactgggccagcctgaacctgggcgccctgatgtgcatcgagtgcagcggcatccacagacacctgggcgcccacctgagcagagtgagaagcctggacctggacgactggccccccgagctgctggccgtgatgaccgccatgggcaacgccctggccaacagcgtgtgggagggcgccctgggcggctacagcaagcccggccccgacgcctgcagagaggagaaggagagatggatcagagccaagtacgagcagaagctgttcctggcccccctgcccagcagcgacgtgcccctgggccagcagctgctgagagccgtggtggaggacgacctgagactgctggtgatgctgctggcccacggcagcaaggaggaggtgaacgagacctacggcgacggcgacggcagaaccgccctgcacctgagcagcgccatggccaacgtggtgttcacccagctgctgatctggtacggcgtggacgtgagaagcagagacgccagaggcctgacccccctggcctacgccagaagagccggcagccaggagtgcgccgacatcctgatccagcacggctgccccggcgagggctgcggcctggcccccacccccaacagagagcccgccaacggcaccaaccccagcgccgagctgcacagaagccccagcctgctgtag

SEQ ID NO: 10144 - DNA, 1761 bp, synthetic construct
  source 1..1761: mol_type = other DNA; note = Synthetic coding sequence
atgggcggcgccctgggcctgagacagctgcccatctgcgcccccgcctgcagacccagcagcggccacagcccctgggccgccgccagccccaaccccaaccagtggagcagcagaagcagatggtgctgcctgagaagaagcgaggccagaagaagctgcagacccgtgggcagagccgcccccggccccaccagagccatggccagacccgccaccagcaccagaagaagcgcctgcccccccctgacccccacccccgccctgagaatcgcctggagactgctgagcgccaccagcagaaccagcagaatggccagcgtgctgagcagaggcagagtgagatgcccctggcacggcgcctgcttcaacatcagcaccggcgacctggaggacttccccggcctggacagcctgcacaagttccaggtgaagatcgagaaggagaaggtgtacgtgagagccagcaagcaggccctgcagctgcagagaagaaccaaggtgatggccaagtgcatcagccccagcgccggctacagcagcagcaccaacgtgctgatcgtgggcgccggcgccgccggcctggtgtgcgccgagaccctgagacaggagggcttcagcgacagaatcgtgctgtgcaccctggacagacacctgccctacgacagacccaagctgagcaagagcctggacacccagcccgagcagctggccctgagacccaaggagttcttcagagcctacggcatcgaggtgctgaccgaggcccaggtggtgaccgtggacgtgagaaccaagaaggtggtgttcaaggacggcttcaagctggagtacagcaagctgctgctggcccccggcagcagccccaagaccctgagctgcaagggcaaggaggtggagaacgtgttcaccatcagaacccccgaggacgccaacagagtggtgagactggccagaggcagaaacgtggtggtggtgggcgccggcttcctgggcatggaggtggccgcctacctgaccgagaaggcccacagcgtgagcgtggtggagctggaggagacccccttcagaagattcctgggcgagagagtgggcagagccctgatgaagatgttcgagaacaacagagtgaagttctacatgcagaccgaggtgagcgagctgagaggccaggagggcaagctgaaggaggtggtgctgaagagcagcaaggtggtgagagccgacgtgtgcgtggtgggcatcggcgccgtgcccgccaccggcttcctgagacagagcggcatcggcctggacagcagaggcttcatccccgtgaacaagatgatgcagaccaacgtgcccggcgtgttcgccgccggcgacgccgtgaccttccccctggcctggagaaacaacagaaaggtgaacatcccccactggcagatggcccacgcccagggcagagtggccgcccagaacatgctggcccaggaggccgagatgagcaccgtgccctacctgtggaccgccatgttcggcaagagcctgagatacgccggctacggcgagggcttcgacgacgtgatcatccagggcgacctggaggagctgaagttcgtggccttctacaccaagggcgacgaggtgatcgccgtggccagcatgaactacgaccccatcgtgagcaaggtggccgaggtgctggccagcggcagagccatcagaaagagagaggtggagaccggcgacatgagctggctgaccggcaagggcagctag

SEQ ID NO: 10145 - DNA, 1521 bp, synthetic construct
  source 1..1521: mol_type = other DNA; note = Synthetic coding sequence
atgcccgtgcaggccgcccagtggaccgagttcctgagctgccccatctgctacaacgagttcgacgagaacgtgcacaagcccatcagcctgggctgcagccacaccgtgtgcaagacctgcctgaacaagctgcacagaaaggcctgccccttcgaccagaccgccatcaacaccgacatcgacgtgctgcccgtgaacttcgccctgctgcagctggtgggcgcccaggtgcccgaccaccagagcatcaagctgagcaacctgggcgagaacaagcactacgaggtggccaagaagtgcgtggaggacctggccctgtacctgaagcccctgagcggcggcaagggcgtggccagcctgaaccagagcgccctgagcagacccatgcagagaaagctggtgaccctggtgaactgccagctggtggaggaggagggcagagtgagagccatgagagccgccagaagcctgggcgagagaaccgtgaccgagctgatcctgcagcaccagaacccccagcagctgagcgccaacctgtgggccgccgtgagagccagaggctgccagttcctgggccccgccatgcaggaggaggccctgaagctggtgctgctggccctggaggacggcagcgccctgagcagaaaggtgctggtgctgttcgtggtgcagagactggagcccagattcccccaggccagcaagaccagcatcggccacgtggtgcagctgctgtacagagccagctgcttcaaggtgaccaagagagacgaggacagcagcctgatgcagctgaaggaggagttcagaagctacgaggccctgagaagagagcacgacgcccagatcgtgcacatcgccatggaggccggcctgagaatcagccccgagcagtggagcagcctgctgtacggcgacctggcccacaagagccacatgcagagcatcatcgacaagctgcagagccccgagagcttcgccaagagcgtgcaggagctgaccatcgtgctgcagagaaccggcgaccccgccaacctgaacagactgagaccccacctggagctgctggccaacatcgaccccaaccccgacgccgtgagccccacctgggagcagctggagaacgccatggtggccgtgaagaccgtggtgcacggcctggtggacttcatccagaactacagcagaaagggccacgagaccccccagccccagcccaacagcaagtacaagaccagcatgtgcagagacctgagacagcagggcggctgccccagaggcaccaactgcaccttcgcccacagccaggaggagctggagaagtgcaaccccagaggcctgtacctgcactgctgcctgctgagcagcgtggccagcctgggcaccgtgcacaacgagctgtacaagcagcagcactgcgacagagagaagatcagcgtgtgcgccgtgaagagagccgagacctgcttcagcagccagttcttcagccccctggaggtgcccagagaggaggactag

SEQ ID NO: 10146 - DNA, 783 bp, synthetic construct
  source 1..783: mol_type = other DNA; note = Synthetic coding sequence
atgcccagagccagaagcggcagaagaagcagaggcgccggcggcagagaggagaccttcctgagagtgagagccaacagacagaccagactgaacgccagaatcggcaagatgaagagaagaaagcaggacgagggccaggtgtgccccctgtgcaacagacccctggccggcagcgagcaggagatgagcagacacgtggagcactgcctgagcaagagagagggcagctgcatggccgaggacgacgccgtggacatcgagcacgagaacaacaacagattcgaggagtacgagtggtgcggccagaagagaatcagagccaccaccctgctggagggcggcttcagaggcagcggcttcatcatgtgcagcggcaaggagaaccccgacagcgacgccgacctggacgtggacggcgacgacaccctggagtacggcaagccccagtacaccgaggccgacgtgatcccctgcaccggcgaggagcccggcgaggccaaggagagagaggccctgagaggcgccgtgctgaacggcggcccccccagcaccagaatcacccccgagttcagcaagtgggccagcgacgagatgcccagcaccagcaacggcgagagcagcaagcaggaggccatgcagaagacctgcaagaacagcgacatcgagaagatcaccgaggacagcgccgtgaccaccttcgaggccctgaaggccagagtgagagagctggagagacagctgagcagaggcgacagatacaagtgcctgatctgcatgtag

SEQ ID NO: 10147 - DNA, 1461 bp, synthetic construct
  source 1..1461: mol_type = other DNA; note = Synthetic coding sequence
atggccgccgtgaagaccctgaaccccaaggccgaggtggccagagcccaggccgccctggccgtgaacatcagcgccgccagaggcctgcaggacgtgctgagaaccaacctgggccccaagggcaccatgaagatgctggtgagcggcgccggcgacatcaagctgaccaaggacggcaacgtgctgctgcacgagatgggcctgcaccccagaatcatcaccgagggcttcgaggccgccaaggagaaggccctgcagttcctggaggaggtgaaggtgagcagagagatggacagagagaccctgatcgacgtggccagaaccagcctgagaaccaaggtgcacgccgagctggccgacgtgctgaccgaggccgtggtggacagcatcctggccatcaagaagcaggacgagcccatcgacctgttcatgatcgagatcatggagatgaagcacaagagcgagaccgacaccagcctgatcagaggcctggtgctggaccacggcgccagacaccccgacatgaagaagagagtggaggacgcctacatcctgacctgcaacgtgagcctggagtacgagaagaccgaggtgaacagcggcttcttctacaagagcgccgaggagagagagaagctggtgaaggccgagagaaagttcatcgaggacagagtgaagaagatcatcgagctgaagagaaaggtgtgcggcgacagcgacaagggcttcgtggtgatcaaccagaagggcatcgaccccttcagcctggacgccctgagcaaggagggcatcgtggccctgagaagagccaagagaagaaacatggagagactgaccctggcctgcggcggcgtggccctgaacagcttcgacgacctgagccccgactgcctgggccacgccggcctggtgtacgagtacaccctgggcgaggagaagttcaccttcatcgagaagtgcaacaaccccagaagcgtgaccctgctgatcaagggccccaacaagcacaccctgacccagatcaaggacgccgtgagagacggcctgagagccgtgaagaacgccatcgacgacggctgcgtggtgcccggcgccggcgccgtggaggtggccatggccgaggccctgatcaagcacaagcccagcgtgaagggcagagcccagctgggcgtgcaggccttcgccgacgccctgctgatcatccccaaggtgctggcccagaacagcggcttcgacctgcaggagaccctggtgaagatccaggccgagcacagcgagagcggccagctggtgggcgtggacctgaacaccggcgagcccatggtggccgccgaggtgggcgtgtgggacaactactgcgtgaagaagcagctgctgcacagctgcaccgtgatcgccaccaacatcctgctggtggacgagatcatgagagccggcatgagcagcctgaagggctag

SEQ ID NO: 10148 - DNA, 1407 bp, synthetic construct
  source 1..1407: mol_type = other DNA; note = Synthetic coding sequence
atgagcttcagactgagcggcggcagcagaagaatctgcagcagaaccggcagcggcagactgagcggcggcggcaccggcttcgtggccggcaacgtgtgcgtgggcagcggcgccagaagcagcttcagctgcaccctggagggcatcagcagcggcggcagcttctgcaacagcggcggcggcctgggcagcggcgcctgcgccggcttcctgggcaacgagcacagcctgctgagcggcaacgagaaggtgaccatgcagaacctgaacgacagactggccagctacctggaccacgtgcacgccctggaggaggccaacgccgacctggagcagaagatcaagggctggtacgagaagtgcgagcccggcagcagcagagagcacgaccacgactacagcagatacttcagcgtgatcgaggacctgaagagacagatcatcagcgccaccatctgcaacgccagcatcgtgctgcagaacgacaacgccagactgaccgccgacgacttcagactgaagtacgagaacgagctggccctgcaccacagcgtggaggccgacaccagcggcctgagaagagtgctggacgagctgaccctgtgcaccaccgacctggagatccagtgcgagaccctgagcgaggagctgacctacctgaagaagagccacgaggaggagatggaggtgctgcagtacaccgccggcggcaacgtgaacgtggagatgaacgccacccccggcgtggacctgaccgtgctgctgaacaacatgagagccgagtacgaggacctggccgagcagaacagaaaggacgccgaggcctggttcaacgagagaagcgccaccctgcagcagcagatcagcgaccacgagggcgccgccaccgccgccagaaacgagctgaccgagctgaagagaaacctgcagaccctggagatcgagctgcagagcctgatggccgtgaagcacagctacgagtgcagcctggccgagaccgagggcaactactgcaaccagctgcagcagatccaggaccagatcggcgtgatggaggagcagctgcagcagatcagaaccgagaccgagggccagaagctggagtacgagcagctgctggacgtgaagatcttcctggagaaggagatcgacatctactgcaacctgctggacggcgaggagagaaagagcaagagcacctgctacaagagcaagggctacagacccgtgaacagcggcaaccaggccaaggacagcaccgaggagaccatcgtgaagaccgtggtggaggagctggaccagatcggcaacctgctgagcctgagagtgcacagcgtggaggagaagagcagcaagatcagcaacatcaccgtggagcagagagtgcccagcaaggccccctag

SEQ ID NO: 10149 - DNA, 816 bp, synthetic construct; identical to SEQ ID NO: 10085
  source 1..816: mol_type = other DNA; note = Synthetic coding sequence

SEQ ID NO: 10150 - DNA, 753 bp, synthetic construct
  source 1..753: mol_type = other DNA; note = Synthetic coding sequence
atgagcgagaacgccgcccccgacttctactacgtggccatggacttcggcggccacggcctgagcagccactacagccccggcgtgccctactacctgcagaccttcgtgagcgagatcagaagagtggtggccggcggcgtggtgggcggcatgttcttctgcaccttccccgagatggtggacaagctgatcctgctggacacccccctgttcctgctggagagcgacgagatggagaacctgctgacctacaagagaagagccatcgagcacgtgctgcaggtggaggccagccaggagcccagccacgtgttcagcctgaagcagctgctgcagagactgctgaagagcaacagccacctgagcgaggagtgcggcgagctgctgctgcagagaggcaccaccaaggtggccaccggcctggtgctgaacagagaccagagactggcctgggccgagaacagcatcgacttcatcagcagagagctgtgcgcccacagcatcagaaagctgcaggcccacgtgctgctgatcaaggccgtgcacggctacttcgacagcagacagaactacagcgagaaggagagcctgagcttcatgatcgacaccatgaagagcaccctgaaggagcagttccagttcgtggaggtgcccggcaaccactgcgtgcacatgagcgagccccagcacgtggccagcatcatcagcagcttcctgcagtgcacccacatgctgcccgcccagctgtag

SEQ ID NO: 10151 - DNA, 510 bp, synthetic construct
  source 1..510: mol_type = other DNA; note = Synthetic coding sequence
atggtgttccccctgcccaccccccaggagcccatcatggccaccccccccaagagaagagccgtggaggccaccggcgagaaggtgctgagatacgagaccttcatcagcgacgtgctgcagagagacctgagaaaggtgctggaccacagagacaaggtgtacgagcagctggccaagtacctgcagctgagaaacgtgatcgagagactgcaggaggccaagcacagcgagctgtacatgcaggtggacctgggctgcaacttcttcgtggacaccgtggtgcccgacaccagcagaatctacgtggccctgggctacggcttcttcctggagctgaccctggccgaggccctgaagttcatcgacagaaagagcagcctgctgaccgagctgagcaacagcctgaccaaggacagcatgaacatcaaggcccacatccacatgctgctggagggcctgagagagctgcagggcctgcagaacttccccgagaagccccaccactag

SEQ ID NO: 10152 - DNA, 3177 bp, synthetic construct
  source 1..3177: mol_type = other DNA; note = Synthetic coding sequence
atgaccaccgtggtggtgcacgtggacagcaaggccgagctgaccaccctgctggagcagtgggagaaggagcacggcagcggccaggacatggtgcccatcctgaccagaatgagccagctgatcgagaaggagaccgaggagtacagaaagggcgaccccgaccccttcgacgacagacaccccggcagagccgaccccgagtgcatgctgggccacctgctgagaatcctgttcaagaacgacgacttcatgaacgccctggtgaacgcctacgtgatgaccagcagagagccccccctgaacaccgccgcctgcagactgctgctggacatcatgcccggcctggagaccgccgtggtgttccaggagaaggagggcatcgtggagaacctgttcaagtgggccagagaggccgaccagcccctgagaacctacagcaccggcctgctgggcggcgccatggagaaccaggacatcgccgccaactacagagacgagaacagccagctggtggccatcgtgctgagaagactgagagagctgcagctgcaggaggtggccctgagacaggagaacaagagacccagccccagaaagctgagcagcgagcccctgctgcccctggacgaggaggccgtggacatggactacggcgacatggccgtggacgacgccgagatccagaagagcgccctgcagatcatcatcaactgcgtgtgcggccccgacaacagaatcagcagcatcggcaagttcatcagcggcacccccagaagaaagctgccccagaaccccaagagcagcgagcacaccctggccaagatgtggaacgtggtgcagagcaacaacggcatcaaggtgctgctgagcctgctgagcatcaagatgcccatcaccgacgccgaccagatcagagccctggcctgcaaggccctggtgggcctgagcagaagcagcaccgtgagacagatcatcagcaagctgcccctgttcagcagctgccagatccagcagctgatgaaggagcccgtgctgcaggacaagagaagcgaccacgtgaagttctgcaagtacgccgccgagctgatcgagagagtgagcggcaagcccctgctgatcggcaccgacgtgagcctggccagactgcagaaggccgacgtggtggcccagagcagaatcagcttccccgagaaggagctgctgctgctgatcagaaaccacctgatcagcaagggcctgggcgagaccgccaccgtgctgaccaaggaggccgacctgcccatgaccgccgccagccacagcagcgccttcacccccgtgaccgccgccgccagccccgtgagcctgcccagaacccccagaatcgccaacggcatcgccaccagactgggcagccacgccgccgtgggcgccagcgcccccagcgcccccaccgcccacccccagcccagacccccccagggccccctggccctgcccggccccagctacgccggcaacagccccctgatcggcagaatcagcttcatcagagagagacccagcccctgcaacggcagaaagatcagagtgctgagacagaagagcgaccacggcgcctacagccagagccccgccatcaagaagcagctggacagacacctgcccagcccccccaccctggacagcatcatcaccgagtacctgagagagcagcacgccagatgcaagaaccccgtggccacctgcccccccttcagcctgttcaccccccaccagtgccccgagcccaagcagagaagacaggcccccatcaacttcaccagcagactgaacagaagagccagcttccccaagtacggcggcgtggacggcggctgcttcgacagacacctgatcttcagcagattcagacccatcagcgtgttcagagaggccaacgaggacgagagcggcttcacctgctgcgccttcagcgccagagagagattcctgatgctgggcacctgcaccggccagctgaagctgtacaacgtgttcagcggccaggaggaggccagctacaactgccacaacagcgccatcacccacctggagcccagcagagacggcagcctgctgctgaccagcgccacctggagccagcccctgagcgccctgtggggcatgaagagcgtgttcgacatgaagcacagcttcaccgaggaccactacgtggagttcagcaagcacagccaggacagagtgatcggcaccaagggcgacatcgcccacatctacgacatccagaccggcaacaagctgctgaccctgttcaaccccgacctggccaacaactacaagagaaactgcgccaccttcaaccccaccgacgacctggtgctgaacgacggcgtgctgtgggacgtgagaagcgcccaggccatccacaagttcgacaagttcaacatgaacatcagcggcgtgttccaccccaacggcctggaggtgatcatcaacaccgagatctgggacctgagaaccttccacctgctgcacaccgtgcccgccctggaccagtgcagagtggtgttcaaccacaccggcaccgtgatgtacggcgccatgctgcaggccgacgacgaggacgacctgatggaggagagaatgaagagccccttcggcagcagcttcagaaccttcaacgccaccgactacaagcccatcgccaccatcgacgtgaagagaaacatcttcgacctgtgcaccgacaccaaggactgctacctggccgtgatcgagaaccagggcagcatggacgccctgaacatggacaccgtgtgcagactgtacgaggtgggcagacagagactggccgaggacgaggacgaggaggaggaccaggaggaggaggagcaggaggaggaggacgacgacgaggacgacgacgacaccgacgacctggacgagctggacaccgaccagctgctggaggccgagctggaggaggacgacaacaacgagaacgccggcgaggacggcgacaacgacttcagccccagcgacgaggagctggccaacctgctggaggagggcgaggacggcgaggacgaggacagcgacgccgacgaggaggtggagctgatcctgggcgacaccgacagcagcgacaacagcgacctggaggacgacatcatcctgagcctgaacgagtag

SEQ ID NO: 10153 - DNA, 2409 bp, synthetic construct
  source 1..2409: mol_type = other DNA; note = Synthetic coding sequence
atggccgccgaggccctggccgccgaggccgtggccagcagactggagagacaggaggaggacatcagatggctgtggagcgaggtggagagactgagagacgagcagctgaacgccccctacagctgccaggccgagggcccctgcctgaccagagaggtggcccagctgagagccgagaactgcgacctgagacacagactgtgcagcctgagactgtgcctggccgaggagagaagcagacaggccaccctggagagcgccgagctggaggccgcccaggaggccggcgcccagcccccccccagccagagccaggacaaggacatgaagaagaagaagatgaaggagagcgaggccgacagcgaggtgaagcaccagcccatcttcatcaaggagagactgaagctgttcgagatcctgaagaaggaccaccagctgctgctggccatctacggcaagaagggcgacaccagcaacatcatcaccgtgagagtggccgacggccagaccgtgcagggcgaggtgtggaagaccaccccctaccaggtggccgccgagatcagccaggagctggccgagagcaccgtgatcgccaaggtgaacggcgagctgtgggacctggacagacccctggagggcgacagcagcctggagctgctgaccttcgacaacgaggaggcccaggccgtgtactggcacagcagcgcccacatcctgggcgaggccatggagctgtactacggcggccacctgtgctacggcccccccatcgagaacggcttctactacgacatgttcatcgaggacagagccgtgagcagcaccgagctgagcgccctggagaacatctgcaaggccatcatcaaggagaagcagcccttcgagagactggaggtgagcaaggagatcctgctggagatgttcaagtacaacaagttcaagtgcagaatcctgaacgagaaggtgaacaccgccaccaccaccgtgtacagatgcggccccctgatcgacctgtgcaagggcccccacgtgagacacaccggcaagatcaagaccatcaagatcttcaagaacagcagcacctactgggagggcaaccccgagatggagaccctgcagagaatctacggcatcagcttccccgacaacaagatgatgagagactgggagaagttccaggaggaggccaagaacagagaccacagaaagatcggcaaggagcaggagctgttcttcttccacgacctgagccccggcagctgcttcttcctgcccagaggcgccttcatctacaacaccctgaccgacttcatcagagaggagtaccacaagagagacttcaccgaggtgctgagccccaacatgtacaacagcaagctgtgggaggccagcggccactggcagcactacagcgagaacatgttcaccttcgagatcgagaaggacaccttcgccctgaagcccatgaactgccccggccactgcctgatgttcgcccacagacccagaagctggagagagatgcccatcagattcgccgacttcggcgtgctgcacagaaacgagctgagcggcaccctgagcggcctgaccagagtgagaagattccagcaggacgacgcccacatcttctgcaccgtggagcagatcgaggaggagatcaagggctgcctgcagttcctgcagagcgtgtacagcaccttcggcttcagcttccagctgaacctgagcaccagacccgagaacttcctgggcgagatcgagatgtggaacgaggccgagaagcagctgcagaacagcctgatggacttcggcgagccctggaagatgaaccccggcgacggcgccttctacggccccaagatcgacatcaagatcaaggacgccatcggcagataccaccagtgcgccaccatccagctggacttccagctgcccatcagattcaacctgacctacgtgagcaaggacggcgacgacaagaagagacccgtgatcatccacagagccatcctgggcagcgtggagagaatgatcgccatcctgagcgagaactacggcggcaagtggcccttctggctgagccccagacaggtgatggtgatccccgtgggccccacctgcgagaagtacgccctgcaggtgagcagcgagttcttcgaggagggcttcatggccgacgtggacctggaccacagctgcaccctgaacaagaagatcagaaacgcccagctggcccagtacaacttcatcctggtggtgggcgagaaggagaagatcgacaacgccgtgaacgtgagaaccagagacaacaagatccacggcgagatcctggtgaccagcgccatcgacaagctgaagaacctgagaaagaccagaaccctgaacgccgaggaggccttctag

SEQ ID NO: 10154 - DNA, 1149 bp, synthetic construct
  source 1..1149: mol_type = other DNA; note = Synthetic coding sequence
atgttcaagatccagctggagcccctgaagctgagagcctggaccctgaacggcttcgtgaagttcagaaacaaggagaccagcgccggccccgtggccgtgatgggcaaggactactacaagatcctgggcatccccagcggcgccaacgaggacgagatcaagaaggcctacagaaagatggccctgaagtaccaccccgacaagaacaaggagcccaacgccgaggagaagttcaaggagatcgccgaggcctacgacgtgctgagcgaccccaagaagagaggcctgtacgaccagtacggcgaggagggcctgaagaccggcggcggcaccagcggcggcagcagcggcagcttccactacaccttccacggcgacccccacgccaccttcgccagcttcttcggcggcagcaaccccttcgacatcttcttcgccagcagcagaagcaccagacccttcagcggcttcgaccccgacgacatggacgtggacgaggacgaggaccccttcggcgccttcggcagattcggcttcaacggcctgagcagaggccccagaagagcccccgagcccctgtaccccagaagaaaggtgcaggacccccccgtggtgcacgagctgagagtgagcctggaggagatctaccacggcagcaccaagagaatgaagatcaccagaagaagactgaaccccgacggcagaaccgtgagaaccgaggacaagatcctgcacatcgtgatcaagagaggctggaaggagggcaccaagatcaccttccccaaggagggcgacgccacccccgacaacatccccgccgacatcgtgttcgtgctgaaggacaagccccacgcccacttcagaagagacggcaccaacgtgctgtacagcgccctgatcagcctgaaggaggccctgtgcggctgcaccgtgaacatccccaccatcgacggcagagtgatccccctgccctgcaacgacgtgatcaagcccggcaccgtgaagagactgagaggcgagggcctgcccttccccaaggtgcccacccagagaggcgacctgatcgtggagttcaaggtgagattccccgacagactgaccccccagaccagacagatcctgaagcagcacctgccctgcagctag

SEQ ID NO: 10155 - DNA, 1356 bp, synthetic construct
  source 1..1356: mol_type = other DNA; note = Synthetic coding sequence
atgagagagtgcatcagcatccacgtgggccaggccggcgtgcagatcggcaacgcctgctgggagctgtactgcctggagcacggcatccagcccgacggccagatgcccagcgacaagaccatcggcggcggcgacgacagcttcaacaccttcttcagcgagaccggcgccggcaagcacgtgcccagagccgtgttcgtggacctggagcccaccgtgatcgacgaggtgagaaccggcacctacagacagctgttccaccccgagcagctgatcaccggcaaggaggacgccgccaacaactacgccagaggccactacaccatcggcaaggagatcatcgacctggtgctggacagaatcagaaagctggccgaccagtgcaccggcctgcagggcttcctggtgttccacagcttcggcggcggcaccggcagcggcttcaccagcctgctgatggagagactgagcgtggactacggcaagaagagcaagctggagttcagcatctaccccgccccccaggtgagcaccgccgtggtggagccctacaacagcatcctgaccacccacaccaccctggagcacagcgactgcgccttcatggtggacaacgaggccatctacgacatctgcagaagaaacctggacatcgagagacccacctacaccaacctgaacagactgatcagccagatcgtgagcagcatcaccgccagcctgagattcgacggcgccctgaacgtggacctgaccgagttccagaccaacctggtgccctaccccagaatccacttccccctggccacctacgcccccgtgatcagcgccgagaaggcctaccacgagcagctgagcgtggccgagatcaccaacgcctgcttcgagcccgccaaccagatggtgaagtgcgaccccagacacggcaagtacatggcctgctgcctgctgtacagaggcgacgtggtgcccaaggacgtgaacgccgccatcgccaccatcaagaccaagagaagcatccagttcgtggactggtgccccaccggcttcaaggtgggcatcaactaccagccccccaccgtggtgcccggcggcgacctggccaaggtgcagagagccgtgtgcatgctgagcaacaccaccgccatcgccgaggcctgggccagactggaccacaagttcgacctgatgtacgccaagagagccttcgtgcactggtacgtgggcgagggcatggaggagggcgagttcagcgaggccagagaggacatggccgccctggagaaggactacgaggaggtgggcgtggacagcgtggagggcgagggcgaggaggagggcgaggagtactag

SEQ ID NO: 10156 - DNA, 444 bp, synthetic construct
  source 1..444: mol_type = other DNA; note = Synthetic coding sequence
tgaaccgccagaggccccgagcccgagcagatgggcctggccccctgctgcacccaggccctgtgcggcctggccctgagacaccacagccacctgcagcagatcagactggagttccacagactgagcgaggagaacaccctgctgaagaacgacctgggcagagtgagacaggagctggaggccgccgagagcacccacgacgcccagagaaaggagatcgaggtgctgaagaaggacaaggagaaggcctgcagcgagatggaggtgctgaacagacagaaccagaactacaaggaccagctgagccagctgaacgtgagagtgctgcagctgggccaggaggccagcacccaccaggcccagaacgaggagcacagagtgaccatccagatgctgacccagagcctggaggaggtggtgagaagcggccagcagcagtag

SEQ ID NO: 10157 - DNA, 771 bp, synthetic construct
  source 1..771: mol_type = other DNA; note = Synthetic coding sequence
atggccacccagagaaagcacctggtgaaggacttcaacccctacatcacctgctacatctgcaagggctacctgatcaagcccaccaccgtgaccgagtgcctgcacaccttctgcaagacctgcatcgtgcagcacttcgaggacagcaacgactgccccagatgcggcaaccaggtgcacgagaccaaccccctggagatgctgagactggacaacaccctggaggagatcatcttcaagctggtgcccggcctgagagagcaggagctggagagagagagcgagttctggaagaagaacaagccccaggagaacggccaggacgacaccagcaaggccgacaagcccaaggtggacgaggagggcgacgagaacgaggacgacaaggactaccacagaagcgacccccagatcgccatctgcctggactgcctgagaaacaacggccagagcggcgacaacgtggtgaagggcctgatgaagaagttcatcagatgcagcaccagagtgaccgtgggcaccatcaagaagttcctgagcctgaagctgaagctgcccagcagctacgagctggacgtgctgtgcaacggcgagatcatgggcaaggaccacaccatggagttcatctacatgaccagatggagactgagaggcgagaacttcagatgcctgaactgcagcgccagccaggtgtgcagccaggacggccccctgtaccagagctaccccatggtgctgcagtacagacccagaatcgacttcggctag

SEQ ID NO: 10158 - DNA, 6672 bp, synthetic construct
  source 1..6672: mol_type = other DNA; note = Synthetic coding sequence
atggcccccaagaaggagaagggcggcaccgtgaacaccagcagcaagatctgggagcccagcctgatcgccgcccagttcaaccagaacgactggcaggccagcatcgccttcgtggtgggcaaccagatcgaggacgacctgctgatccaggccctgaccgtggccgtgcaggtgccccagagaaagctgttcagcatggtgagctggcaggacatcctgcagcagatcaacgagatcaacaccctggtgggcagcgccagcagcaagaaggccaagaagcccgtgggcggcaacgcccccctgtactacgaggtgctgaccgccgccaaggccatcatggacagcggcgagaagctgaccctgcccctgatcggcaagctgctgaagttccagctgctgcagatcaagttcaaggaccagcagagaagagagaacgagaagaaggtgatcgaggacaagcccaagctggagaaggacaagggcaaggccaagagccccaaggagaagaaggcccccagcgccaagcccgccaagggcaagggcaaggaccagcccgaggccaacgcccccgtgaagaagaccacccagctgaagagaagaggcgaggacgaccacaccaacagatacatcgacgacgagcccgacgacggcgcccagcactacatcatcgtggtgggcttcaacaacccccagctgctggccatcatggccgagctgggcatccccatcaccagcgtgatcaagatcagcagcgagaactacgagcccctgcagacccacctggccgccgtgaaccagcagcaggaggtgctgctgcagagcgaggacctggaggccgagaagctgaagaaggagaacgccatcaaggagctgaagaccttctggaagtacctggagcccgtgctgaacaacgagaagcccgagaccaacctgttcgacgtggccagactggagtacatggtgaaggccgccgacttccccagcgactggagcgacggcgagatgatgctgaagctgggcaccgacatcttcgagaacatcgcctgcctgatgtacgacatcctggactggaagagacagcaccagcactacctggagagcatgcagctgatcaacgtgccccaggtggtgaacgagaagcccgtgctggaggccatgcccaccagcgaggccccccagcccgccgtgcccgcccccggcaagaagaaggcccagtacgaggagccccaggcccccccccccgtgaccagcgtgatcaccaccgaggtggacatgagatactacaactacctgctgaaccccatcagagaggagttcatcagcgtgcccctgatcctgcactgcatgctggagcaggtggtggccaccgaggaggacctggtgccccccagcctgagagagcccagccccagagccgacggcctggaccacagaatcgccgcccacatcgtgagcctgctgcccagcctgtgcctgagcgagagagagaagaagaacctgcacgacatcttcctgagcgaggaggagaacgagagcaaggccgtgcccaagggccccctgctgctgaactaccacgacgcccacgcccacaagaagtacgccctgcaggaccagaagaacttcgaccccgtgcagatcgagcaggagatgcagagcaagctgcccctgtgggagttcctgcagttccccctgccccccccctggaacaacaccaagagactggccaccatccacgagctgatgcacttctgcaccagcgacgtgctgagctggaacgaggtggagagagccttcaaggtgttcaccttcgagagcctgaagctgagcgaggtggacgagaagggcaagctgaagcccagcggcatgatgtgcggcagcgacagcgagatgttcaacatcccctgggacaaccccgccagattcgccaagcagatcagacagcagtacgtgatgaagatgaacacccaggaggccaagcagaaggccgacatcaagatcaaggacagaaccctgttcgtggaccagaacctgagcatgagcgtgcaggacaacgagagcaacagagagcccagcgaccccagccagtgcgacgccaacaacatgaagcacagcgacctgaacaacctgaagctgagcgtgcccgacaacagacagctgctggagcaggagagcatcatgaaggcccagccccagcacgagagcctggagcagaccaccaacaacgagatcaaggacgacgccgtgaccaaggccgacagccacgagaagaagcccaagaagatgatggtggaggccgacctggaggacatcaagaagacccagcagagaagcctgatggactggagcttcaccgagcacttcaagcccaaggtgctgctgcaggtgctgcaggaggcccacaagcagtacagatgcgtggacagctactaccacacccaggacaacagcctgctgctggtgttccacaaccccatgaacagacagagactgcactgcgagtactggaacatcgccctgcacagcaacgtgggcttcagaaactacctggagctggtggccaagagcatccaggactggatcaccaaggaggaggccatctaccaggagagcaagatgaacgagaagatcatcagaaccagagccgagctggagctgaagagcagcgccaacgccaagctgaccagcgccagcaagatcttcagcatcaaggagagcaagagcaacaagggcatcagcaagaccgagatcagcgaccaggagaaggagaaggagaaggagaagatccccttcatcctggagggcagcctgaaggcctggaaggaggagcagcacagactggccgaggaggagagactgagagaggagaagaaggccgagaagaagggcaaggaggccggcaagaagaagggcaaggacaacgccgagaaggaggacagcagaagcctgaagaagaagagcccctacaaggagaagagcaaggaggagcaggtgaagatccaggaggtgaccgaggagagcccccaccagcccgagcccaagatcacctaccccttccacggctacaacatgggcaacatccccacccagatcagcggcagcaactactacctgtaccccagcgacggcggccagatcgaggtggagaagaccatgttcgagaagggccccaccttcatcaaggtgagagtggtgaaggacaaccacaacttcatgatccacctgaacgaccccaaggagatcgtgaagaaggaggagaagggcgactactacctggaggaggaggaggagggcgacgaggagcagagcctggagaccgaggtgagcgacgccaagaacaaggccttcagcaagttcggcagcttcagcgccaccctggagaacggcatctgcctgagcatcagctactacggcagcaacggcatggcccccgaggacaaggaccccgacctggagaccatcctgaacatccccagcgccctgacccccaccgtggtgcccgtgatcgtgaccgtgccccagagcaaggccaagggcaagatcaagggcaaggagaagcccaaggagagcctgaaggaggaggagcaccccaaggaggaggagaagaaggaggaggaggtggagcccgagcccgtgctgcaggagaccctggacgtgcccaccttccagagcctgaacgtgagctgccccagcggcctgctgctgaccttcatcggccaggagagcaccggccagtacgtgatcgacgaggagcccacctgggacatcatggtgagacagagctacccccagagagtgaagcactacgagttctacaagaccgtgatgccccccgccgagcaggaggccagcagagtgatcaccagccagggcaccgtggtgaagtacatgctggacggcagcacccagatcctgttcgccgacggcgccgtgagcagaagccccaacagcggcctgatctgcccccccagcgagatgcccgccaccccccacagcggcgacctgatggacagcatcagccagcagaagagcgagaccatccccagcgagatcaccaacaccaagaagggcaagagccacaagagccagagcagcatggcccacaagggcgagatccacgaccccccccccgaggccgtgcagaccgtgacccccgtggaggtgcacatcggcacctggttcaccaccacccccgagggcaacagaatcggcaccaagggcctggagagaatcgccgacctgacccccctgctgagcttccaggccaccgaccccgtgaacggcaccgtgatgaccaccagagaggacaaggtggtgatcgtggagagaaaggacggcaccagaatcgtggaccacgccgacggcaccagaatcaccaccttctaccaggtgtacgaggaccagatcatcctgcccgacgaccaggagaccaccgagggccccagaaccgtgaccagacaggtgaagtgcatgagagtggagagcagcagatacgccaccgtgatcgccaactgcgaggacagcagctgctgcgccaccttcggcgacggcaccaccatcatcgccaagccccagggcacctaccaggtgctgccccccaacaccggcagcctgtacatcgacaaggactgcagcgccgtgtactgccacgagagcagcagcaacatctactaccccttccagaagagagagcagctgagagccggcagatacatcatgagacacaccagcgaggtgatctgcgaggtgctggaccccgagggcaacaccttccaggtgatggccgacggcagcatcagcaccatcctgcccgagaagaagctggaggacgacctgaacgagaagaccgagggctacgacagcctgagcagcatgcacctggagaagaaccaccagcagatctacggcgagcacgtgcccagattcttcgtgatgtacgccgacggcagcggcatggagctgctgagagacagcgacatcgaggagtacctgagcctggcctacaaggagagcaacaccgtggtgctgcaggagcccgtgcaggagcagcccggcaccctgaccatcaccgtgctgagacccttccacgaggccagcccctggcaggtgaagaaggaggacaccatcgtgccccccaacctgagaagcagaagctgggagaccttccccagcgtggagaagaagacccccggcccccccttcggcacccagatctggaagggcctgtgcatcgagagcaagcagctggtgagcgcccccggcgccatcctgaagagccccagcgtgctgcagatgagacagttcatccagcacgaggtgatcaagaacgaggtgaagctgagactgcaggtgagcctgaaggactacatcaactacatcctgaagaaggaggacgagctgcaggagatgatggtgaaggacagcagaaccgaggaggagagaggcaacgccgccgacctgctgaagctggtgatgagcttccccaagatggaggagaccaccaagagccacgtgaccgaggtggccgcccacctgaccgacctgttcaagcagagcctggccaccccccccaagtgcccccccgacaccttcggcaaggacttcttcgagaagacctggagacacaccgccagcagcaagagatggaaggagaagatcgacaagaccagaaaggagatcgagaccacccagaactacctgatggacatcaagaacagaatcatcccccccttcttcaagagcgagctgaaccagctgtaccagagccagtacaaccacctggacagcctgagcaagaagctgcccagcttcaccaagaagaacgaggacgccaacgagaccgccgtgcaggacaccagcgacctgaacctggacttcaagccccacaaggtgagcgagcagaagagcagcagcgtgcccagcctgcccaagcccgagatcagcgccgacaagaaggacttcaccgcccagaaccagaccgagaacctgaccaagagccccgaggaggccgagagctacgagcccgtgaagatccccacccagagcctgctgcaggacgtggccggccagaccagaaaggagaaggtgaagctgccccactacctgctgagcagcaagcccaagagccagcccctggccaaggtgcaggacagcgtgggcggcaaggtgaacaccagcagcgtggccagcgccgccatcaacaacgccaagagcagcctgttcggcttccacctgctgcccagcagcgtgaagttcggcgtgctgaaggagggccacacctacgccaccgtggtgaagctgaagaacgtgggcgtggacttctgcagattcaaggtgaagcagcccccccccagcaccggcctgaaggtgacctacaagcccggccccgtggccgccggcatgcagaccgagctgaacatcgagctgttcgccaccgccgtgggcgaggacggcgccaagggcagcgcccacatcagccacaacatcgagatcatgaccgagcacgaggtgctgttcctgcccgtggaggccaccgtgctgaccagcagcaactacgacaagagacccaaggacttcccccagggcaaggagaaccccatggtgcagagaaccagcaccatctacagcagcaccctgggcgtgttcatgagcagaaaggtgagcccccactag

SEQ ID NO: 10159 - DNA, 2337 bp, synthetic construct
  source 1..2337: mol_type = other DNA; note = Synthetic coding sequence
atgcccgccttcctgggcctgaagtgcctgggcaagctgtgcagcagcgagaagagcaaggtgaccagcagcgagagaaccagcgccagaggcagcaacagaaagagactgatcgtggaggacagaagagtgagcggcaccagcttcaccgcccacagaagagccaccatcacccacctgctgtacctgtgccccaaggactactgccccagaggcagagtgtgcaacagcgtggaccccttcgtggcccacccccaggacccccaccaccccagcgagaagcccgtgatccactgccacaagtgcggcgagccctgcaagggcgaggtgctgagagtgcagaccaagcacttccacatcaagtgcttcacctgcaaggtgtgcggctgcgacctggcccagggcggcttcttcatcaagaacggcgagtacctgtgcaccctggactaccagagaatgtacggcaccagatgccacggctgcggcgagttcgtggagggcgaggtggtgaccgccctgggcaagacctaccaccccaactgcttcgcctgcaccatctgcaagagacccttcccccccggcgacagagtgaccttcaacggcagagactgcctgtgccagctgtgcgcccagcccatgagcagcagccccaaggagaccaccttcagcagcaactgcgccggctgcggcagagacatcaagaacggccaggccctgctggccctggacaagcagtggcacctgggctgcttcaagtgcaagagctgcggcaaggtgctgaccggcgagtacatcagcaaggacggcgccccctactgcgagaaggactaccagggcctgttcggcgtgaagtgcgaggcctgccaccagttcatcaccggcaaggtgctggaggccggcgacaagcactaccaccccagctgcgccagatgcagcagatgcaaccagatgttcaccgagggcgaggagatgtacctgcagggcagcaccgtgtggcaccccgactgcaagcagagcaccaagaccgaggagaagctgagacccaccagaaccagcagcgagagcatctacagcagacccggcagcagcatccccggcagccccggccacaccatctacgccaaggtggacaacgagatcctggactacaaggacctggccgccatccccaaggtgaaggccatctacgacatcgagagacccgacctgatcacctacgagcccttctacaccagcggctacgacgacaagcaggagagacagagcctgggcgagagccccagaaccctgagccccacccccagcgccgagggctaccaggacgtgagagacagaatgatccacagaagcaccagccagggcagcatcaacagccccgtgtacagcagacacagctacacccccaccaccagcagaagcccccagcacttccacagacccggcaacgagcccagcagcggcagaaacagccccctgccctacagacccgacagcagacccctgacccccacctacgcccaggcccccaagcacttccacgtgcccgaccagggcatcaacatctacagaaagccccccatctacaagcagcacgccgccctggccgcccagagcaagagcagcgaggacatcatcaagttcagcaagttccccgccgcccaggcccccgaccccagcgagacccccaagatcgagaccgaccactggcccggcccccccagcttcgccgtggtgggccccgacatgaagagaagaagcagcggcagagaggaggacgacgaggagctgctgagaagaagacagctgcaggaggagcagctgatgaagctgaacagcggcctgggccagctgatcctgaaggaggagatggagaaggagagcagagagagaagcagcctgctggccagcagatacgacagccccatcaacagcgccagccacatccccagcagcaagaccgccagcctgcccggctacggcagaaacggcctgcacagacccgtgagcaccgacttcgcccagtacaacagctacggcgacgtgagcggcggcgtgagagactaccagaccctgcccgacggccacatgcccgccatgagaatggacagaggcgtgagcatgcccaacatgctggagcccaagatcttcccctacgagatgctgatggtgaccaacagaggcagaaacaagatcctgagagaggtggacagaaccagactggagagacacctggcccccgaggtgttcagagagatcttcggcatgagcatccaggagttcgacagactgcccctgtggagaagaaacgacatgaagaagaaggccaagctgttctag

SEQ ID NO: 10160 - DNA, 1689 bp, synthetic construct
  source 1..1689: mol_type = other DNA; note = Synthetic coding sequence
atgaaccccctgttcggccccaacctgttcctgctgcagcaggagcagcagggcctggccggccccctgggcgacagcctgggcggcgaccacttcgccggcggcggcgacctgccccccgcccccctgagccccgccggccccgccgcctacagcccccccggccccggccccgccccccccgccgccatggccctgagaaacgacctgggcagcaacatcaacgtgctgaagaccctgaacctgagattcagatgcttcctggccaaggtgcacgagctggagagaagaaacagactgctggagaagcagctgcagcaggccctggaggagggcaagcagggcagaagaggcctgggcagaagagaccaggccgtgcagaccggcttcgtgagccccatcagacccctgggcctgcagctgggcgccagacccgccgccgtgtgcagccccagcgccagagtgctgggcagccccgccagaagccccgccggccccctggcccccagcgccgccagcctgagcagcagcagcaccagcaccagcaccacctacagcagcagcgccagattcatgcccggcaccatctggagcttcagccacgccagaagactgggccccggcctggagcccaccctggtgcagggccccggcctgagctgggtgcaccccgacggcgtgggcgtgcagatcgacaccatcacccccgagatcagagccctgtacaacgtgctggccaaggtgaagagagagagagacgagtacaagagaagatgggaggaggagtacaccgtgagaatccagctgcaggacagagtgaacgagctgcaggaggaggcccaggaggccgacgcctgccaggaggagctggccctgaaggtggagcagctgaaggccgagctggtggtgttcaagggcctgatgagcaacaacctgagcgagctggacaccaagatccaggagaaggccatgaaggtggacatggacatctgcagaagaatcgacatcaccgccaagctgtgcgacgtggcccagcagagaaactgcgaggacatgatccagatgttccagaagaagctggtgcccagcatgggcggcagaaagagagagagaaaggccgccgtggaggaggacaccagcctgagcgagagcgagggccccagacagcccgacggcgacgaggaggagagcaccgccctgagcatcaacgaggagatgcagagaatgctgaaccagctgagagagtacgacttcgaggacgactgcgacagcctgacctgggaggagaccgaggagaccctgctgctgtgggaggacttcagcggctacgccatggccgccgccgaggcccagggcgagcaggaggacagcctggagaaggtgatcaaggacaccgagagcctgttcaagaccagagagaaggagtaccaggagaccatcgaccagatcgagctggagctggccaccgccaagaacgacatgaacagacacctgcacgagtacatggagatgtgcagcatgaagagaggcctggacgtgcagatggagacctgcagaagactgatcacccagagcggcgacagaaagagccccgccttcaccgccgtgcccctgagcgaccccccccccccccccagcgaggccgaggacagcgacagagacgtgagcagcgacagcagcatgagatag

SEQ ID NO: 10161 - DNA, 2415 bp, synthetic construct
  source 1..2415: mol_type = other DNA; note = Synthetic coding sequence
atgaactaccagcagcagctggccaacagcgccgccatcagagccgagatccagagattcgagagcgtgcaccccaacatctacagcatctacgagctgctggagagagtggaggagcccgtgctgcagaaccagatcagagagcacgtgatcgccatcgaggacgccttcgtgaacagccaggagtggaccctgagcagaagcgtgcccgagctgaaggtgggcatcgtgggcaacctggccagcggcaagagcgccctggtgcacagatacctgaccggcacctacgtgcaggaggagagccccgagggcggcagattcaagaaggagatcgtggtggacggccagagctacctgctgctgatcagagacgagggcggcccccccgaggcccagttcgccatgtgggtggacgccgtgatcttcgtgttcagcctggaggacgagatcagcttccagaccgtgtaccactactacagcagaatggccaactacagaaacaccagcgagatccccctggtgctggtgggcacccaggacgccatcagcagcgccaaccccagagtgatcgacgacgccagagccagaaagctgagcaacgacctgaagagatgcacctactacgagacctgcgccacctacggcctgaacgtggagagagtgttccaggacgtggcccagaagatcgtggccaccagaaagaagcagcagctgagcatcggcccctgcaagagcctgcccaacagccccagccacagcagcgtgtgcagcgcccaggtgagcgccgtgcacatcagccagaccagcaacggcggcggcagcctgagcgactacagcagcagcgtgcccagcacccccagcaccagccagaaggagctgagaatcgacgtgccccccaccgccaacacccccacccccgtgagaaagcagagcaagagaagaagcaacctgttcaccagcagaaagggcagcgaccccgacaaggagaagaagggcctggagagcagagccgacagcatcggcagcggcagagccatccccatcaagcagggcatgctgctgaagagaagcggcaagagcctgaacaaggagtggaagaagaagtacgtgaccctgtgcgacaacggcgtgctgacctaccaccccagcctgcacgactacatgcagaacgtgcacggcaaggagatcgacctgctgagaaccaccgtgaaggtgcccggcaagagaccccccagagccaccagcgcctgcgcccccatcagcagccccaagaccaacggcctgagcaaggacatgagcagcctgcacatcagccccaacagcgacaccggcctgggcgacagcgtgtgcagcagccccagcatcagcagcaccaccagccccaagctggaccccccccccagcccccacgccaacagaaagaagcacagaagaaagaagagcaccagcaacttcaaggccgacggcctgagcggcaccgccgaggagcaggaggagaacttcgagttcatcatcgtgagcctgaccggccagacctggcacttcgaggccaccacctacgaggagagagacgcctgggtgcaggccatcgagagccagatcctggccagcctgcagagctgcgagagcagcaagaacaagagcagactgaccagccagagcgaggccatggccctgcagagcatcagaaacatgagaggcaacagccactgcgtggactgcgagacccagaaccccaactgggccagcctgaacctgggcgccctgatgtgcatcgagtgcagcggcatccacagaaacctgggcacccacctgagcagagtgagaagcctggacctggacgactggcccgtggagctgatcaaggtgatgagcagcatcggcaacgagctggccaacagcgtgtgggaggagagcagccagggcagaaccaagcccagcgtggacagcaccagagaggagaaggagagatggatcagagccaagtacgagcagaagctgttcctggcccccctgccctgcaccgagctgagcctgggccagcacctgctgagagccaccgccgacgaggacctgagaaccgccatcctgctgctggcccacggcagcagagacgaggtgaacgagacctgcggcgagggcgacggcagaaccgccctgcacctggcctgcagaaagggcaacgtggtgctggcccagctgctgatctggtacggcgtggacgtgaccgccagagacgcccacggcaacaccgccctggcctacgccagacaggccagcagccaggagtgcatcgacgtgctgctgcagtacggctgccccgacgagagattcgtgctgatggccacccccaacctgagcagaagaaacaacaacagaaacaacagcagcggcagagtgcccaccatcatctag

SEQ ID NO: 10162 - DNA, 2712 bp, synthetic construct
  source 1..2712: mol_type = other DNA; note = Synthetic coding sequence
atgcccgagcagttcagcgtggccgagttcctggccgtgaccgccgaggacctgagcagccccgccggcgccgccgccttcgccgccaagatgcccagatacagaggcgccgccctggccagagaggagatcctggagggcgaccaggccatcctgcagagaatcaagaaggccgtgagagccatccacagcagcggcctgggccacgtggagaacgaggagcagtacagagaggccgtggagagcctgggcaacagccacctgagccagaacagccacgagctgagcaccggcttcctgaacctggccgtgttcaccagagaggtggccgccctgttcaagaacctgatccagaacctgaacaacatcgtgagcttccccctggacagcctgatgaagggccagctgagagacggcagacaggacagcaagaagcagctggagaaggcctggaaggactacgaggccaagatggccaagctggagaaggagagagacagagccagagtgaccggcggcatccccggcgaggtggcccaggacatgcagagagagagaagaatcttccagctgcacatgtgcgagtacctgctgaaggccggcgagagccagatgaagcagggccccgacttcctgcagagcctgatcaagttcttccacgcccagcacaacttcttccaggacggctggaaggccgcccagagcctgttccccttcatcgagaagctggccgccagcgtgcacgccctgcaccaggcccaggaggacgagctgcagaagctgacccagctgagagacagcctgagaggcaccctgcagctggagagcagagaggagcacctgagcagaaagaacagcggctgcggctacagcatccaccagcaccagggcaacaagcagttcggcaccgagaaggtgggcttcctgtacaagaagagcgacggcatcagaagagtgtggcagaagagaaagtgcggcgtgaagtacggctgcctgaccatcagccacagcaccatcaacagaccccccgtgaagctgaccctgctgacctgccaggtgagacccaaccccgaggagaagaagtgcttcgacctggtgacccacaacagaacctaccacttccaggccgaggacgagcacgagtgcgaggcctgggtgagcgtgctgcagaacagcaaggacgaggccctgagcagcgccttcctgggcgagcccagcgccggccccggcagctggggcagcgccggccacgacggcgagccccacgacctgaccaagctgctgatcgccgaggtgaagagcagacccggcaacagccagtgctgcgactgcggcgccgccgaccccacctggctgagcaccaacctgggcgtgctgacctgcatccagtgcagcggcgtgcacagagagctgggcgtgagattcagcagaatgcagagcctgaccctggacctgctgggccccagcgagctgctgctggccctgaacatgggcaacaccagcttcaacgaggtgatggaggcccagctgcccagccacggcggccccaagcccagcgccgagagcgacatgggcaccagaagagactacatcatggccaagtacgtggagcacagattcgccagaagatgcacccccgagccccagagactgtggaccgccatctgcaacagagacctgctgagcgtgctggaggccttcgccaacggccaggacttcggccagcccctgcccggccccgacgcccaggcccccgaggagctggtgctgcacctggccgtgaaggtggccaaccaggccagcctgcccctggtggacttcatcatccagaacggcggccacctggacgccaaggccgccgacggcaacaccgccctgcactacgccgccctgtacaaccagcccgactgcctgaagctgctgctgaagggcagagccctggtgggcaccgtgaacgaggccggcgagaccgccctggacatcgccagaaagaagcaccacaaggagtgcgaggagctgctggagcaggcccaggccggcaccttcgccttccccctgcacgtggactacagctgggtgatcagcaccgagcccggcagcgacagcgaggaggacgaggaggagaagagatgcctgctgaagctgcccgcccaggcccactgggccagcggcagactggacatcagcaacaagacctacgagaccgtggccagcctgggcgccgccaccccccagggcgagagcgaggactgccccccccccctgcccgtgaagaacagcagcagaaccctggtgcagggctgcgccagacacgccagcggcgacagaagcgaggtgagcagcctgagcagcgaggcccccgagacccccgagagcctgggcagccccgccagcagcagcagcctgatgagccccctggagcccggcgaccccagccaggccccccccaacagcgaggagggcctgagagagccccccggcaccagcagacccagcctgaccagcggcaccacccccagcgagatgtacctgcccgtgagattcagcagcgagagcaccagaagctacagaagaggcgccagaagccccgaggacggccccagcgccagacagcccctgcccagaagaaacgtgcccgtgggcatcaccgagggcgacggcagcagaaccggcagcctgcccgccagcagcgtgcagctgctgcaggactag

SEQ ID NO: 10163 - DNA, 1359 bp, synthetic construct
  source 1..1359: mol_type = other DNA; note = Synthetic coding sequence
atgatgaagagacagctgcacagaatgagacagctggcccagaccggcagcctgggcagaacccccgagaccgccgagttcctgggcgaggacctgctgcaggtggagcagagactggagcccgccaagagagccgcccacaacatccacaagagactgcaggcctgcctgcagggccagagcggcgccgacatggacaagagagtgaagaagctgcccctgatggccctgagcaccaccatggccgagagcttcaaggagctggaccccgacagcagcatgggcaaggccctggagatgagctgcgccatccagaaccagctggccagaatcctggccgagttcgagatgaccctggagagagacgtgctgcagcccctgagcagactgagcgaggaggagctgcccgccatcctgaagcacaagaagagcctgcagaagctggtgagcgactggaacaccctgaagagcagactgagccaggccaccaagaacagcggcagcagccagggcctgggcggcagccccggcagccacagccacaccaccatggccaacaaggtggagaccctgaaggaggaggaggaggagctgaagagaaaggtggagcagtgcagagacgagtacctggccgacctgtaccacttcgtgaccaaggaggacagctacgccaactacttcatcagactgctggagatccaggccgactaccacagaagaagcctgagcagcctggacaccgccctggccgagctgagagagaaccacggccaggccgaccacagccccagcatgaccgccacccacttccccagagtgtacggcgtgagcctggccacccacctgcaggagctgggcagagagatcgccctgcccatcgaggcctgcgtgatgatgctgctgagcgagggcatgaaggaggagggcctgttcagactggccgccggcgccagcgtgctgaagagactgaagcagaccatggccagcgacccccacagcctggaggagttctgcagcgacccccacgccgtggccggcgccctgaagagctacctgagagagctgcccgagcccctgatgaccttcgacctgtacgacgactggatgagagccgccagcctgaaggagcccggcgccagactgcaggccctgcaggaggtgtgcagcagactgccccccgagaacctgagcaacctgagatacctgatgaagttcctggccagactggccgaggagcaggaggtgaacaagatgacccccagcaacatcgccatcgtgctgggccccaacctgctgtggccccccgagaaggagggcaccgagcccgccagagagctgggcagccagaccctgtgctag

SEQ ID NO: 10164 - DNA, 1137 bp, synthetic construct
  source 1..1137: mol_type = other DNA; note = Synthetic coding sequence
atgaacaacagcggcgccgacgagatcggcaagctgttcgtgggcggcctggactggagcaccacccaggagaccctgagaagctacttcagccagtacggcgaggtggtggactgcgtgatcatgaaggacaagaccaccaaccagagcagaggcttcggcttcgtgaagttcaaggaccccaactgcgtgggcaccgtgctggccagcagaccccacaccctggacggcagaaacatcgaccccaagccctgcacccccagaggcatgcagcccgagagaaccagacccaaggagggctggcagaagggccccagaagcgacaacagcaagagcaacaagatcttcgtgggcggcatcccccacaactgcggcgagaccgagctgagagagtacttcaagaagttcggcgtggtgaccgaggtggtgatgatctacgacgccgagaagcagagacccagaggcttcggcttcatcaccttcgaggacgagcagagcgtggaccaggccgtgaacatgcacttccacgacatcatgggcaagaaggtggaggtgaagagagccgagcccagagacagcaagagccaggcccccggccagcccggcgccagccagtggggcagcagagtggtgcccaacgccgccaacggctgggccggccagcccccccccacctggcagcagggctacggcccccagggcatgtgggtgcccgccggccaggccatcggcggctacggccccccccccgccggcagaggcgccccccccccccccccccccttcaccagctacatcgtgagcaccccccccggcggcttcccccccccccagggcttcccccagggctacggcgcccccccccagttcagcttcggctacggcccccccccccccccccccgaccagttcgccccccccggcgtgccccccccccccgccacccccggcgccgcccccctggccttcccccccccccccagccaggccgcccccgacatgagcaagccccccaccgcccagcccgacttcccctacggccagtacggcctgggcagctacagccccgccccccccggctgcggcccccacttcgtgtacagcctgatggtgagactgagcagcgacgtggcctag

SEQ ID NO: 10165 - DNA, 2430 bp, synthetic construct
  source 1..2430: mol_type = other DNA; note = Synthetic coding sequence
atggaggtgctgagagagaaggtggaggaggaggaggaggccgagagagaggaggccgccgagtgggccgagtgggccagaatggagaagatgatgagacccgtggaggtgagaaaggaggagatcaccctgaagcaggagaccctgagagacctggagaagaagctgagcgagatccagatcaccgtgagcgccgagctgcccgccttcaccaaggacaccatcgacatcagcaagctgcccatcagctacaagaccaacacccccaaggaggagcacctgctgcaggtggccgacaacttcagcagacagtacagccacctgtgccccgacagagtgcccctgttcctgcaccccctgaacgagtgcgaggtgcccaagttcgtgagcaccaccctgagacccaccctgatgccctaccccgagctgtacaactgggacagctgcgcccagttcgtgagcgacttcctgaccatggtgcccctgcccgaccccctgaagcccaccatcaagaaggaggagaaggtgctgcccaagaagtacaccatcaagccccccagagacctgtgcagcagattcgagcaggagcaggaggtgaagaagcagcaggagatcagagcccaggagaagaagagactgagagaggaggaggagagactgatggaggccgagaaggccaagcccgacgccctgcacggcctgagagtgcacagctgggtgctggtgctgagcggcaagagagaggtgcccgagaacttcttcatcgaccccttcaccggccacagctacagcacccaggacgagcacttcctgggcatcgagagcctgtggaaccacaagaactactggatcaacatgcaggactgctggaactgctgcaaggacctgatcttcgacctgggcgaccccgtgagatgggagtacatgctgctgggcaccgacaagagccagctgagcctgaccgaggaggacgacagcggcatcaacgacgaggacgacgtggagaacctgggcaaggaggacgaggacaagagcttcgacatgccccacagctgggtggagcagatcgagatcagccccgaggccttcgagaccagatgccccaacggcaagaaggtgatccagtacaagagagccaagctggagaagtgggccccctacctgaacagcaacggcctggtgagcagactgaccacctacgaggacctgcagtgcaccaacatcctggagatcaaggagtggtaccagaacagagaggacatgctggagctgaagcacatcaacaagaccaccgacctgaagaccgactacttcaagcccggccacccccaggccctgagagtgcacagctacaagagcatgcagcccgagatggacagagtgatcgagttctacgagaccgccagagtggacggcctgatgaagagagaggagacccccagaaccatgaccgagtactaccagggcagacccgacttcctgagctacagacacgccagcttcggccccagagtgaagaagctgaccctgagcagcgccgagagcaaccccagacccatcgtgaagatcaccgagagattcttcagaaaccccgccaagcccgccgaggaggacgtggccgagagagtgttcctggtggccgaggagagaatccagctgagataccactgcagagaggaccacatcaccgccagcaagagagagttcctgagaagaaccgaggtggacagcaagggcaacaagatcatcatgacccccgacatgtgcatcagcttcgaggtggagcccatggagcacaccaagaagctgctgtaccagtacgaggccatgatgcacctgaagagagaggagaagctgagcagacaccaggtgtgggagagcgagctggaggtgctggagatcctgaagctgagagaggaggaggaggccgcccacaccctgaccatcagcatctacgacaccaagagaaacgagaagagcaaggagtacagagaggccatggagagaatgatgcacgaggagcacctgagacaggtggagacccagctggactacctggcccccttcctggcccagctgccccccggcgagaagctgacctgctggcaggccgtgagactgaaggacgagtgcctgagcgacttcaagcagagactgatcaacaaggccaacctgatccaggccagattcgagaaggagacccaggagctgcagaagaagcagcagtggtaccaggagaaccaggtgaccctgacccccgaggacgaggacctgtacctgagctactgcagccaggccatgttcagaatcagaatcctggagcagagactgaacagacacaaggagctggcccccctgaagtacctggccctggaggagaagctgtacaaggaccccagactgggcgagctgcagaagatcttcgcctag

SEQ ID NO: 10166 - DNA, 828 bp, synthetic construct
  source 1..828: mol_type = other DNA; note = Synthetic coding sequence
atgtggcccctgaccgccctgctgctgctggtgcccagcagcggccaggccgccaccctggagaagcccatcctgagcctgcaccccccctggaccaccatcttcaagggcgagagagtgaccctgaagtgcgacggctaccaccccctgctgctggagctgcagcccatcagcaccctgtggtacctgggccacctgctgctgcccagccacaagaagagcatcgaggtgcagacccccggcgtgtacagatgccagaccagaggcgcccccgtgagcgaccccatccacctgagcgtgagcaacgactggctgatcctgcaggtgccctacgcccccgtgttcgagggcgagcccctggtgctgagatgcagaggctggtacgacaaggtggtgtacaagctgcactactaccacgacggccaggccgtgagatacttccacagcagcgccaactacaccgtgctgcaggccagagccagcgacagcggcagataccagtgcagcggcaccatgagaatccccgtggagagcgcccccatgttcagcgccaaggtggccgtgaccgtgcaggaggccagacacgccgccgccgtgagagtgctgcaggtgcagcccagaggcgcccccctgagactgggcagaagagtgcacagccccggcgccagaggcagaggcgccagaatcgtgctggtgagaggcggctacagacacccccagtgccccgagacccagagcgtggccgccgcccccggcgccggcttcagccccggccccggcctgcaccacagacccagcagcatgggcagaagcctgggcagctggtag

SEQ ID NO: 10167 - DNA, 657 bp, synthetic construct
  source 1..657: mol_type = other DNA; note = Synthetic coding sequence
atgaactgcagaagcgaggtgctggaggtgagcgtggagggcagacaggtggaggaggccatgctggccgtgctgcacaccgtgctgctgcacagaagcaccggcaagttccactacaagaaggagggcacctacagcatcggcaccgtgggcacccaggacgtggactgcgacttcatcgacttcacctacgtgagagtgagcagcgaggagctggacagagccctgagaaaggtggtgggcgagttcaaggacgccctgagaaacagcggcggcgacggcctgggccagatgagcctggagttctaccagaagaagaagagcagatggcccttcagcgacgagtgcatcccctgggaggtgtggaccgtgaaggtgcacgtggtggccctggccaccgagcaggagagacagatctgcagagagaaggtgggcgagaagctgtgcgagaagatcatcaacatcgtggaggtgatgaacagacacgagtacctgcccaagatgcccacccagagcgaggtggacaacgtgttcgacaccggcctgagagacgtgcagccctacctgtacaagatcagcttccagatcaccgacgccctgggcaccagcgtgaccaccaccatgagaagactgatcaaggacaccctggccctgtag

SEQ ID NO: 10168 - DNA, 552 bp, synthetic construct
  source 1..552: mol_type = other DNA; note = Synthetic coding sequence
atgatgcagatctgcgacacctacaaccagaagcacagcctgttcaacgccatgaacagattcatcggcgccgtgaacaacatggaccagaccgtgatggtgcccagcctgctgagagacgtgcccctggccgaccccggcctggacaacgacgtgggcgtggaggtgggcggcagcggcggctgcctggaggagagaaccccccccgtgcccgacagcggcagcgccaacggcagcttcttcgcccccagcagagacatgtacagccactacgtgctgctgaagagcatcagaaacgacatcgagtggggcgtgctgcaccagccccccccccccgccggcagcgaggagggcagcgcctggaagagcaaggacatcctggtggacctgggccacctggagggcgccgacgccggcgaggaggacctggagcagcagttccactaccacctgagaggcctgcacaccgtgctgagcaagctgaccagaaaggccaacatcctgaccaacagatacaagcaggagatcggcttcggcaactggggccactag

SEQ ID NO: 10169 - DNA, 369 bp, synthetic construct
  source 1..369: mol_type = other DNA; note = Synthetic coding sequence
atgctgttcgccccctgctgccaccagtgcggcgagttcatcatcggcagagtgatcaaggccatgaacaacagctggcaccccgagtgcttcagatgcgacctgtgccaggaggtgctggccgacatcggcttcgtgaagaacgccggcagacacctgtgcagaccctgccacaacagagagaaggccagaggcctgggcaagtacatctgccagaagtgccacgccatcatcgacgagcagcccctgatcttcaagaacgacccctaccaccccgaccacttcaactgcgccaactgcggccaggagggcagcgactgcagatgcaccggcgccgagagaggcgccatcctgcccgccatgccctag

SEQ ID NO: 10170 - DNA, 1083 bp, synthetic construct
  source 1..1083: mol_type = other DNA; note = Synthetic coding sequence
atggacagcgagctgatgcacagcatcgtgggcagctaccacaagccccccgagagagtgttcgtgcccagcttcacccagaacgagcccagccagaactgccaccccgccaacctggaggtgaccagccccaagatcctgcacagccccaacagccaggagaagcagctggagtacaccaagagaatggtgctgaacgtggagagagagaagaacatgatcctggagcagcaggcccagctgcagagagagaaggagcaggaccagatgaagctgtacgccaagctggagaagctggacgtgctggagaaggagtgcttcagactgaccaccacccagaagaccgccgaggacaagatcaagcacctggaggagaagctgaaggaggaggagcaccagagaaagctgttccaggacaaggccagcgagctgcagaccggcctggagatcagcaagatcatcatgagcagcgtgagcaacctgaagcacagcaaggagaagaagaagagcagcaagaagaccaagtgcatcaagagaagacccccctggcagatctgcagcaagttcggcgccctgcccttcgtggccgagaagcccagcagaaccaccagctggtgcaaggccatcccccccgacagcgagaagagcatcagcatctgcgacaacctgagcgagctgctgatggccatgcaggacgagctggaccagatgagcatggagcaccaggagctgctgaagcagatgaaggagaccgagagccacagcgtgtgcgacgacatcgagtgcgagctggagtgcctgctgaagaagatggagatcaagggcgagcagatcagcaagctgaagaagcaccaggacagcgtgtgcaagctgcagcagaaggtgcagaacagcaagatgagcgaggccagcggcatccagcaggaggacagctaccccaagggcagcaagaacatcaagaacagccccagaaagtgcctgaccgacaccaacctgttccagaagaacagcagcttccaccccatcagagtgcacaacctgcagatgaagctgagaagagacgacatcatgtgggagcagtag

SEQ ID NO: 10171 - DNA, 1758 bp, synthetic construct
  source 1..1758: mol_type = other DNA; note = Synthetic coding sequence
atgagcggcagcacccccttccagatgagactggtgcacctggacctgaagggcgccccccccaaggtgagctacctgagcgagatcttccccctgttcagagccctgggcgccaacggcctgctgatcgagtacgaggacatgttcccctacgagggccccctgagactgctgagagccaagtacgcctacagccccagcgagatcaaggagatcctgcacctggccggcctgaacgagctggaggtgatccccctggtgcagaccttcggccacatggagttcgtgctgaagcacaccgccttcgcccacctgagagaggtgggcagcttcccctgcaccctgaacccccacgaggccgagagcctggccctggtgggcgccatgatcgaccaggtgctggagctgcaccccggcgcccagagactgcacatcggctgcgacgaggtgtactacctgggcgagggcgaggccagcagaagatggctgcagcaggagcagaacagcaccggcaagctgtgcctgagccacatgagagccgtggccagcggcgtgaaggccagaagacccagcgtgacccccctggtgtgggacgacatgctgagagacctgcccgaggaccagctggccgccagcggcgtgccccagctggtggagcccgtgctgtgggactacaccgccgacctggacgtgcacggcaaggtgctgctgatgcagaagtacagaagatgcggcttcccccagctgtgggccgccagcgccttcaagggcgccaccggccccagccaggccgtgccccccgtggagcaccacctgagaaaccacgtgcagtggctgcaggtggccggcagcggccccaccgacagcctgcagggcatcatcctgaccggctggcagagatacgaccactacagcgtgctgtgcgagctgctgcccgccggcgtgcccagcctggccgcctgcctgcagctgctgctgagaggcggcttcgacgaggacgtgaaggccaaggtggagaacctgctgggcatcagcagcctggagaagaccgaccccgtgagacaggccccctgcagccccccctgccccctgctgcccctgcccttccccagaccctggagacagctgttcagcgccggcctgagcgccggcagaggccccgcccccagcctggccgccaccagcctgcccctgagccacaagagcgccagcatctgcgccgccctgtggatgagatgctggagagccaccggcatgagcctggccggcagcgcccccaccaccgccagcggcagcagcagcaccagaagctggttcagcaccagcagcccccagagaagcgccagctggcacagcggcgcccccagctgcagaagctggagactgccctgcagctggctgagcaccagaatgccctggagaagcggctggagaaagacctgcacccccgcctgcagcggctgcaagctgtgctgcagaaccagcgccagatgcctgccccccagatgccacccccccgccctggccggcaccctgctgagaacccccgagggcagagcccacgccagaggcctgctgctggaggccggcggcgccctgcactgccagatggcctgggccatcagagcccacgtgggcgtggtgcccagcggccccgccgtgagctgcccccacagcgtgcccgagggccccggccagcccctgggcgagagactggagaacaccgagggcagcagcaccggcagacccgccctgtag

SEQ ID NO: 10172 - DNA, 2112 bp, synthetic construct
  source 1..2112: mol_type = other DNA; note = Synthetic coding sequence
atggaggccctgctggagggcatccagaacagaggccacggcggcggcttcctgaccagctgcgaggccgagctgcaggagctgatgaagcagatcgacatcatggtggcccacaagaagagcgagtgggagggcagaacccacgccctggagacctgcctgaagatcagagagcaggagctgaagagcctgagaagccagctggacgtgacccacaaggaggtgggcatgctgcaccagcaggtggaggagcacgagaagatcaagcaggagatgaccatggagtacaagcaggagctgaagaagctgcacgaggagctgtgcatcctgaagagaagctacgagaagctgcagaagaagcagatgagagagttcagaggcaacaccaagaaccacagagaggacagaagcgagatcgagagactgaccgccaagatcgaggagttcagacagaagagcctggactgggagaagcagagactgatctaccagcagcaggtgagcagcctggaggcccagagaaaggccctggccgagcagagcgagatcatccaggcccagctggtgaacagaaagcagaagctggagagcgtggagctgagcagccagagcgagatccagcacctgagcagcaagctggagagagccaacgacaccatctgcgccaacgagctggagatcgagagactgaccatgagagtgaacgacctggtgggcaccagcatgaccgtgctgcaggagcagcagcagaaggaggagaagctgagagagagcgagaagctgctggaggccctgcaggaggagaagagagagctgaaggccgccctgcagagccaggagaacctgatccacgaggccagaatccagaaggagaagctgcaggagaaggtgaaggccaccaacacccagcacgccgtggaggccatcagacccagagaggagagcctggccgagaagaagtacaccagccagggccagggcgacctggacagcgtgctgagccagctgaacttcacccacaccagcgaggacctgctgcaggccgaggtgacctgcctggagggcagcctggagagcgtgagcgccacctgcaagcagctgagccaggagctgatggagaagtacgaggagctgaagagaatggaggcccacaacaacgagtacaaggccgagatcaagaagctgaaggagcagatcctgcagggcgagcagagctacagcagcgccctggagggcatgaagatggagatcagccacctgacccaggagctgcaccagagagacatcaccatcgccagcaccaagggcagcagcagcgacatggagaagagactgagagccgagatgcagaaggccgaggacaaggccgtggagcacaaggagatcctggaccagctggagagcctgaagctggagaacagacacctgagcgagatggtgatgaagctggagctgggcctgcacgaggccaaggagatcagcctggccgacctgcaggagaactacatcgaggccctgaacaagctggtgagcgagaaccagcagctgcagaaggacctgatgaacaccaagagccagctggagatcagcacccagatgtgcaagaagcagaacgacagaatcttcaagcccacccacagcagaaccaccgagttcaagaacaccgagttcaagcccacccacggccagcacagacacgacggcatcaagaccgagcactacaagaccgacctgcacagccccagaggccaggccagcgacagcatcaaccccatgagcagagtgctgagccccctgagcccccagatcagcccctgcagcagcaccagaagcctgaccagctacagcctgtgcaagacccacagcctgcccagcgccctggacaccaacgaggccaacttcagcgacaccatgagcgagagcatgaacgaccaggaggagttcatcagcagctgcagcctgcccgtgagccccctgggcagcatcgccaccagattcctggaggaggaggagctgagaagccaccacatcctggagagactggacgcccacatcgaggagctgaagagagagagcgagaagaccgtgagacagttcaccgccctgaagtag

SEQ ID NO: 10173 - DNA, 1626 bp, synthetic construct
  source 1..1626: mol_type = other DNA; note = Synthetic coding sequence
atgagcagctgcgtgagcagccagcccagcagcaacagagccgccccccaggacgagctgggcggcagaggcagcagcagcagcgagagccagaagccctgcgaggccctgagaggcctgagcagcctgagcatccacctgggcatggagagcttcatcgtggtgaccgagtgcgagcccggctgcgccgtggacctgggcctggccagagacagacccctggaggccgacggccaggaggtgcccctggacaccagcggcagccaggccagaccccacctgagcggcagaaagctgagcctgcaggagagaagccagggcggcctggccgccggcggcagcctggacatgaacggcagatgcatctgccccagcctgccctacagccccgtgagcagcccccagagcagccccagactgcccagaagacccaccgtggagagccaccacgtgagcatcaccggcatgcaggactgcgtgcagctgaaccagtacaccctgaaggacgagatcggcaagggcagctacggcgtggtgaagctggcctacaacgagaacgacaacacctactacgccatgaaggtgctgagcaagaagaagctgatcagacaggccggcttccccagaagacccccccccagaggcaccagacccgcccccggcggctgcatccagcccagaggccccatcgagcaggtgtaccaggagatcgccatcctgaagaagctggaccaccccaacgtggtgaagctggtggaggtgctggacgaccccaacgaggaccacctgtacatggtgttcgagctggtgaaccagggccccgtgatggaggtgcccaccctgaagcccctgagcgaggaccaggccagattctacttccaggacctgatcaagggcatcgagtacctgcactaccagaagatcatccacagagacatcaagcccagcaacctgctggtgggcgaggacggccacatcaagatcgccgacttcggcgtgagcaacgagttcaagggcagcgacgccctgctgagcaacaccgtgggcacccccgccttcatggcccccgagagcctgagcgagaccagaaagatcttcagcggcaaggccctggacgtgtgggccatgggcgtgaccctgtactgcttcgtgttcggccagtgccccttcatggacgagagaatcatgtgcctgcacagcaagatcaagagccaggccctggagttccccgaccagcccgacatcgccgaggacctgaaggacctgatcaccagaatgctggacaagaaccccgagagcagaatcgtggtgcccgagatcaagctgcacccctgggtgaccagacacggcgccgagcccctgcccagcgaggacgagaactgcaccctggtggaggtgaccgaggaggaggtggagaacagcgtgaagcacatccccagcctggccaccgtgatcctggtgaagaccatgatcagaaagagaagcttcggcaaccccttcgagggcagcagaagagaggagagaagcctgagcgcccccggcaacctgctgaccaagcagggcagcgaggacaacctgcagggcaccgaccccccccccgtgggcgaggaggaggtgctgctgtag

SEQ ID NO: 10174 - DNA, 2463 bp, synthetic construct
  source 1..2463: mol_type = other DNA; note = Synthetic coding sequence
atgaccgacaccagaagaagagtgaaggtgtacaccctgaacgaggacagacagtgggacgacagaggcaccggccacgtgagcagcggctacgtggagagactgaagggcatgagcctgctggtgagagccgagagcgacggcagcctgctgctggagagcaagatcaaccccaacaccgcctaccagaagcagcaggacaccctgatcgtgtggagcgaggccgagaactacgacctggccctgagcttccaggagaaggccggctgcgacgagatctgggagaagatctgccaggtgcagggcaaggaccccagcgtggacatcacccaggacctggtggacgagagcgaggaggagagattcgacgacatgagcagccccggcctggagctgcccagctgcgagctgagcagactggaggagatcgccgagctggtggccagcagcctgcccagccccctgagaagagagaagctggccctggccctggagaacgagggctacatcaagaagctgctggagctgttccacgtgtgcgaggacctggagaacatcgagggcctgcaccacctgtacgagatcatcaagggcatcttcctgctgaacagaaccgccctgttcgaggtgatgttcagcgaggagtgcatcatggacgtgatcggctgcctggagtacgaccccgccctgagccagcccagaaagcacagagagttcctgaccaagaccgccaagttcaaggaggtgatccccatcagcgaccccgagctgaagcagaagatccaccagacctacagagtgcagtacatccaggacatggtgctgcccacccccagcgtgttcgaggagaacatgctgagcaccctgcacagcttcatcttcttcaacaaggtggagatcgtgggcatgctgcaggaggacgagaagttcctgaccgacctgttcgcccagctgaccgacgaggccaccgacgaggagaagagacaggagctggtgaacttcctgaaggagttctgcgccttcagccagaccctgcagccccagaacagagacgccttcttcaagaccctgagcaacatgggcatcctgcccgccctggaggtgatcctgggcatggacgacacccaggtgagaagcgccgccaccgacatcttcagctacctggtggagtacaaccccagcatggtgagagagttcgtgatgcaggaggcccagcagaacgacgacgacatcctgctgatcaacctgatcatcgagcacatgatctgcgacaccgaccccgagctgggcggcgccgtgcagctgatgggcctgctgagaaccctggtggaccccgagaacatgctggccaccgccaacaagaccgagaagaccgagttcctgggcttcttctacaagcactgcatgcacgtgctgaccgcccccctgctggccaacaccaccgaggacaagcccagcaaggacgacttccagaccgcccagctgctggccctggtgctggagctgctgaccttctgcgtggagcaccacacctaccacatcaagaactacatcatcaacaaggacatcctgagaagagtgctggtgctgatggccagcaagcacgccttcctggccctgtgcgccctgagattcaagagaaagatcatcggcctgaaggacgagttctacaacagatacatcatgaagagcttcctgttcgagcccgtggtgaaggccttcctgaacaacggcagcagatacaacctgatgaacagcgccatcatcgagatgttcgagttcatcagagtggaggacatcaagagcctgaccgcccacgtgatcgagaactactggaaggccctggaggacgtggactacgtgcagaccttcaagggcctgaagctgagattcgagcagcagagagagagacaggacaaccccaagctggacagcatgagaagcatcctgagaaaccacagatacagaagagacgccagaaccctggaggacgaggaggagatgtggttcaacaccgacgaggacgacatggaggacggcgaggccgtggtgagccccagcgacaagaccaagaacgacgacgacatcatggaccccatcagcaagttcatggagagaaagaagctgaaggagagcgaggagaaggaggtgctgctgaagaccaacctgagcggcagacagagccccagcttcaagctgagcctgagcagcggcaccaagaccaacctgaccagccagagcagcaccaccaacctgcccggcagccccggcagccccggcagccccggcagccccggcagccccggcagcgtgcccaagaacaccagccagaccgccgccatcaccaccaagggcggcctggtgggcctggtggactaccccgacgacgacgaggacgacgacgaggacgaggacaaggaggacaccctgcccctgagcaagaaggccaagttcgacagctag

SEQ ID NO: 10175 - DNA, 2382 bp, synthetic construct
  source 1..2382: mol_type = other DNA; note = Synthetic coding sequence
atgagcgagcagggcgacctgaaccaggccatcgccgaggagggcggcaccgagcaggagaccgccacccccgagaacggcatcgtgaagagcgagagcctggacgaggaggagaagctggagctgcagagaagactggaggcccagaaccaggagagaagaaagagcaagagcggcgccggcaagggcaagctgaccagaagcctggccgtgtgcgaggagagcagcgccagacccggcggcgagagcctgcaggaccaggagagcatccacctgcagctgagcagcttcagcagcctgcaggaggaggacaagagcagaaaggacgacagcgagagagagaaggagaaggacaagaacaaggacaagaccagcgagaagcccaagatcagaatgctgagcaaggactgcagccaggagtacaccgacagcaccggcatcgacctgcacgagttcctgatcaacaccctgaagaacaacagcagagacagaatgatcctgctgaagatggagcaggagatcatcgacttcatcgccgacaacaacaaccactacaagaagttcccccagatgagcagctaccagagaatgctggtgcacagagtggccgcctacttcggcctggaccacaacgtggaccagaccggcaagagcgtgatcatcaacaagaccagcagcaccagaatccccgagcagagattctgcgagcacctgaaggacgagaagggcgaggagagccagaagagattcatcctgaagagagacaacagcagcatcgacaaggaggacaaccagagcgtgtgcagccaggagagcctgttcgtggagaacagaggcaacagagacggcagcggcagaaccagcggcagcagacagagcagcagcgagaacgagctgaagtggagcgaccaccagagagcctggagcagcaccgacagcgacagcagcaacagaaacctgaagcccgccatgaccaagaccgccagcttcggcggcatcaccgtgctgaccagaggcgacagcaccagcagcaccagaagcaccggcaagctgagcaaggccggcagcgagagcagcagcagcgccggcagcagcggcagcctgagcagaacccacccccccctgcagagcacccccctggtgagcggcgtggccgccggcagccccggctgcgtgccctaccccgagaacggcatcggcggccaggtggcccccagcagcaccagctacatcctgctgcccctggaggccgccaccggcatcccccccggcagcatcctgctgaacccccacaccggccagcccttcgtgaaccccgacggcacccccgccatctacaacccccccaccagccagcagcccctgagaagcgccatggtgggccagagccagcagcagcccccccagcagcagcccagcccccagccccagcagcaggtgcagcccccccagccccagatggccggccccctggtgacccagagcgtgcagggcctgcaggccagcagccagagcgtgcagtaccccgccgtgagcttccccccccagcacctgctgcccgtgagccccacccagcacttccccatgagagacgacgtggccacccagttcggccagatgaccctgagcagacagagcagcggcgagacccccgagccccccagcggccccgtgtaccccagcagcctgatgccccagcccgcccagcagcccagctacgtgatcgccagcaccggccagcagctgcccaccggcggcttcagcggcagcggcccccccatcagccagcaggtgctgcagcccccccccagcccccagggcttcgtgcagcagcccccccccgcccagatgcccgtgtactactaccccagcggccagtaccccaccagcaccacccagcagtacagacccatggcccccgtgcagtacaacgcccagagaagccagcagatgccccaggccgcccagcaggccggctaccagcccgtgctgagcggccagcagggcttccagggcctgatcggcgtgcagcagcccccccagagccagaacgtgatcaacaaccagcagggcacccccgtgcagagcgtgatggtgagctaccccaccatgagcagctaccaggtgcccatgacccagggcagccagggcctgccccagcagagctaccagcagcccatcatgctgcccaaccaggccggccagggcagcctgcccgccaccggcatgcccgtgtactgcaacgtgaccccccccaccccccagaacaacctgagactgatcggcccccactgccccagcagcaccgtgcccgtgatgagcgccagctgcagaaccaactgcgccagcatgagcaacgccggctggcaggtgaagttctag

SEQ ID NO: 10176 - DNA, 1467 bp, synthetic construct
  source 1..1467: mol_type = other DNA; note = Synthetic coding sequence
atgagattccactggctgcccaccctgagcgagcccttcgacagaaaccaggagctggagacctgcatcagacccctgtggacccccagcggcagcgcctgcgagaccgagcacaacaagagcatggacatgggcaaccagcaccccagcatcagcagactgcaggagatccagaaggaggtgaagagcgtggagcagcaggtgatcggcttcagcggcctgagcgacgacaagaactacaagaagctggagagaatcctgaccaagcagctgttcgagatcgacagcgtggacaccgagggcaagggcgacatccagcaggccagaaagagagccgcccaggagaccgagagactgctgaaggagctggagcagaacgccaaccacccccacagaatcgagatccagaacatcttcgaggaggcccagagcctggtgagagagaagatcgtgcccttctacaacggcggcaactgcgtgaccgacgagttcgaggagggcatccaggacatcatcctgagactgacccacgtgaagaccggcggcaagatcagcctgagaaaggccagataccacaccctgaccaagatctgcgccgtgcaggagatcatcgaggactgcatgaagaagcagcccagcctgcccctgagcgaggacgcccaccccagcgtggccaagatcaacttcgtgatgtgcgaggtgaacaaggccagaggcgtgctgatcgccctgctgatgggcgtgaacaacaacgagacctgcagacacctgagctgcgtgctgagcggcctgatcgccgacctggacgccctggacgtgtgcggcagaaccgagatcagaaactacagaagagaggtggtggaggacatcaacaagctgctgaagtacctggacctggaggaggaggccgacaccaccaaggccttcgacctgagacagaaccacagcatcctgaagatcgagaaggtgctgaagagaatgagagagatcaagaacgagctgctgcaggcccagaaccccagcgagctgtacctgagcagcaagaccgagctgcagggcctgatcggccagctggacgaggtgagcctggagaagaacccctgcatcagagaggccagaagaagagccgtgatcgaggtgcagaccctgatcacctacatcgacctgaaggaggccctggagaagagaaagctgttcgcctgcgaggagcaccccagccacaaggccgtgtggaacgtgctgggcaacctgagcgagatccagggcgaggtgctgagcttcgacggcaacagaaccgacaagaactacatcagactggaggagctgctgaccaagcagctgctggccctggacgccgtggacccccagggcgaggagaagtgcaaggccgccagaaagcaggccgtgagactggcccagaacatcctgagctacctggacctgaagagcgacgagtgggagtactag

SEQ ID NO: 10177 - DNA, 978 bp, synthetic construct
  source 1..978: mol_type = other DNA; note = Synthetic coding sequence
atgggcaagatggtgagcgtgatcaacaccgtggacaccagccacgaggacatgatccacgacgcccagatggactactacggcaccagactggccacctgcagcagcgacagaagcgtgaagatcttcgacgtgagaaacggcggccagatcctgatcgccgacctgagaggccacgagggccccgtgtggcaggtggcctgggcccaccccatgtacggcaacatcctggccagctgcagctacgacagaaaggtgatcatctggagagaggagaacggcacctgggagaagagccacgagcacgccggccacgacagcagcgtgaacagcgtgtgctgggccccccacgactacggcctgatcctggcctgcggcagcagcgacggcgccatcagcctgctgacctacaccggcgagggccagtgggaggtgaagaagatcaacaacgcccacaccatcggctgcaacgccgtgagctgggcccccgccgtggtgcccggcagcctgatcgaccaccccagcggccagaagcccaactacatcaagagattcgccagcggcggctgcgacaacctgatcaagctgtggaaggaggaggaggacggccagtggaaggaggagcagaagctggaggcccacagcgactgggtgagagacgtggcctgggcccccagcatcggcctgcccaccagcaccatcgccagctgcagccaggacggcagagtgttcatctggacctgcgacgacgccagcagcaacacctggagccccaagctgctgcacaagttcaacgacgtggtgtggcacgtgagctggagcatcaccgccaacatcctggccgtgagcggcggcgacaacaaggtgaccctgtggaaggagagcgtggacggccagtgggtgtgcatcagcgacgtgaacaagggccagggcagcgtgagcgccagcgtgaccgagggccagcagaacgagcagtag

SEQ ID NO: 10178 - DNA, 846 bp, synthetic construct
  source 1..846: mol_type = other DNA; note = Synthetic coding sequence
atgctgttcatcttccccctgagcctgccctggagacccagctgctggaaggagagctgcagcaccggccagagacaggccggcagaagcagagaggacagcgtgacccccccccccagcagcccctggcccaccccccccgccggcgccatgagcaccaagcaggaggccagaagagacgagggcgaggccagaaccagaggccaggaggcccagctgagagacagagcccacctgagccagcagagaagactgaagcaggccacccagttcctgcacaaggacagcgccgacctgctgcccctggacagcctgaagagactgggcaccagcaaggacctgcagcccagaagcgtgatccagagaagactggtggagggcaaccccaactggctgcagggcgagccccccagaatgcaggacctgatccacggccaggagagcagaagaaagaccagcagaaccgagatccccgccctgctggtgaactgcaagtgccaggaccagctgctgagagtggccgtggacaccggcacccagtacaacagaatcagcgccggctgcctgagcagactgggcctggagaagagagtgctgaaggccagcgccggcgacctggcccccggcccccccacccaggtggagcagctggagctgcagctgggccaggagaccgtggtgtgcagcgcccaggtggtggacgccgagagccccgagttctgcctgggcctgcagaccctgctgagcctgaagtgctgcatcgacctggagcacggcgtgctgagactgaaggcccccttcagcgagctgcccttcctgcccctgtaccaggagcccggccagtag

SEQ ID NO: 10179 - DNA, 1533 bp, synthetic construct
  source 1..1533: mol_type = other DNA; note = Synthetic coding sequence
accggcggcggcgtggcccccgccggccaggtgagaaccgccacctgggccagaagagccagaccctacagaaagatggccgccagaaccggcaccgagctggccagcgccgccagcaccaccgcccccggcagcagcaagagaagaaagagacacccctggcacaccgtgagcagaagacccggcagaacccccaagtggagactgcccagaatcagcgccagagccccctacagactgagaagactgagaagacacacctactggccccccagaagacccgtggccgccagcagatgctggcccgtgggcgccacccccctgggcagcgtgggcggcagaaccggcaagatggacgccgccaccctgacctacgacaccctgagattcgccgagttcgaggacttccccgagaccagcgagcccgtgtggatcctgggcagaaagtacagcatcttcaccgagaaggacgagatcctgagcgacgtggccagcagactgtggttcacctacagaaagaacttccccgccatcggcggcaccggccccaccagcgacaccggctggggctgcatgctgagatgcggccagatgatcttcgcccaggccctggtgtgcagacacctgggcagagactggagatggacccagagaaagagacagcccgacagctacttcagcgtgctgaacgccttcatcgacagaaaggacagctactacagcatccaccagatcgcccagatgggcgtgggcgagggcaagagcatcggccagtggtacggccccaacaccgtggcccaggtgctgaagaagctggccgtgttcgacacctggagcagcctggccgtgcacatcgccatggacaacaccgtggtgatggaggagatcagaagactgtgcagaaccagcgtgccctgcgccggcgccaccgccttccccgccgacagcgacagacactgcaacggcttccccgccggcgccgaggtgaccaacagacccagcccctggagacccctggtgctgctgatccccctgagactgggcctgaccgacatcaacgaggcctacgtggagaccctgaagcactgcttcatgatgccccagagcctgggcgtgatcggcggcaagcccaacagcgcccactacttcatcggctacgtgggcgaggagctgatctacctggacccccacaccacccagcccgccgtggagcccaccgacggctgcttcatccccgacgagagcttccactgccagcaccccccctgcagaatgagcatcgccgagctggaccccagcatcgccgtgggcttcttctgcaagaccgaggacgacttcaacgactggtgccagcaggtgaagaagctgagcctgctgggcggcgccctgcccatgttcgagctggtggagctgcagcccagccacctggcctgccccgacgtgctgaacctgagcctggacagcagcgacgtggagagactggagagattcttcgacagcgaggacgaggacttcgagatcctgagcctgtag

SEQ ID NO: 10180 - DNA, 552 bp, synthetic construct
  source 1..552: mol_type = other DNA; note = Synthetic coding sequence
atggccagcaacaagaccaccctgcagaagatgggcaagaagcagaacggcaagagcaagaaggtggaggaggccgagcccgaggagttcgtggtggagaaggtgctggacagaagagtggtgaacggcaaggtggagtacttcctgaagtggaagggcttcaccgacgccgacaacacctgggagcccgaggagaacctggactgccccgagctgatcgaggccttcctgaacagccagaaggccggcaaggagaaggacggcaccaagagaaagagcctgagcgacagcgagagcgacgacagcaagagcaagaagaagagagacgccgccgacaagcccagaggcttcgccagaggcctggaccccgagagaatcatcggcgccaccgacagcagcggcgagctgatgttcctgatgaagtggaaggacagcgacgaggccgacctggtgctggccaaggaggccaacatgaagtgcccccagatcgtgatcgccttctacgaggagagactgacctggcacagctgccccgaggacgaggcccagtag

SEQ ID NO: 10181 - DNA, 1464 bp, synthetic construct
  source 1..1464: mol_type = other DNA; note = Synthetic coding sequence
atggagagaagcggccagagagtgaccacctgggactgcgaccagggcaagcacagcgacagcgactacagagaggacggcatggacctgggcagcgacgccggcagcagcagcagcagcagcagagccagcagccagagcaacagcaccaaggtgaccccctgcagcgagtgcaagagcagcagcagccccggcggcagcctggacctggtgagcgccctggaggactacgaggagcccttccccgtgtaccagaagaaggtgatcgacgagtgggcccccgaggaggacggcgaggaggaggaggaggaggacgagagagaccagagaggctacagagacgacagaagccccgccagagagcccggcgacgtgagcgccagaaccagaagcggcggcggcggcggcagaagcgccaccaccgccatgcccccccccgtgcccaacggcaacctgcaccagcacgacccccaggacctgagacacaacggcaacgtggtggtggccggcagacccagctgcagcagaggccccagaagagccatccagaagccccagcccgccggcggcagaagaagcggcagaggccccgccgccggcggcctgtgcctgcagccccccgacggcggcacctgcgtgcccgaggagccccccgtgccccccatggactgggaggccctggagaagcacctggccggcctgcagttcagagagcaggaggtgagaaaccagggccaggccagaaccaacagcaccagcgcccagaagaacgagagagagagcatcagacagaagctggccctgggcagcttcttcgacgacggccccggcatctacaccagctgcagcaagagcggcaagcccagcctgagcagcagactgcagagcggcatgaacctgcagatctgcttcgtgaacgacagcggcagcgacaaggacagcgacgccgacgacagcaagaccgagaccagcctggacacccccctgagccccatgagcaagcagagcagcagctacagcgacagagacaccaccgaggaggagagcgagagcctggacgacatggacttcctgaccagacagaagaagctgcaggccgaggccaagatggccctggccatggccaagcccatggccaagatgcaggtggaggtggagaagcagaacagaaagaagagccccgtggccgacctgctgccccacatgccccacatcagcgagtgcctgatgaagagaagcctgaagcccaccgacctgagagacatgaccatcggccagctgcaggtgatcgtgaacgacctgcacagccagatcgagagcctgaacgaggagctggtgcagctgctgctgatcagagacgagctgcacaccgagcaggacgccatgctggtggacatcgaggacctgaccagacacgccgagagccagcagaagcacatggccgagaagatgcccgccaagtag

SEQ ID NO: 10182 - DNA, 927 bp, synthetic construct
  source 1..927: mol_type = other DNA; note = Synthetic coding sequence
atgaagagagcccaccccgagtacagcagcagcgacagcgagctggacgagaccatcgaggtggagaaggagagcgccgacgagaacggcaacctgagcagcgccctgggcagcatgagccccaccaccagcagccagatcctggccagaaagagaagaagaggcatcatcgagaagagaagaagagacagaatcaacaacagcctgagcgagctgagaagactggtgcccagcgccttcgagaagcaggtgatggagcagggcagcgccaagctggagaaggccgagatcctgcagatgaccgtggaccacctgaagatgctgcacaccgccggcggcaagggctacttcgacgcccacgccctggccatggactacagaagcctgggcttcagagagtgcctggccgaggtggccagatacctgagcatcatcgagggcctggacgccagcgaccccctgagagtgagactggtgagccacctgaacaactacgccagccagagagaggccgccagcggcgcccacgccggcctgggccacatcccctggggcaccgtgttcggccaccacccccacatcgcccaccccctgctgctgccccagaacggccacggcaacgccggcaccaccgccagccccaccgagccccaccaccagggcagactgggcagcgcccaccccgaggcccccgccctgagagccccccccagcggcagcctgggccccgtgctgcccgtggtgaccagcgccagcaagctgagcccccccctgctgagcagcgtggccagcctgagcgccttccccttcagcttcggcagcttccacctgctgagccccaacgccctgagccccagcgcccccacccaggccgccaacctgggcaagccctacagaccctggggcaccgagatcggcgccttctag

SEQ ID NO: 10183 - DNA, 1338 bp, synthetic construct
  source 1..1338: mol_type = other DNA; note = Synthetic coding sequence
atgagcgtgacctacgacgacagcgtgggcgtggaggtgagcagcgacagcttctgggaggtgggcaactacaagagaaccgtgaagagaatcgacgacggccacagactgtgcagcgacctgatgaactgcctgcacgagagagccagaatcgagaaggcctacgcccagcagctgaccgagtgggccagaagatggagacagctggtggagaagggcccccagtacggcaccgtggagaaggcctggatggccttcatgagcgaggccgagagagtgagcgagctgcacctggaggtgaaggccagcctgatgaacgacgacttcgagaagatcaagaactggcagaaggaggccttccacaagcagatgatgggcggcttcaaggagaccaaggaggccgaggacggcttcagaaaggcccagaagccctgggccaagaagctgaaggaggtggaggccgccaagaaggcccaccacgccgcctgcaaggaggagaagctggccatcagcagagaggccaacagcaaggccgaccccagcctgaaccccgagcagctgaagaagctgcaggacaagatcgagaagtgcaagcaggacgtgctgaagaccaaggagaagtacgagaagagcctgaaggagctggaccagggcaccccccagtacatggagaacatggagcaggtgttcgagcagtgccagcagttcgaggagaagagactgagattcttcagagaggtgctgctggaggtgcagaagcacctggacctgagcaacgtggccggctacaaggccatctaccacgacctggagcagagcatcagagccgccgacgccgtggaggacctgagatggttcagagccaaccacggccccggcatggccatgaactggccccagttcgaggagtggagcgccgacctgaacagaaccctgagcagaagagagaagaagaaggccaccgacggcgtgaccctgaccggcatcaaccagaccggcgaccagagcctgcccagcaagcccagcagcgtgagcagctacgagaagacccagagctaccccaccgactggagcgacgacgagagcaacaaccccttcagcagcaccgacgccaacggcgacagcaaccccttcgacgacgacgccaccagcggcaccgaggtgagagtgagagccctgtacgactacgagggccaggagcacgacgagctgagcttcaaggccggcgacgagctgaccaagatggaggacgaggacgagcagggctggtgcaagggcagactggacaacggccaggtgggcctgtaccccgccaactacgtggaggccatccagtag

SEQ ID NO: 10184 - DNA, 1248 bp, synthetic construct
  source 1..1248: mol_type = other DNA; note = Synthetic coding sequence
atgatgctgggccccgagggcggcgagggcttcgtggtgaagctgagaggcctgccctggagctgcagcgtggaggacgtgcagaacttcctgagcgactgcaccatccacgacggcgccgccggcgtgcacttcatctacaccagagagggcagacagagcggcgaggccttcgtggagctgggcagcgaggacgacgtgaagatggccctgaagaaggacagagagagcatgggccacagatacatcgaggtgttcaagagccacagaaccgagatggactgggtgctgaagcacagcggccccaacagcgccgacagcgccaacgacggcttcgtgagactgagaggcctgcccttcggctgcaccaaggaggagatcgtgcagttcttcagcggcctggagatcgtgcccaacggcatcaccctgcccgtggaccccgagggcaagatcaccggcgaggccttcgtgcagttcgccagccaggagctggccgagaaggccctgggcaagcacaaggagagaatcggccacagatacatcgaggtgttcaagagcagccaggaggaggtgagaagctacagcgacccccccctgaagttcatgagcgtgcagagacccggcccctacgacagacccggcaccgccagaagatacatcggcatcgtgaagcaggccggcctggagagaatgagacccggcgcctacagcaccggctacggcggctacgaggagtacagcggcctgagcgacggctacggcttcaccaccgacctgttcggcagagacctgagctactgcctgagcggcatgtacgaccacagatacggcgacagcgagttcaccgtgcagagcaccaccggccactgcgtgcacatgagaggcctgccctacaaggccaccgagaacgacatctacaacttcttcagccccctgaaccccgtgagagtgcacatcgagatcggccccgacggcagagtgaccggcgaggccgacgtggagttcgccacccacgaggaggccgtggccgccatgagcaaggacagagccaacatgcagcacagatacatcgagctgttcctgaacagcaccaccggcgccagcaacggcgcctacagcagccaggtgatgcagggcatgggcgtgagcgccgcccaggccacctacagcggcctggagagccagagcgtgagcggctgctacggcgccggctacagcggccagaacagcatgggcggctacgactag

SEQ ID NO: 10185 - DNA, 1770 bp, synthetic construct
  source 1..1770: mol_type = other DNA; note = Synthetic coding sequence
atgagcgtgagcgtgcacgagaccagaaagagcagaagcagcaccggcagcatgaacgtgaccctgttccacaaggccagccaccccgactgcgtgctggcccacctgaacaccctgagaaagcactgcatgttcaccgacgtgaccctgtgggccggcgacagagccttcccctgccacagagccgtgctggccgccagcagcagatacttcgaggccatgttcagccacggcctgagagagagcagagacgacaccgtgaacttccaggacaacctgcaccccgaggtgctggagctgctgctggacttcgcctacagcagcagaatcgccatcaacgaggagaacgccgagagcctgctggaggccggcgacatgctgcagttccacgacgtgagagacgccgccgccgagttcctggagaagaacctgttccccagcaactgcctgggcatgatgctgctgagcgacgcccaccagtgcagaagactgtacgagttcagctggagaatgtgcctggtgcacttcgagaccgtgagacagagcgaggacttcaacagcctgagcaaggacaccctgctggacctgatcagcagcgacgagctggagaccgaggacgagagagtggtgttcgaggccatcctgcagtgggtgaagcacgacctggagcccagaaaggtgcacctgcccgagctgctgagaagcgtgagactggccctgctgcccagcgactgcctgcaggaggccgtgagcagcgaggccctgctgatggccgacgagagaaccaagctgatcatggacgaggccctgagatgcaagaccagaatcctgcagaacgacggcgtggtgaccagcccctgcgccagacccagaaaggccggccacaccctgctgatcctgggcggccagaccttcatgtgcgacaagatctaccaggtggaccacaaggccaaggagatcatccccaaggccgacctgcccagccccagaaaggagttcagcgccagcgccatcggctgcaaggtgtacgtgaccggcggcagaggcagcgagaacggcgtgagcaaggacgtgtgggtgtacgacaccgtgcacgaggagtggagcaaggccgcccccatgctgatcgccagattcggccacggcagcgccgagctggagaactgcctgtacgtggtgggcggccacaccagcctggccggcgtgttccccgccagccccagcgtgagcctgaagcaggtggagaagtacgaccccggcgccaacaagtggatgatggtggcccccctgagagacggcgtgagcaacgccgccgtggtgagcgccaagctgaagctgttcgtgttcggcggcaccagcatccacagagacatggtgagcaaggtgcagtgctacgaccccagcgagaacagatggaccatcaaggccgagtgcccccagccctggagatacaccgccgccgccgtgctgggcagccagatcttcatcatgggcggcgacaccgagttcaccgccgccagcgcctacagattcgactgcgagaccaaccagtggaccagaatcggcgacatgaccgccaagagaatgagctgccacgccctggccagcggcaacaagctgtacgtggtgggcggctacttcggcacccagagatgcaagaccctggactgctacgaccccaccagcgacacctggaactgcatcaccaccgtgccctacagcctgatccccaccgccttcgtgagcacctggaagcacctgcccgcctag

SEQ ID NO: 10186 - DNA, 1311 bp, synthetic construct
  source 1..1311: mol_type = other DNA; note = Synthetic coding sequence
atgatgggcgaggccgccgtggccgccggcccctgccccctgagagaggacagcttcaccagattcagcagccagagcaacgtgtacggcctggccggcggcgccggcggcagaggcgagctgctggccgccaccctgaagggcaaggtgctgggcttcagataccaggacctgagacagaagatcagacccgtggccaaggagctgcagttcaactacatccccgtggacgccgagatcgtgagcatcgacaccttcaacaagagcccccccaagagaggcctggtggtgggcatcaccttcatcaaggacagcggcgacaagggcagccccttcctgaacatctactgcgactacgagcccggcagcgagtacaacctggacagcatcgcccagagctgcctgaacctggagctgcagttcacccccttccagctgtgccacgccgaggtgcaggtgggcgaccagctggagaccgtgttcctgctgagcggcaacgaccccgccatccacctgtacaaggagaacgagggcctgcaccagttcgaggagcagcccgtggagaacctgttccccgagctgaccaacctgaccagcagcgtgctgtggctggacgtgcacaacttccccggcaccagcagaagactgagcgccctgggctgccagagcggctacgtgagagtggcccacgtggaccagagaagcagagaggtgctgcagatgtggagcgtgctgcaggacggccccatcagcagagtgatcgtgttcagcctgagcgccgccaaggagaccaaggacagacccctgcaggacgagtacagcgtgctggtggccagcatgctggagcccgccgtggtgtacagagacctgctgaacagaggcctggaggaccagctgctgctgcccggcagcgaccagttcgacagcgtgctgtgcagcctggtgaccgacgtggacctggacggcagacccgaggtgctggtggccacctacggccaggagctgctgtgctacaagtacagaggccccgagagcggcctgcccgaggcccagcacggcttccacctgctgtggcagagaagcttcagcagccccctgctggccatggcccacgtggacctgaccggcgacggcctgcaggagctggccgtggtgagcctgaagggcgtgcacatcctgcagcacagcctgatccaggccagcgagctggtgctgaccagactgagacaccaggtggagcagagaagaagaagactgcagggcctggaggacggcgccggcgccggccccgccgagaacgccgccagctag

SEQ ID NO: 10187 - DNA, 642 bp, synthetic construct
  source 1..642: mol_type = other DNA; note = Synthetic coding sequence
atgctgctgcccttcatcagaaccctgcccctgctgtgctacaaccacctgctggtgagccccgacagcgccaccctgagccccccctacagcctggagaagatgaccgacctggtggccgtgtgggacgtggccctgagcgacggcgtgcacaagatcgagttcgagcacggcaccaccagcggcaagagagtggtgtacgtggacggcaaggaggagatcagaaaggagtggatgttcaagctggtgggcaaggagaccttctacgtgggcgccgccaagaccaaggccaccatcaacatcgacgccatcagcggcttcgcctacgagtacaccctggagatcaacggcaagagcctgaagaagtacatggaggacagaagcaagaccaccaacacctgggtgctgcacatggacggcgagaacttcagaatcgtgctggagaaggacgccatggacgtgtggtgcaacggcaagaagctggagaccgccggcgagttcgtggacgacggcaccgagacccacttcagcatcggcaaccacgactgctacatcaaggccgtgagcagcggcaagagaaaggagggcatcatccacaccctgatcgtggacaacagagagatccccgagatcgccagctag

SEQ ID NO: 10188 - DNA, 663 bp, synthetic construct
  source 1..663: mol_type = other DNA; note = Synthetic coding sequence
atgaccagcggcgaggtgaagaccagcctgaagaacgcctacagcagcgccaagagactgagccccaagatggaggaggagggcgaggaggaggactactgcacccccggcgccttcgagctggagagactgttctggaagggcagcccccagtacacccacgtgaacgaggtgtggcccaagctgtacatcggcgacgaggccaccgccctggacagatacagactgcagaaggccggcttcacccacgtgctgaacgccgcccacggcagatggaacgtggacaccggccccgactactacagagacatggacatccagtaccacggcgtggaggccgacgacctgcccaccttcgacctgagcgtgttcttctaccccgccgccgccttcatcgacagagccctgagcgacgaccacagcaagatcctggtgcactgcgtgatgggcagaagcagaagcgccaccctggtgctggcctacctgatgatccacaaggacatgaccctggtggacgccatccagcaggtggccaagaacagatgcgtgctgcccaacagaggcttcctgaagcagctgagagagctggacaagcagctggtgcagcagagaagaagaagccagagacaggacggcgaggaggaggacggcagagagctgtag

SEQ ID NO: 10189 - DNA, 1845 bp, synthetic construct
  source 1..1845: mol_type = other DNA; note = Synthetic coding sequence
atgagccccgccgacagatgcagaagcgccaacaccatcgagcccgccaccaccagcagcctggccctgttcctgctgctgcagagagaccagagcagcagaaccagaggcctgcccgaggagaaggaggaggtgaccatggacaccagcgagaacagacccgagaacgacgtgcccgagccccccatgcccatcgccgaccaggtgagcaacgacgacagacccgagggcagcgtggaggacgaggagaagaaggagagcagcctgcccaagagcttcaagagaaagatcagcgtggtgagcgccaccaagggcgtgcccgccggcaacagcgacaccgagggcggccagcccggcagaaagagaagatggggcgccagcaccgccaccacccagaagaagcccagcatcagcatcaccaccgagagcctgaagagcctgatccccgacatcaagcccctggccggccaggaggccgtggtggacctgcacgccgacgacagcagaatcagcgaggacgagaccgagagaaacggcgacgacggcacccacgacaagggcctgaagatctgcagaaccgtgacccaggtggtgcccgccgagggccaggagaacggccagagagaggaggaggaggaggagaaggagcccgaggccgagccccccgtgcccccccaggtgagcgtggaggtggccctgcccccccccgccgagcacgaggtgaagaaggtgaccctgggcgacaccctgaccagaagaagcatcagccagcagaagagcggcgtgagcatcaccatcgacgaccccgtgagaaccgcccaggtgcccagcccccccagaggcaagatcagcaacatcgtgcacatcagcaacctggtgagacccttcaccctgggccagctgaaggagctgctgggcagaaccggcaccctggtggaggaggccttctggatcgacaagatcaagagccactgcttcgtgacctacagcaccgtggaggaggccgtggccaccagaaccgccctgcacggcgtgaagtggccccagagcaaccccaagttcctgtgcgccgactacgccgagcaggacgagctggactaccacagaggcctgctggtggacagacccagcgagaccaagaccgaggagcagggcatccccagacccctgcacccccccccccccccccccgtgcagcccccccagcaccccagagccgagcagagagagcaggagagagccgtgagagagcagtgggccgagagagagagagagatggagagaagagagagaaccagaagcgagagagagtgggacagagacaaggtgagagagggccccagaagcagaagcagaagcagagacagaagaagaaaggagagagccaagagcaaggagaagaagagcgagaagaaggagaaggcccaggaggagccccccgccaagctgctggacgacctgttcagaaagaccaaggccgccccctgcatctactggctgcccctgaccgacagccagatcgtgcagaaggaggccgagagagccgagagagccaaggagagagagaagagaagaaaggagcaggaggaggaggagcagaaggagagagagaaggaggccgagagagagagaaacagacagctggagagagagaagagaagagagcacagcagagagagagacagagagagagagagagagagagagagagacagaggcgacagagacagagacagagagagagacagagagagaggcagagagagagacagaagagacaccaagagacacagcagaagcagaagcagaagcacccccgtgagagacagaggcggcagaagatag

SEQ ID NO: 10190 - DNA, 1203 bp, synthetic construct
  source 1..1203: mol_type = other DNA; note = Synthetic coding sequence
atgaagaacgagcccctgacccccggctaccacggcttccccgccagagacagccagggcaaccaggagcccaccaccacccccgacgccatggtgcagcccttcaccaccatccccttccccccccccccccagaacggcatccccaccgagtacggcgtgccccacacccaggactacgccggccagaccggcgagcacaacctgaccctgtacggcagcacccaggcccacggcgagcagagcagcaacagccccagcacccagaacggcagcctgaccaccgagggcggcgcccagaccgacggccagcagagccagacccagagcagcgagaacagcgagagcaagagcacccccaagagactgcacgtgagcaacatccccttcagattcagagaccccgacctgagacagatgttcggccagttcggcaagatcctggacgtggagatcatcttcaacgagagaggcagcaagggcttcggcttcgtgaccttcgagaacagcgccgacgccgacagagccagagagaagctgcacggcaccgtggtggagggcagaaagatcgaggtgaacaacgccaccgccagagtgatgaccaacaagaagatggtgaccccctacgccaacggctggaagctgagccccgtggtgggcgccgtgtacggccccgagctgtacgccgccagcagcttccaggccgacgtgagcctgggcaacgacgccgccgtgcccctgagcggcagaggcggcatcaacacctacatccccctgatcatccccggcttcccctaccccaccgccgccaccaccgccgccgccttcagaggcgcccacctgagaggcagaggcagaaccgtgtacggcgccgtgagagccgtgccccccaccgccatccccgcctaccccggcgtggtgtaccaggacggcttctacggcgccgacctgtacatcgagagcgccaactgcttcagaagcaacagagtggacatgcagcccaccgacatgcacagcctgctgctgcagccccagccccccctgctgcagcccctgcagcccctgaccgtgaccgtgatggccggctgcacccagcccacccccaccatgcccctgcccctgcccctggccatggagctggccctgtggagagtgtacaccgaggtggccaccgccgacctgccccccaccgaggtgacctag

SEQ ID NO: 10191 - DNA, 1545 bp, synthetic construct
  source 1..1545: mol_type = other DNA; note = Synthetic coding sequence
atggacgagggcatggagatcagcagcgagggcaacagcctgatcaaggccgtgcaccagagcagactgagactgaccagactgctgctggagggcggcgcctacatcaacgagagcaacgacagaggcgagacccccctgatgatcgcctgcaagaccaagcacgtggaccaccagagcgtgagcaaggccaagatggtgaagtacctgctggagaacaacgccgaccccaacatccaggacaagagcggcaagaccgccctgatgcacgcctgcctggagaaggccggccccgaggtggtgagcctgctgctgaagagcggcgccgacctgagcctgcaggaccacagcagctacagcgccctggtgtacgccatcaacagcgaggacaccgagaccctgaaggtgctgctgagcgcctgcaaggccaagggcaaggaggtgatcatcatcaccaccgccaagctgccctgcggcaagcacaccaccaagcagtacctgaacatgccccccgtggacatcgacggctgccacagccccgccacctgcaccacccccagcgagatcgacatcaagaccgccagcagccccctgagccacagcagcgagaccgagctgaccctgttcggcttcaaggacctggagctggccggcagcaacgacgacacctgggaccccggcagccccgtgagaaagcccgccctggcccccaagggccccaagctgccccacgcccccccctgggtgaagagcccccccctgctgatgcaccagaacagagtggccagcctgcaggaggagctgcaggacatcacccccgaggaggagctgagctacaagaccaacggcctggccctgagcaagagattcatcaccagacaccagagcatcgacgtgaaggacaccgcccacctgctgagagccttcgaccaggccagcagcagaaagatgagctacgacgagatcaactgccagagctacctgagcgagggcaaccagcagtgcatcgaggtgcccgtggaccaggaccccgacagcaaccagaccatcttcgccagcaccctgagaagcatcgtgcagaagagaaacctgggcgccaaccactacagcagcgacagccagctgagcgccggcctgaccccccccaccagcgaggacggcaaggccctgatcggcaagaagaagatcctgagccccagccccagccagctgagcgagagcaaggagctgctggagaacatcccccccggccccctgagcagaagaaaccacgccgtgctggagagaagaggcagcggcgccttccccctggaccacagcgtgacccagaccagacagggcttcctgccccccctgaacgtgaacagccacccccccatcagcgacatcaacgtgaacaacaagatctgcagcctgctgagctgcggccagaaggtgctgatgcccaccgtgcccatcttccccaaggagttcaagagcaagaagatgctgctgagaagacagagcctgcagaccgagcagatcaagcagctggtgaacttctag

SEQ ID NO: 10192 - DNA, 1674 bp, synthetic construct
  source 1..1674: mol_type = other DNA; note = Synthetic coding sequence
atggaccagagcagagtgctgctgtgggtgaaggccgagcccttcatcgtgggcgccctgcaggtgcccccccccagcaagttcagcctgcactacctgagaaagatcagcacctacgtgcagatcagagccaccgagggcgcctaccccagactgtactggagcacctggagacacatcgcctgcggcaagctgcagctggccaaggacctggcctggctgtacttcgagatcttcgacagcctgagcatgaagacccccgaggagagactggagtggagcgaggtgctgagcaactgcatgagcgaggaggaggtggagaagcagagaaaccagctgagcgtggacaccctgcagttcctgctgttcctgtacatccagcagctgaacaaggtgagcctgagaaccagcctgatcggcgaggagtggcccagccccagaaacaagagccagagccccgacctgaccgagaagagcaactgccacaacaagaactggaacgactacagccaccaggccttcgtgtacgaccacctgagcgacctgctggagctgctgctggaccccaagcagctgaccgccagcttccacagcacccacagcagcctggtgagcagagaggccgtggtggccctgagcttcctgatcgagggcaccatcagcagagccagaaagatctaccccctgcacgagctggccctgtggcagcccctgcacgccgacagcggcttcagcaagatcagcaagaccttcagcttctacaagctggagacctggctgagaagctgcctgaccggcaaccccttcggcaccagcgcctgcctgaagagcggcaagaagctggcctgggcccaccaggtggagggcaccaccaagagagccaagatcgcctgcaacacccacgtggcccccagaatgcacagactggtggtgatgagccaggtgtacaagcagaccctggccaagagcagcgacaccctggccggcgcccacgtgaagatccacagatgcaacgagagcttcatctacctgctgagccccctgagaagcgtgaccatcgagaagtgcagaaacagcatcttcgtgctgggccccgtgggcaccaccctgcacctgcacagctgcgacaacgtgaaggtgatcgccgtgtgccacagactgagcatcagcagcaccaccggctgcatcttccacgtgctgacccccaccagacccctgatcctgagcggcaaccagaccgtgaccttcgcccccttccacacccactaccccatgctggaggaccacatggccagaaccggcctggccaccgtgcccaactactgggacaaccccatggtggtgtgcagagagaacagcgacaccagagtgttccagctgctgcccccctgcgagttctacgtgttcatcatccccttcgagatggagggcgacaccaccgagatccccggcggcctgcccagcgtgtaccagaaggccctgggccagagagagcagaagatccagatctggcagaagaccgtgaaggaggcccacctgaccaaggaccagagaaagcagttccaggtgctggtggagaacaagttctacgagtggctgatcaacaccggccacagacagcagctggacagcctggtgccccccgccgccggcagcaagcaggccgccggctag

SEQ ID NO: 10193 - DNA, 648 bp, synthetic construct
  source 1..648: mol_type = other DNA; note = Synthetic coding sequence
atggtgttcagaagattcgtggaggtgggcagagtggcctacgtgagcttcggcccccacgccggcaagctggtggccatcgtggacgtgatcgaccagaacagagccctggtggacggcccctgcacccaggtgagaagacaggccatgcccttcaagtgcatgcagctgaccgacttcatcctgaagttcccccacagcgcccaccagaagtacgtgagacaggcctggcagaaggccgacatcaacaccaagtgggccgccaccagatgggccaagaagatcgaggccagagagagaaaggccaagatgaccgacttcgacagattcaaggtgatgaaggccaagaagatgagaaacagaatcatcaagaacgaggtgaagaagctgcagaaggccgccctgctgaaggccagccccaagaaggcccccggcaccaagggcaccgccgccgccgccgccgccgccgccgccgccaaggtgcccgccaagaagatcaccgccgccagcaagaaggcccccgcccagaaggtgcccgcccagaaggccaccggccagaaggccgcccccgcccccaaggcccagaagggccagaaggcccccgcccagaaggcccccgcccccaaggccagcggcaagaaggcctag

SEQ ID NO: 10194 - DNA, 888 bp, synthetic construct
  source 1..888: mol_type = other DNA; note = Synthetic coding sequence
atggagctgatccaggacaccagcagaccccccctggagtacgtgaagggcgtgcccctgatcaagtacttcgccgaggccctgggccccctgcagagcttccaggccagacccgacgacctgctgatcaacacctaccccaagagcggcaccacctgggtgagccagatcctggacatgatctaccagggcggcgacctggagaagtgcaacagagcccccatctacgtgagagtgcccttcctggaggtgaacgaccccggcgagcccagcggcctggagaccctgaaggacacccccccccccagactgatcaagagccacctgcccctggccctgctgccccagaccctgctggaccagaaggtgaaggtggtgtacgtggccagaaaccccaaggacgtggccgtgagctactaccacttccacagaatggagaaggcccaccccgagcccggcacctgggacagcttcctggagaagttcatggccggcgaggtgagctacggcagctggtaccagcacgtgcaggagtggtgggagctgagcagaacccaccccgtgctgtacctgttctacgaggacatgaaggagaaccccaagagagagatccagaagatcctggagttcgtgggcagaagcctgcccgaggagaccatggacttcatggtgcagcacaccagcttcaaggagatgaagaagaaccccatgaccaactacaccaccgtgccccaggagctgatggaccacagcatcagccccttcatgagaaagggcatggccggcgactggaagaccaccttcaccgtggcccagaacgagagattcgacgccgactacgccgagaagatggccggctgcagcctgagcttcagaagcgagctgtag

SEQ ID NO: 10195 - DNA, 1368 bp, synthetic construct
  source 1..1368: mol_type = other DNA; note = Synthetic coding sequence
atgagcagcctgggcgccagcttcgtgcagatcaagttcgacgacctgcagttcttcgagaactgcggcggcggcagcttcggcagcgtgtacagagccaagtggatcagccaggacaaggaggtggccgtgaagaagctgctgaagatcgagaaggaggccgagatcctgagcgtgctgagccacagaaacatcatccagttctacggcgtgatcctggagccccccaactacggcatcgtgaccgagtacgccagcctgggcagcctgtacgactacatcaacagcaacagaagcgaggagatggacatggaccacatcatgacctgggccaccgacgtggccaagggcatgcactacctgcacatggaggcccccgtgaaggtgatccacagagacctgaagagcagaaacgtggtgatcgccgccgacggcgtgctgaagatctgcgacttcggcgccagcagattccacaaccacaccacccacatgagcctggtgggcaccttcccctggatggcccccgaggtgatccagagcctgcccgtgagcgagacctgcgacacctacagctacggcgtggtgctgtgggagatgctgaccagagaggtgcccttcaagggcctggagggcctgcaggtggcctggctggtggtggagaagaacgagagactgaccatccccagcagctgccccagaagcttcgccgagctgctgcaccagtgctgggaggccgacgccaagaagagacccagcttcaagcagatcatcagcatcctggagagcatgagcaacgacaccagcctgcccgacaagtgcaacagcttcctgcacaacaaggccgagtggagatgcgagatcgaggccaccctggagagactgaagaagctggagagagacctgagcttcaaggagcaggagctgaaggagagagagagaagactgaagatgtgggagcagaagctgaccgagcagagcaacacccccctgctgctgcccctggccgccagaatgagcgaggagagctacttcgagagcaagaccgaggagagcaacagcgccgagatgagctgccagatcaccgccaccagcaacggcgagggccacggcatgaaccccagcctgcaggccatgatgctgatgggcttcggcgacatcttcagcatgaacaaggccggcgccgtgatgcacagcggcatgcagatcaacatgcaggccaagcagaacagcagcaagaccaccagcaagagaagaggcaagaaggtgaacatggccctgggcttcagcgacttcgacctgagcgagggcgacgacgacgacgacgacgacggcgaggaggaggacaacgacatggacaacagcgagtag

SEQ ID NO: 10196 - DNA, 423 bp, synthetic construct
  source 1..423: mol_type = other DNA; note = Synthetic coding sequence
atgagattcagattctgcggcgacctggactgccccgactgggtgctggccgagatcagcaccctggccaagatgagcagcgtgaagctgagactgctgtgcagccaggtgctgaaggagctgctgggccagggcatcgactacgagaagatcctgaagctgaccgccgacgccaagttcgagagcggcgacgtgaaggccaccgtggccgtgctgagcttcatcctgagcagcgccgccaagcacagcgtggacggcgagagcctgagcagcgagctgcagcagctgggcctgcccaaggagcacgccgccagcctgtgcagatgctacgaggagaagcagagccccctgcagaagcacctgagagtgtgcagcctgagaaagctgaagcaggcccagaccctgatgagcagcctgggctag

SEQ ID NO: 10197 - DNA, 573 bp, synthetic construct
  source 1..573: mol_type = other DNA; note = Synthetic coding sequence
atgaccgccagcgccagcagcttcagcagcagccagggcgtgcagcagcccagcatctacagcttcagccagatcaccagaagcctgttcctgagcaacggcgtggccgccaacgacaagctgctgctgagcagcaacagaatcaccgccatcgtgaacgccagcgtggaggtggtgaacgtgttcttcgagggcatccagtacatcaaggtgcccgtgaccgacgccagagacagcagactgtacgacttcttcgaccccatcgccgacctgatccacaccatcgacatgagacagggcagaaccctgctgcactgcatggccggcgtgagcagaagcgccagcctgtgcctggcctacctgatgaagtaccacagcatgagcctgctggacgcccacacctggaccaagagcagaagacccatcatcagacccaacaacggcttctgggagcagctgatcaactacgagttcaagctgttcaacaacaacaccgtgagaatgatcaacagccccgtgggcaacatccccgacatctacgagaaggacctgagaatgatgatcagcatgtag

SEQ ID NO: 10198 - DNA, 3576 bp, synthetic construct
  source 1..3576: mol_type = other DNA; note = Synthetic coding sequence
atgctgagaaagctgaccatcgagcagatcaacgactggttcaccatcggcaagaccgtgaccaacgtggagctgctgggcgccccccccgccttccccgccggcgccgccagagaggaggtgcagagacaggacgtggcccccggcgccggccccgccgcccaggcccccgccctggcccaggcccccgccagacccgccgccgccttcgagagaagcctgagccagagaagcagcgaggtggagtacatcaacaagtacagacagctggaggcccaggagctggacgtgtgcagaagcgtgcagcccaccagcggccccggccccagacccagcctggccaagctgagcagcgtgacctgcatccccggcaccacctacaagtaccccgacctgcccatcagcagatacaaggaggaggtggtgagcctgatcgagagcaacagcgtggtgatcatccacggcgccaccggcagcggcaagagcacccagctgccccagtacatcctggaccactacgtgcagagaagcgcctactgcagcatcgtggtgacccagcccagaaagatcggcgccagcagcatcgccagatggatcagcaaggagagagcctggaccctgggcggcgtggtgggctaccaggtgggcctggagaagatcgccaccgaggacaccagactgatctacatgaccaccggcgtgctgctgcagaagatcgtgagcgccaagagcctgatggagttcacccacatcatcatcgacgaggtgcacgagagaaccgaggagatggacttcctgctgctggtggtgagaaagctgctgagaaccaacagcagattcgtgaaggtggtgctgatgagcgccaccatcagctgcaaggagttcgccgactacttcgccgtgcccgtgcagaacaagatgaaccccgcctacatcttcgaggtggagggcaagccccacagcgtggaggagtactacctgaacgacctggagcacatccaccacagcaagctgagcccccacctgctggaggagcccgtgatcaccaaggacatctacgaggtggccgtgagcctgatccagatgttcgacgacctggacatgaaggagagcggcaacaaggcctggagcggcgcccagttcgtgctggagagaagcagcgtgctggtgttcctgcccggcctgggcgagatcaactacatgcacgagctgctgaccagcctggtgcacaagagactgcaggtgtaccccctgcacagcagcgtggccctggaggagcagaacaacgtgttcctgagccccgtgcccggctacagaaagatcatcctgagcaccaacatcgccgagagcagcgtgaccgtgcccgacgtgaagtacgtgatcgacttctgcctgaccagaaccctggtgtgcgacgaggacaccaactaccagagcctgagactgagctgggccagcaagaccagctgcaaccagagaaagggcagagccggcagagtgagcagaggctactgctacagactggtgcacaaggacttctgggacaacagcatccccgaccacgtggtgcccgagatgctgagatgccccctgggcagcaccatcctgaaggtgaagctgctggacatgggcgagcccagagccctgctggccaccgccctgagcccccccggcctgagcgacatcgagagaaccatcctgctgctgaaggaggtgggcgccctggccgtgagcggccagagagaggacgagaacccccacgacggcgagctgaccttcctgggcagagtgctggcccagctgcccgtgaaccagcagctgggcaagctgatcgtgctgggccacgtgttcggctgcctggacgagtgcctgatcatcgccgccgccctgagcctgaagaacttcttcgccatgcccttcagacagcacctggacggctacagaaacaaggtgaacttcagcggcagcagcaagagcgactgcatcgccctggtggaggccttcaagacctggaaggcctgcagacagaccggcgagctgagataccccaaggacgagctgaactggggcagactgaactacatccagatcaagagaatcagagaggtggccgagctgtacgaggagctgaagaccagaatcagccagttcaacatgcacgtggacagcagaagacccgtgatggaccaggagtacatctacaagcagagattcatcctgcaggtggtgctggccggcgccttctaccccaactacttcaccttcggccagcccgacgaggagatggccgtgagagagctggccggcaaggaccccaagaccaccgtggtgctgaagcacatccccccctacggcttcctgtactacaagcagctgcagagcctgttcagacagtgcggccaggtgaagagcatcgtgttcgacggcgccaaggccttcgtggagttcagcagaaaccccaccgagagattcaagaccctgcccgccgtgtacatggccatcaagatgagccagctgaaggtgagcctggagctgagcgtgcacagcgccgaggagatcgagggcaaggtgcagggcatgaacgtgagcaagctgagaaacaccagagtgaacgtggacttccagaagcagaccgtggaccccatgcaggtgagcttcaacaccagcgacagaagccagaccgtgaccgacctgctgctgaccatcgacgtgaccgaggtggtggaggtgggccacttctggggctacagaatcgacgagaacaacagcgagatcctgaagaagctgaccgccgagatcaaccagctgaccctggtgcccctgcccacccacccccaccccgacctggtgtgcctggcccccttcgccgacttcgacaagcagagatacttcagagcccaggtgctgtacgtgagcggcaacagcgccgaggtgttcttcgtggactacggcaacaagagccacgtggacctgcacctgctgatggagatcccctgccagttcctggagctgcccttccaggccctggagttcaagatctgcaagatgagacccagcgccaagagcctggtgtgcggcaagcactggagcgacggcgccagccagtggttcgccagcctggtgagcggctgcaccctgctggtgaaggtgttcagcgtggtgcacagcgtgctgcacgtggacgtgtaccagtacagcggcgtgcaggacgccatcaacatcagagacgtgctgatccagcagggctacgccgagctgaccgaggagagctacgagagcaaggtgaacatcctgagagccgccatcaacaagctggtgtgcgacggccccaacggctgcaagtgcctgggccccgagagagtggcccagctgcaggacatcgccagacagaagctgctgggcctgttctgccagagcaagcccagagagaagatcgtgcccaagtggcacgagaagccctacgagtggaaccaggtggaccccaagctggtgatggagcaggccgacagagagagcagcagaggcaagaacaccttcctgtaccagctgcacaagctggtggtgctgggcacctag

SEQ ID NO: 10199 - DNA, 906 bp, synthetic construct
  source 1..906: mol_type = other DNA; note = Synthetic coding sequence
atgaccagacacggcaagaactgcaccgccggcgccgtgtacacctaccacgagaagaagaaggacaccgccgccagcggctacggcacccagaacatcagactgagcagagacgccgtgaaggacttcgactgctgctgcctgagcctgcagccctgccacgaccccgtggtgacccccgacggctacctgtacgagagagaggccatcctggagtacatcctgcaccagaagaaggagatcgccagacagatgaaggcctacgagaagcagagaggcaccagaagagaggagcagaaggagctgcagagagccgccagccaggaccacgtgagaggcttcctggagaaggagagcgccatcgtgagcagacccctgaaccccttcaccgccaaggccctgagcggcaccagccccgacgacgtgcagcccggccccagcgtgggcccccccagcaaggacaaggacaaggtgctgcccagcttctggatccccagcctgacccccgaggccaaggccaccaagctggagaagcccagcagaaccgtgacctgccccatgagcggcaagcccctgagaatgagcgacctgacccccgtgcacttcacccccctggacagcagcgtggacagagtgggcctgatcaccagaagcgagagatacgtgtgcgccgtgaccagagacagcctgagcaacgccaccccctgcgccgtgctgagacccagcggcgccgtggtgaccctggagtgcgtggagaagctgatcagaaaggacatggtggaccccgtgaccggcgacaagctgaccgacagagacatcatcgtgctgcagagaggcggcaccggcttcgccggcagcggcgtgaagctgcaggccgagaagagcagacccgtgatgcaggcctag

SEQ ID NO: 10200 - DNA, 1509 bp, synthetic construct
  source 1..1509: mol_type = other DNA; note = Synthetic coding sequence
atgcagagctgcgagagcagcggcgacagcgccgacgaccccctgagcagaggcctgagaagaagaggccagcccagagtggtggtgatcggcgccggcctggccggcctggccgccgccaaggccctgctggagcagggcttcaccgacgtgaccgtgctggaggccagcagccacatcggcggcagagtgcagagcgtgaagctgggccacgccaccttcgagctgggcgccacctggatccacggcagccacggcaaccccatctaccacctggccgaggccaacggcctgctggaggagaccaccgacggcgagagaagcgtgggcagaatcagcctgtacagcaagaacggcgtggcctgctacctgaccaaccacggcagaagaatccccaaggacgtggtggaggagttcagcgacctgtacaacgaggtgtacaacctgacccaggagttcttcagacacgacaagcccgtgaacgccgagagccagaacagcgtgggcgtgttcaccagagaggaggtgagaaacagaatcagaaacgaccccgacgaccccgaggccaccaagagactgaagctggccatgatccagcagtacctgaaggtggagagctgcgagagcagcagccacagcatggacgaggtgagcctgagcgccttcggcgagtggaccgagatccccggcgcccaccacatcatccccagcggcttcatgagagtggtggagctgctggccgagggcatccccgcccacgtgatccagctgggcaagcccgtgagatgcatccactgggaccaggccagcgccagacccagaggccccgagatcgagcccagaggcgtgctgaagagacagtacaccagcttcttcagacccggcctgcccaccgagaaggtggccgccatccacagactgggcatcggcaccaccgacaagatcttcctggagttcgaggagcccttctggggccccgagtgcaacagcctgcagttcgtgtgggaggacgaggccgagagccacaccctgacctacccccccgagctgtggtacagaaagatctgcggcttcgacgtgctgtacccccccgagagatacggccacgtgctgagcggctggatctgcggcgaggaggccctggtgatggagaagtgcgacgacgaggccgtggccgagatctgcaccgagatgctgagacagttcaccggcaaccccaacatccccaagcccagaagaatcctgagaagcgcctggggcagcaacccctacttcagaggcagctacagctacacccaggtgggcagcagcggcgccgacgtggagaagctggccaagcccctgccctacaccgagagcagcaagaccgcccccatgcaggtgctgttcagcggcgaggccacccacagaaagtactacagcaccacccacggcgccctgctgagcggccagagagaggccgccagactgatcgagatgtacagagacctgttccagcagggcacctag

SEQ ID NO: 10201 - DNA, 579 bp, synthetic construct
  source 1..579: mol_type = other DNA; note = Synthetic coding sequence
atgggcaccttcgacctgtggaccgactacctgggcctggcccacctggtgagagccctgagcggcaaggagggccccgagaccagactgagcccccagcccgagcccgagcccatgctggagcccgtgagcgccctggagcccatgcccgcccccgagagcgtgcccgtgcccggccccaaggaccagaagagaagcctggagagcagccccgcccccgagagactgtgcagcttctgcaagcacaacggcgagagcagagccatctaccagagccacgtgctgaaggacgaggccggcagagtgctgtgccccatcctgagagactacgtgtgcccccagtgcggcgccaccagagagagagcccacaccagaagattctgccccctgaccggccagggctacaccagcgtgtacagccacaccaccagaaacagcgccggcaagaagctggtgagacccgacaaggccaagacccaggacaccggccacagaagaggcggcggcggcggcgccggcttcagaggcgccggcaagagcgagcccagccccagctgcagccccagcatgagcacctag

SEQ ID NO: 10202 - DNA, 2568 bp, synthetic construct
  source 1..2568: mol_type = other DNA; note = Synthetic coding sequence
atggccgtggaggacagcaccctgcaggtggtggtgagagtgagaccccccacccccagagagctggacagccagagaagacccgtggtgcaggtggtggacgagagagtgctggtgttcaaccccgaggagcccgacggcggcttccccggcctgaagtggggcggcacccacgacggccccaagaagaagggcaaggacctgaccttcgtgttcgacagagtgttcggcgaggccgccacccagcaggacgtgttccagcacaccacccacagcgtgctggacagcttcctgcagggctacaactgcagcgtgttcgcctacggcgccaccggcgccggcaagacccacaccatgctgggcagagagggcgaccccggcatcatgtacctgaccaccgtggagctgtacagaagactggaggccagacagcaggagaagcacttcgaggtgctgatcagctaccaggaggtgtacaacgagcagatccacgacctgctggagcccaagggccccctggccatcagagaggaccccgacaagggcgtggtggtgcagggcctgagcttccaccagcccgccagcgccgagcagctgctggagatcctgaccagaggcaacagaaacagaacccagcaccccaccgacgccaacgccaccagcagcagaagccacgccatcttccagatcttcgtgaagcagcaggacagagtgcccggcctgacccaggccgtgcaggtggccaagatgagcctgatcgacctggccggcagcgagagagccagcagcacccacgccaagggcgagagactgagagagggcgccaacatcaacagaagcctgctggccctgatcaacgtgctgaacgccctggccgacgccaagggcagaaagacccacgtgccctacagagacagcaagctgaccagactgctgaaggacagcctgggcggcaactgcagaaccgtgatgatcgccgccatcagccccagcagcctgacctacgaggacacctacaacaccctgaagtacgccgacagagccaaggagatcagactgagcctgaagagcaacgtgaccagcctggactgccacatcagccagtacgccaccatctgccagcagctgcaggccgaggtggccgccctgagaaagaagctgcaggtgtacgagggcggcggccagccccccccccaggacctgcccggcagccccaagagcggccccccccccgagcacctgcccagcagccccctgcccccccacccccccagccagccctgcacccccgagctgcccgccggccccagagccctgcaggaggagagcctgggcatggaggcccaggtggagagagccatggagggcaacagcagcgaccaggagcagagccccgaggacgaggacgagggccccgccgaggaggtgcccacccagatgcccgagcagaaccccacccacgccctgcccgagagccccagactgaccctgcagcccaagcccgtggtgggccacttcagcgccagagagctggacggcgacagaagcaagcagctggccctgaaggtgctgtgcgtggcccagagacagtacagcctgctgcaggccgccaacctgctgacccccgacatgatcaccgagttcgagaccctgcagcagctggtgcaggaggagaagatcgagcccggcgccgaggccctgagaaccagcggcctggccagaggcgcccccctggcccaggagctgtgcagcgagagcaagccccccggctacaccggccccgtgaccagaaccatggccagaagactgagcggccccctgcacaccctgggcatcccccccggccccaactgcacccccgcccagggcagcagatggcccatggagaagaagagaagaagacccagcgccctggaggccgacagccccatggcccccaagagaggcaccaagagacagagacagagcttcctgccctgcctgagaagaggcagcctgcccgacacccagcccagccagggccccagcacccccaagggcgagagagccagcagcccctgccacagccccagagtgtgccccgccaccgtgatcaagagcagagtgcccctgggccccagcgccatgcagaactgcagcacccccctggccctgcccaccagagacctgaacgccaccttcgacctgagcgaggagccccccagcaagcccagcttccacgagtgcatcggctgggacaagatcccccaggagctgagcagactggaccagcccttcatccccagagcccccgtgcccctgttcaccatgaagggccccaagcccaccagcagcctgcccggcaccagcgcctgcaagaagaagagagtggccagcagcagcgtgagccacggcagaagcagaatcgccagactgcccagcagcaccctgaagagacccgccggccccctggtgctgcccgagctgcccctgagccccctgtgccccagcaacagaagaaacggcaaggacctgatcagagtgggcagagccctgagcgccggcaacggcgtgaccaaggtgagctag

SEQ ID NO: 10203 - DNA, 444 bp, synthetic construct
  source 1..444: mol_type = other DNA; note = Synthetic coding sequence
atgtggaagttccccggcggcctgagcgagcccgaggaggacatcggcgacaccgccgtgagagaggtgttcgaggagaccggcatcaagagcgagttcagaagcgtgctgagcatcagacagcagcacaccaaccccggcgccttcggcaagagcgacatgtacatcatctgcagactgaagccctacagcttcaccatcaacttctgccaggaggagtgcctgagatgcgagtggatggacctgaacgacctggccaagaccgagaacaccacccccatcaccagcagagtggccagactgctgctgtacggctacagagagggcttcgacaagatcgacctgaccgtggaggagctgcccgccgtgtacaccggcctgttctacaagctgtaccacaaggagctgcccgagaactacaagaccatgaagggcatcgactag

SEQ ID NO: 10204 - DNA, 3327 bp, synthetic construct
  source 1..3327: mol_type = other DNA; note = Synthetic coding sequence
atggccctgagacccggcgccggcagcggcggcggcggcgccgccggcgccggcgccggcagcgccggcggcggcggcttcatgttccccgtggccggcggcatcagacccccccaggccggcctgatgcccatgcagcagcagggcttccccatggtgagcgtgatgcagcccaacatgcagggcatcatgggcatgaactacagcagccagatgagccagggccccatcgccatgcaggccggcatccccatgggccccatgcccgccgccggcatgccctacctgggccaggcccccttcctgggcatgagaccccccggcccccagtacacccccgacatgcagaagcagttcgccgaggagcagcagaagagattcgagcagcagcagaagctgctggaggaggagagaaagagaagacagttcgaggagcagaagcagaagctgagactgctgagcagcgtgaagcccaagaccggcgagaagagcagagacgacgccctggaggccatcaagggcaacctggacggcttcagcagagacgccaagatgcaccccacccccgccagccaccccaagaagcccggcgtgggcgtgttccccagccaggaccccgcccagcccagaatgcccccctggatctacaacgagagcctggtgcccgacgcctacaagaagatcctggagaccaccatgacccccaccggcatcgacaccgccaagctgtaccccatcctgatgagcagcggcctgcccagagagaccctgggccagatctgggccctggccaacagaaccacccccggcaagctgaccaaggaggagctgtacaccgtgctggccatgatcgccgtgacccaggtggtgaagcccgaggaggacgacttccaggacttccaggacgccagcaagagcggcagcctggacgacagcttcagcgacttccaggagctgcccgccagcagcaagaccagcaacagccagcacggcaacagcgcccccagcctgctgatgcccctgcccggcaccaaggccctgcccagcatggacaagtacgccgtgttcaagggcatcgccgccgacaagagcagcgagaacaccgtgccccccggcgaccccggcgacaagtacagcgccttcagagagctggagcagaccgccgagaacaagcccctgggcgagagcttcgccgagttcagaagcgccggcaccgacgacggcttcaccgacttcaagaccgccgacagcgtgagccccctggagccccccaccaaggacaagaccttcccccccagcttccccagcggcaccatccagcagaagcagcagacccaggtgaagaaccccctgaacctggccgacctggacatgttcagcagcgtgaactgcagcagcgagaagcccctgagcttcagcgccgtgttcagcaccagcaagagcgtgagcaccccccagagcaccggcagcgccgccaccatgaccgccctggccgccaccaagaccagcagcctggccgacgacttcggcgagttcagcctgttcggcgagtacagcggcctggcccccgtgggcgagcaggacgacttcgccgacttcatggccttcagcaacagcagcatcagcagcgagcagaagcccgacgacaagtacgacgccctgaaggaggaggccagccccgtgcccctgaccagcaacgtgggcagcaccgtgaagggcggccagaacagcaccgccgccagcaccaagtacgacgtgttcagacagctgagcctggagggcagcggcctgggcgtggaggacctgaaggacaacacccccagcggcaagagcgacgacgacttcgccgacttccacagcagcaagttcagcagcatcaacagcgacaagagcctgggcgagaaggccgtggccttcagacacaccaaggaggacagcgccagcgtgaagagcctggacctgcccagcatcggcggcagcagcgtgggcaaggaggacagcgaggacgccctgagcgtgcagttcgacatgaagctggccgacgtgggcggcgacctgaagcacgtgatgagcgacagcagcctggacctgcccaccgtgagcggccagcacccccccgccgccgccggcagcggcagccccagcgccaccagcatcctgcagaagaaggagaccagcttcggcagcagcgagaacatcaccatgaccagcctgagcaaggtgaccaccttcgtgagcgaggacgccctgcccgagaccaccttccccgccctggccagcttcaaggacaccatcccccagaccagcgagcagaaggagtacgagaacagagactacaaggacttcaccaagcaggacctgcccaccgccgagagaagccaggaggccacctgccccagccccgccagcagcggcgccagccaggagacccccaacgagtgcagcgacgacttcggcgagttccagagcgagaagcccaagatcagcaagttcgacttcctggtggccaccagccagagcaagatgaagagcagcgaggagatgatcaagagcgagctggccaccttcgacctgagcgtgcagggcagccacaagagaagcctgagcctgggcgacaaggagatcagcagaagcagccccagccccgccctggagcagcccttcagagacagaagcaacaccctgaacgagaagcccgccctgcccgtgatcagagacaagtacaaggacctgaccggcgaggtggaggagaacgagagatacgcctacgagtggcagagatgcctgggcagcgccctgaacgtgatcaagaaggccaacgacaccctgaacggcatcagcagcagcagcgtgtgcaccgaggtgatccagagcgcccagggcatggagtacctgctgggcgtggtggaggtgtacagagtgaccaagagagtggagctgggcatcaaggccaccgccgtgtgcagcgagaagctgcagcagctgctgaaggacatcgacaaggtgtggaacaacctgatcggcttcatgagcctggccaccctgacccccgacgagaacagcctggacttcagcagctgcatgctgagacccggcatcaagaacgcccaggagctggcctgcggcgtgtgcctgctgaacgtggacagcagaagcagaaaggaggagaagcccgccgaggagcaccccaagaaggccttcaacagcgagaccgacagcttcaagctggcctacggcggccaccagtaccacgccagctgcgccaacttctggatcaactgcgtggagcccaagccccccggcctggtgctgcccgacctgctgtag

SEQ ID NO: 10205 - DNA, 1257 bp, synthetic construct
  source 1..1257: mol_type = other DNA; note = Synthetic coding sequence
atggagacccacatcagctgcctgttccccgagctgctggccatgatcttcggctacctggacgtgagagacaagggcagagccgcccaggtgtgcaccgcctggagagacgccgcctaccacaagagcgtgtggagaggcgtggaggccaagctgcacctgagaagagccaaccccagcctgttccccagcctgcaggccagaggcatcagaagagtgcagatcctgagcctgagaagaagcctgagctacgtgatccagggcatggccaacatcgagagcctgaacctgagcggctgctacaacctgaccgacaacggcctgggccacgccttcgtgcaggagatcggcagcctgagagccctgaacctgagcctgtgcaagcagatcaccgacagcagcctgggcagaatcgcccagtacctgaagggcctggaggtgctggagctgggcggctgcagcaacatcaccaacaccggcctgctgctgatcgcctggggcctgcagagactgaagagcctgaacctgagaagctgcagacacctgagcgacgtgggcatcggccacctggccggcatgaccagaagcgccgccgagggctgcctgggcctggagcagctgaccctgcaggactgccagaagctgaccgacctgagcctgaagcacatcagcagaggcctgaccggcctgagactgctgaacctgagcttctgcggcggcatcagcgacgccggcctgctgcacctgagccacatgggcagcctgagaagcctgaacctgagaagctgcgacaacatcagcgacaccggcatcatgcacctggccatgggcagcctgagactgagcggcctggacgtgagcttctgcgacaaggtgggcgaccagagcctggcctacatcgcccagggcctggacggcctgaagagcctgagcctgtgcagctgccacatcagcgacgacggcatcaacagaatggtgagacagatgcacggcctgagaaccctgaacatcggccagtgcgtgagaatcaccgacaagggcctggagctgatcgccgagcacctgagccagctgaccggcatcgacctgtacggctgcaccagaatcaccaagagaggcctggagagaatcacccagctgccctgcctgaaggtgctgaacctgggcctgtggcagatgaccgacagcgagaaggaggccagaggcgacttcagccccctgttcaccgtgagaaccagaggcagcagcagaagatag

SEQ ID NO: 10206 - DNA, 1371 bp, synthetic construct
  source 1..1371: mol_type = other DNA; note = Synthetic coding sequence
atggccgccgccctgaagtgcctgctgaccctgggcagatggtgccccggcctgggcgtggccccccaggccagagccctggccgccctggtgcccggcgtgacccaggtggacaacaagagcggcttcctgcagaagagaccccacagacagcaccccggcatcctgaagctgccccacgtgagactgccccaggccctggccaacggcgcccagctgctgctgctgggcagcgccggccccaccatggagaaccaggtgcagaccctgaccagctacctgtggagcagacacctgcccgtggagcccgaggagctgcagagaagagccagacacctggagaagaagttcctggagaaccccgacctgagccagaccgaggagaagctgagaggcgccgtgctgcacgccctgagaaagaccacctaccactggcaggagctgagctacaccgagggcctgagcctggtgtacatggccgccagactggacggcggcttcgccgccgtgagcagagccttccacgagatcagagccagaaaccccgccttccagccccagaccctgatggacttcggcagcggcaccggcagcgtgacctgggccgcccacagcatctggggccagagcctgagagagtacatgtgcgtggacagaagcgccgccatgctggtgctggccgagaagctgctgaagggcggcagcgagagcggcgagccctacatccccggcgtgttcttcagacagttcctgcccgtgagccccaaggtgcagttcgacgtggtggtgagcgccttcagcctgagcgagctgcccagcaaggccgacagaaccgaggtggtgcagaccctgtggagaaagaccggccacttcctggtgctggtggagaacggcaccaaggccggccacagcctgctgatggacgccagagacctggtgctgaagggcaaggagaagagccccctggaccccagacccggcttcgtgttcgccccctgcccccacgagctgccctgcccccagctgaccaacctggcctgcagcttcagccaggcctaccaccccatccccttcagctggaacaagaagcccaaggaggagaagttcagcatggtgatcctggccagaggcagccccgaggaggcccacagatggcccagaatcacccagcccgtgctgaagagacccagacacgtgcactgccacctgtgctgccccgacggccacatgcagcacgccgtgctgaccgccagaagacacggcagagacctgtacagatgcgccagagtgagcagctggggcgacctgctgcccgtgctgacccccagcgccttcccccccagcaccgcccaggaccccagcgagagctag

SEQ ID NO: 10207 - DNA, 756 bp, synthetic construct
  source 1..756: mol_type = other DNA; note = Synthetic coding sequence
atggacatgaagagaagaatccacctggagctgagaaacagaacccccgccgccgtgagagagctggtgctggacaactgcaagagcaacgacggcaagatcgagggcctgaccgccgagttcgtgaacctggagttcctgagcctgatcaacgtgggcctgatcagcgtgagcaacctgcccaagctgcccaagctgaagaagctggagctgagcgagaacagaatcttcggcggcctggacatgctggccgagaagctgcccaacctgacccacctgaacctgagcggcaacaagctgaaggacatcagcaccctggagcccctgaagaagctggagtgcctgaagagcctggacctgttcaactgcgaggtgaccaacctgaacgactacagagagagcgtgttcaagctgctgccccagctgacctacctggacggctacgacagagaggaccaggaggcccccgacagcgacgccgaggtggacggcgtggacgaggaggaggaggacgaggagggcgaggacgaggaggacgaggacgacgaggacggcgaggaggaggagttcgacgaggaggacgacgaggacgaggacgtggagggcgacgaggacgacgacgaggtgagcgaggaggaggaggagttcggcctggacgaggaggacgaggacgaggacgaggacgaggaggaggaggagggcggcaagggcgagaagagaaagagagagaccgacgacgagggcgaggacgactag

SEQ ID NO: 10208 - DNA, 510 bp, synthetic construct
  source 1..510: mol_type = other DNA; note = Synthetic coding sequence
atgagcgccccccccgccctgcagatcagagaggccaacgcccacctggccgccgtgcacagaagagccgccgagctggaggccagactggacgccgccgagagaaccgtgcacgcccaggccgagagactggccctgcacgaccagcagctgagagccgccctggacgagctgggcagagccaaggacagagagatcgccaccctgcaggagcagctgatgaccagcgaggccaccgtgcacagcctgcaggccaccgtgcaccagagagacgagctgatcagacagctgcagcccagagccgagctgctgcaggacatctgcagaagaagaccccccctggccggcctgctggacgccctggccgaggccgagagactgggccccctgcccgccagcgaccccggccaccccccccccggcggccccggcccccccctggacaacagcaccggcgaggaggccgacagagaccacctgcagcccgccgtgttcggcaccaccgtgtag

SEQ ID NO: 10209 - DNA, 2079 bp, synthetic construct
  source 1..2079: mol_type = other DNA; note = Synthetic coding sequence
atgaagatcttctgcagcagagccaaccccaccaccggcagcgtggagtggctggaggaggacgagcactacgactaccaccaggagatcgccagaagcagctacgccgacatgctgcacgacaaggacagaaacgtgaagtactaccagggcatcagagccgccgtgagcagagtgaaggacagaggccagaaggccctggtgctggacatcggcaccggcaccggcctgctgagcatgatggccgtgaccgccggcgccgacttctgctacgccatcgaggtgttcaagcccatggccgacgccgccgtgaagatcgtggagaagaacggcttcagcgacaagatcaaggtgatcaacaagcacagcaccgaggtgaccgtgggccccgagggcgacatgccctgcagagccaacatcctggtgaccgagctgttcgacaccgagctgatcggcgagggcgccctgcccagctacgagcacgcccacagacacctggtggaggagaactgcgaggccgtgccccacagagccaccgtgtacgcccagctggtggagagcggcagaatgtggagctggaacaagctgttccccatccacgtgcagaccagcctgggcgagcaggtgatcgtgccccccgtggacgtggagagctgccccggcgcccccagcgtgtgcgacatccagctgaaccaggtgagccccgccgacttcaccgtgctgagcgacgtgctgcccatgttcagcatcgacttcagcaagcaggtgagcagcagcgccgcctgccacagcagaagattcgagcccctgaccagcggcagagcccaggtggtgctgagctggtgggacatcgagatggaccccgagggcaagatcaagtgcaccatggcccccttctgggcccacagcgaccccgaggagatgcagtggagagaccactggatgcagtgcgtgtacttcctgccccaggaggagcccgtggtgcagggcagcgccctgtacctggtggcccaccacgacgactactgcgtgtggtacagcctgcagagaaccagccccgagaagaacgagagagtgagacagatgagacccgtgtgcgactgccaggcccacctgctgtggaacagacccagattcggcgagatcaacgaccaggacagaaccgacagatacgtgcaggccctgagaaccgtgctgaagcccgacagcgtgtgcctgtgcgtgagcgacggcagcctgctgagcgtgctggcccaccacctgggcgtggagcaggtgttcaccgtggagagcagcgccgccagccacaagctgctgagaaagatcttcaaggccaaccacctggaggacaagatcaacatcatcgagaagagacccgagctgctgaccaacgaggacctgcagggcagaaaggtgagcctgctgctgggcgagcccttcttcaccaccagcctgctgccctggcacaacctgtacttctggtacgtgagaaccgccgtggaccagcacctgggccccggcgccatggtgatgccccaggccgccagcctgcacgccgtggtggtggagttcagagacctgtggagaatcagaagcccctgcggcgactgcgagggcttcgacgtgcacatcatggacgacatgatcaagagagccctggacttcagagagagcagagaggccgagccccaccccctgtgggagtacccctgcagaagcctgagcgagccctggcagatcctgaccttcgacttccagcagcccgtgcccctgcagcccctgtgcgccgagggcaccgtggagctgagaagacccggccagagccacgccgccgtgctgtggatggagtaccacctgacccccgagtgcaccctgagcaccggcctgctggagcccgccgaccccgagggcggctgctgctggaacccccactgcaagcaggccgtgtacttcttcagccccgcccccgaccccagagccctgctgggcggccccagaaccgtgagctacgccgtggagttccaccccgacaccggcgacatcatcatggagttcagacacgccgacacccccgactag

SEQ ID NO: 10210 - DNA, 468 bp, synthetic construct
  source 1..468: mol_type = other DNA; note = Synthetic coding sequence
atgaccgtggagggccccccccccaaggacaccggcatcgccagagtgcccctggccggcgccgccggcggccccggcatcggcagagccgccggcagaggcatccccgccggcgtgcccatgccccaggcccccgccggcctggccggccccgtgagaggcgtgggcggccccagccagcaggtgatgaccccccagggcagaggcaccgtggccgccgccgccgccgccgccaccgccagcatcgccggcgcccccacccagtacccccccggcagaggcggcccccccccccccatgggcagaggcgcccccccccccggcatgatgggccccccccccggcatgagaccccccatgggcccccccatgggcatcccccccggcagaggcacccccatgggcatgcccccccccggcatgagaccccccccccccggcatgagaggcaagtgcctgcagtggtag

SEQ ID NO: 10211 - DNA, 402 bp, synthetic construct
  source 1..402: mol_type = other DNA; note = Synthetic coding sequence
atgaccagaggcaaccagagagagctggccagacagaagaacatgaagaagcagagcgacagcgtgaagggcaagagaagagacgacggcctgagcgccgccgccagaaagcagagcgcccccagcagcctgccccccggcaccagaagaagctgcagcagaagcagaaagagacagaccagaagaagaagaaaccccagcagcttcgtggccagctgccccaccctgctgcccttcgcctgcgtgcccggcgccagccccaccaccctggccttcccccccgtggtgctgaccggccccagcaccgacggcatccccttcgccctgagcctgcagagagtgcccttcgtgctgcccagcccccaggtggccagcctgcccctgggccacagcagaggctag

SEQ ID NO: 10212 - DNA, 1809 bp, synthetic construct
  source 1..1809: mol_type = other DNA; note = Synthetic coding sequence
atggccgagttcagagtgagagtgagcaccggcgaggccttcggcgccggcacctgggacaaggtgagcgtgagcatcgtgggcaccagaggcgagagcccccccctgcccctggacaacctgggcaaggagttcaccgccggcgccgaggaggacttccaggtgaccctgcccgaggacgtgggcagagtgctgctgctgagagtgcacaaggccccccccgtgctgcccctgctgggccccctggcccccgacgcctggttctgcagatggttccagctgaccccccccagaggcggccacctgctgttcccctgctaccagtggctggagggcgccggcaccctggtgctgcaggagggcaccgccaaggtgagctgggccgaccaccaccccgtgctgcagcagcagagacaggaggagctgcaggccagacaggagatgtaccagtggaaggcctacaaccccggctggccccactgcctggacgagaagaccgtggaggacctggagctgaacatcaagtacagcaccgccaagaacgccaacttctacctgcaggccggcagcgccttcgccgagatgaagatcaagggcctgctggacagaaagggcctgtggagaagcctgaacgagatgaagagaatcttcaacttcagaagaacccccgccgccgagcacgccttcgagcactggcaggaggacgccttcttcgccagccagttcctgaacggcctgaaccccgtgctgatcagaagatgccactacctgcccaagaacttccccgtgaccgacgccatggtggccagcgtgctgggccccggcaccagcctgcaggccgagctggagaagggcagcctgttcctggtggaccacggcatcctgagcggcatccagaccaacgtgatcaacggcaagccccagttcagcgccgcccccatgaccctgctgtaccagagccccggctgcggccccctgctgcccctggccatccagctgagccagacccccggccccaacagccccatcttcctgcccaccgacgacaagtgggactggctgctggccaagacctgggtgagaaacgccgagttcagcttccacgaggccctgacccacctgctgcacagccacctgctgcccgaggtgttcaccctggccaccctgagacagctgccccactgccaccccctgttcaagagcaccggcatcggcatcgagggcttcagcgagctgatccagagaaacatgaagcagctgaactacagcctgctgtgcctgcccgaggacatcagaaccagaggcgtggaggacatccccggctactactacagagacgacggcatgcagatctggggcatccccagcagcctggagaccagagaggccctggtgcagtacgtgaccatggtgatcttcacctgcagcgccaagcacgccgccgtgagcgccggccagttcgacagctgcgcctggatgcccaacctgccccccagcatgcagctgcccccccccaccagcaagggcctggccacctgcgagggcttcatcgccaccctgccccccgtgaacgccacctgcgacgtgatcctggccctgtggctgctgagcaaggagcccggcgaccagagacccctgggcacctaccccgacgagcacttcaccgaggaggcccccagaagaagcatcgccaccttccagagcagactggcccagatcagcagaggcatccaggagagaaaccagggcctggtgctgccctacacctacctggacccccccctgatcgagaacagcgtgagcatctag

SEQ ID NO: 10213 - DNA, 3123 bp, synthetic construct
  source 1..3123: mol_type = other DNA; note = Synthetic coding sequence
atggtgagcagcgcccagatgggcttcaacctgcaggccctgctggagcagctgagccaggacgagctgagcaagttcaagtacctgatcaccaccttcagcctggcccacgagctgcagaagatcccccacaaggaggtggacaaggccgacggcaagcagctggtggagatcctgaccacccactgcgacagctactgggtggagatggccagcctgcaggtgttcgagaagatgcacagaatggacctgagcgagagagccaaggacgaggtgagagaggccgccctgaagagcttcaacaagagaaagcccctgagcctgggcatcaccagaaaggagagaccccccctggacgtggacgagatgctggagagattcaagaccgaggcccaggacaaggacaacagatgcagatacatcctgaagaccaagttcagagagatgtggaagagctggcccggcgacagcaaggaggtgcaggtgatggccgagagatacaagatgctgatccccttcagcaaccccagagtgctgcccggccccttcagctacaccgtggtgctgtacggccccgccggcctgggcaagaccaccctggcccagaagctgatgctggactgggccgaggacaacctgatccacaagttcaagtacgccttctacctgagctgcagagagctgagcagactgggcccctgcagcttcgccgagctggtgttcagagactggcccgagctgcaggacgacatcccccacatcctggcccaggccagaaagatcctgttcgtgatcgacggcttcgacgagctgggcgccgcccccggcgccctgatcgaggacatctgcggcgactgggagaagaagaagcccgtgcccgtgctgctgggcagcctgctgaacagagtgatgctgcccaaggccgccctgctggtgaccaccagacccagagccctgagagacctgagaatcctggccgaggagcccatctacatcagagtggagggcttcctggaggaggacagaagagcctacttcctgagacacttcggcgacgaggaccaggccatgagagccttcgagctgatgagaagcaacgccgccctgttccagctgggcagcgcccccgccgtgtgctggatcgtgtgcaccaccctgaagctgcagatggagaagggcgaggaccccgtgcccacctgcctgaccagaaccggcctgttcctgagattcctgtgcagcagattcccccagggcgcccagctgagaggcgccctgagaaccctgagcctgctggccgcccagggcctgtgggcccagaccagcgtgctgcacagagaggacctggagagactgggcgtgcaggagagcgacctgagactgttcctggacggcgacatcctgagacaggacagagtgagcaagggctgctacagcttcatccacctgagcttccagcagttcctgaccgccctgttctacaccctggagaaggaggaggaggaggacagagacggccacacctgggacatcggcgacgtgcagaagctgctgagcggcgtggagagactgagaaaccccgacctgatccaggccggctactacagcttcggcctggccaacgagaagagagccaaggagctggaggccaccttcggctgcagaatgagccccgacatcaagcaggagctgctgagatgcgacatcagctgcaagggcggccacagcaccgtgaccgacctgcaggagctgctgggctgcctgtacgagagccaggaggaggagctggtgaaggaggtgatggcccagttcaaggagatcagcctgcacctgaacgccgtggacgtggtgcccagcagcttctgcgtgaagcactgcagaaacctgcagaagatgagcctgcaggtgatcaaggagaacctgcccgagaacgtgaccgccagcgagagcgacgccgaggtggagagaagccaggacgaccagcacatgctgcccttctggaccgacctgtgcagcatcttcggcagcaacaaggacctgatgggcctggccatcaacgacagcttcctgagcgccagcctggtgagaatcctgtgcgagcagatcgccagcgacacctgccacctgcagagagtggtgttcaagaacatcagccccgccgacgcccacagaaacctgtgcctggccctgagaggccacaagaccgtgacctacctgaccctgcagggcaacgaccaggacgacatgttccccgccctgtgcgaggtgctgagacaccccgagtgcaacctgagatacctgggcctggtgagctgcagcgccaccacccagcagtgggccgacctgagcctggccctggaggtgaaccagagcctgacctgcgtgaacctgagcgacaacgagctgctggacgagggcgccaagctgctgtacaccaccctgagacaccccaagtgcttcctgcagagactgagcctggagaactgccacctgaccgaggccaactgcaaggacctggccgccgtgctggtggtgagcagagagctgacccacctgtgcctggccaagaaccccatcggcaacaccggcgtgaagttcctgtgcgagggcctgagataccccgagtgcaagctgcagaccctggtgctgtggaactgcgacatcaccagcgacggctgctgcgacctgaccaagctgctgcaggagaagagcagcctgctgtgcctggacctgggcctgaaccacatcggcgtgaagggcatgaagttcctgtgcgaggccctgagaaagcccctgtgcaacctgagatgcctgtggctgtggggctgcagcatcccccccttcagctgcgaggacctgtgcagcgccctgagctgcaaccagagcctggtgaccctggacctgggccagaaccccctgggcagcagcggcgtgaagatgctgttcgagaccctgacctgcagcagcggcaccctgagaaccctgagactgaagatcgacgacttcaacgacgagctgaacaagctgctggaggagatcgaggagaagaacccccagctgatcatcgacaccgagaagcaccacccctgggccgagagacccagcagccacgacttcatgatctag

SEQ ID NO: 10214 - DNA, 3864 bp, synthetic construct
  source 1..3864: mol_type = other DNA; note = Synthetic coding sequence
atggtgcccggcgaggagaaccagctggtgcccaaggaggcccccctggaccacaccagcgacaagagcctgctggacgccaacttcgagcccggcaagaagaacttcctgcacctgaccgacaaggacggcgagcagccccagatcctgctggaggacagcagcgccggcgaggacagcgtgcacgacagattcatcggccccctgcccagagagggcagcggcggcagcaccagcgactacgtgagccagagctacagctacagcagcatcctgaacaagagcgagaccggctacgtgggcctggtgaaccaggccatgacctgctacctgaacagcctgctgcagaccctgttcatgacccccgagttcagaaacgccctgtacaagtgggagttcgaggagagcgaggaggaccccgtgaccagcatcccctaccagctgcagagactgttcgtgctgctgcagaccagcaagaagagagccatcgagaccaccgacgtgaccagaagcttcggctgggacagcagcgaggcctggcagcagcacgacgtgcaggagctgtgcagagtgatgttcgacgccctggagcagaagtggaagcagaccgagcaggccgacctgatcaacgagctgtaccagggcaagctgaaggactacgtgagatgcctggagtgcggctacgagggctggagaatcgacacctacctggacatccccctggtgatcagaccctacggcagcagccaggccttcgccagcgtggaggaggccctgcacgccttcatccagcccgagatcctggacggccccaaccagtacttctgcgagagatgcaagaagaagtgcgacgccagaaagggcctgagattcctgcacttcccctacctgctgaccctgcagctgaagagattcgacttcgactacaccaccatgcacagaatcaagctgaacgacagaatgaccttccccgaggagctggacatgagcaccttcatcgacgtggaggacgagaagagcccccagaccgagagctgcaccgacagcggcgccgagaacgagggcagctgccacagcgaccagatgagcaacgacttcagcaacgacgacggcgtggacgagggcatctgcctggagaccaacagcggcaccgagaagatcagcaagagcggcctggagaagaacagcctgatctacgagctgttcagcgtgatggtgcacagcggcagcgccgccggcggccactactacgcctgcatcaagagcttcagcgacgagcagtggtacagcttcaacgaccagcacgtgagcagaatcacccaggaggacatcaagaagacccacggcggcagcagcggcagcagaggctactacagcagcgccttcgccagcagcaccaacgcctacatgctgatctacagactgaaggaccccgccagaaacgccaagttcctggaggtggacgagtaccccgagcacatcaagaacctggtgcagaaggagagagagctggaggagcaggagaagagacagagagagatcgagagaaacacctgcaagatcaagctgttctgcctgcaccccaccaagcaggtgatgatggagaacaagctggaggtgcacaaggacaagaccctgaaggaggccgtggagatggcctacaagatgatggacctggaggaggtgatccccctggactgctgcagactggtgaagtacgacgagttccacgactacctggagagaagctacgagggcgaggaggacacccccatgggcctgctgctgggcggcgtgaagagcacctacatgttcgacctgctgctggagaccagaaagcccgaccaggtgttccagagctacaagcccggcgaggtgatggtgaaggtgcacgtggtggacctgaaggccgagagcgtggccgcccccatcaccgtgagagcctacctgaaccagaccgtgaccgagttcaagcagctgatcagcaaggccatccacctgcccgccgagaccatgagaatcgtgctggagagatgctacaacgacctgagactgctgagcgtgagcagcaagaccctgaaggccgagggcttcttcagaagcaacaaggtgttcgtggagagcagcgagaccctggactaccagatggccttcgccgacagccacctgtggaagctgctggacagacacgccaacaccatcagactgttcgtgctgctgcccgagcagagccccgtgagctacagcaagagaaccgcctaccagaaggccggcggcgacagcggcaacgtggacgacgactgcgagagagtgaagggccccgtgggcagcctgaagagcgtggaggccatcctggaggagagcaccgagaagctgaagagcctgagcctgcagcagcagcaggacggcgacaacggcgacagcagcaagagcaccgagaccagcgacttcgagaacatcgagagccccctgaacgagagagacagcagcgccagcgtggacaacagagagctggagcagcacatccagaccagcgaccccgagaacttccagagcgaggagagaagcgacagcgacgtgaacaacgacagaagcaccagcagcgtggacagcgacatcctgagcagcagccacagcagcgacaccctgtgcaacgccgacaacgcccagatccccctggccaacggcctggacagccacagcatcaccagcagcagaagaaccaaggccaacgagggcaagaaggagacctgggacaccgccgaggaggacagcggcaccgacagcgagtacgacgagagcggcaagagcagaggcgagatgcagtacatgtacttcaaggccgagccctacgccgccgacgagggcagcggcgagggccacaagtggctgatggtgcacgtggacaagagaatcaccctggccgccttcaagcagcacctggagcccttcgtgggcgtgctgagcagccacttcaaggtgttcagagtgtacgccagcaaccaggagttcgagagcgtgagactgaacgagaccctgagcagcttcagcgacgacaacaagatcaccatcagactgggcagagccctgaagaagggcgagtacagagtgaaggtgtaccagctgctggtgaacgagcaggagccctgcaagttcctgctggacgccgtgttcgccaagggcatgaccgtgagacagagcaaggaggagctgatcccccagctgagagagcagtgcggcctggagctgagcatcgacagattcagactgagaaagaagacctggaagaaccccggcaccgtgttcctggactaccacatctacgaggaggacatcaacatcagcagcaactgggaggtgttcctggaggtgctggacggcgtggagaagatgaagagcatgagccagctggccgtgctgagcagaagatggaagcccagcgagatgaagctggaccccttccaggaggtggtgctggagagcagcagcgtggacgagctgagagagaagctgagcgagatcagcggcatccccctggacgacatcgagttcgccaagggcagaggcaccttcccctgcgacatcagcgtgctggacatccaccaggacctggactggaaccccaaggtgagcaccctgaacgtgtggcccctgtacatctgcgacgacggcgccgtgatcttctacagagacaagaccgaggagctgatggagctgaccgacgagcagagaaacgagctgatgaagaaggagagcagcagactgcagaagaccggccacagagtgacctacagccccagaaaggagaaggccctgaagatctacctggacggcgcccccaacaaggacctgacccaggactag

SEQ ID NO: 10215 - DNA, 420 bp, synthetic construct
  source 1..420: mol_type = other DNA; note = Synthetic coding sequence
atgccctggagagccggcaacggcgtgggcctggaggcccaggccggcacccaggaggccggccccgaggagtactgccaggaggagctgggcgccgaggaggagatggccgccagagccgcctggcccgtgctgagaagcgtgaacagcagagagctgagcagaatcatcatctgcaaccacagccccagaatcgtgctgcccgtgtggctgaactactacggcaagctgctgccctacctgaccctgctgcccggcagagacttcagaatccacaacttcagaagccacccctggctgttcagagacgccagaacccacgacaagctgctggtgaaccagaccgagctgttcgtgcccagcagcaacgtgaacggccagcccgtgttcgccaacatcaccctgcagtgcatcccctag

SEQ ID NO: 10216 - DNA, 582 bp, synthetic construct
  source 1..582: mol_type = other DNA; note = Synthetic coding sequence
atggagggctgcgtgagcaacctgatggtgtgcaacctggcctacagcggcaagctggaggagctgaaggagagcatcctggccgacaagagcctggccaccagaaccgaccaggccggctggagccccctgcacatcgccgccagcgccggcagagacgagatcgtgaaggccctgctgggcaagggcgcccaggtgaacgccgtgaaccagaacggctgcacccccctgcactacgccgccagcaagaacagacacgagatcgccgtgatgctgctggagggcggcgccaaccccgacgccaaggaccactacgaggccaccgccatgcacagagccgccgccaagggcaacctgaagatgatccacatcctgctgtactacaaggccagcaccaacatccaggacaccgagggcaacacccccctgcacctggcctgcgacgaggagagagtggaggaggccaagctgctggtgagccagggcgccagcatctacatcgagaacaaggaggagaagacccccctgcaggtggccaagggcggcctgggcctgatcctgaagagaatggtggagggctag

SEQ ID NO: 10217 - DNA, 612 bp, synthetic construct
  source 1..612: mol_type = other DNA; note = Synthetic coding sequence
atgagcgagaacgccgcccccggcctgatcagcgagctgaagctggccgtgccctggggccacatcgccgccaaggcctggggcagcctgcagggcccccccgtgctgtgcctgcacggctggctggacaacgccagcagcttcgacagactgatccccctgctgccccaggacttctactacgtggccatggacttcggcggccacggcctgagcagccactacagccccggcgtgccctactacctgcagaccttcgtgagcgagatcagaagagtggtggccgccctgaagtggaacagattcagcatcctgggccacagcttcggcggcgtggtgggcggcatgttcttctgcaccttccccgagatggtggacaagctgatcctgctggacacccccctgttcctgctggagagcgacgagatggagaacctgctgacctacaagagaagagccatcgagcacgtgctgcaggtggaggccagccaggagcccagccacgtgttcagcctgaagcagctgctgcagagacagagaaccgccctgaccagcagcgccggcagctgcgtgagaatccccagcggcagctgcagacccatgagctgctag

SEQ ID NO: 10218 - DNA, 765 bp, synthetic construct
  source 1..765: mol_type = other DNA; note = Synthetic coding sequence
atgcccgccggcagcatgagcaccaccggctaccccggcgtgtgcagcaccaccagctacagaacccactgctacatccccgtgaccagcagcgtgaccctgagcagcagcgacctgagccccaccttcggccactgcctgcccagcagctaccagggcaacctgtggctgctggactactgccaggagagctacggcgaggcccccacctgcaagagccccagctgcgagcccaagacctgcagcaccaccggctgcgaccccagcaacagcagcgtgccctgcaacagccccagcgccggccaggtgttcagcgtgtgcgagaccaccaacgtgagccccagccccagctgcagccccagcacccagaccaacggctacgtgtgcaactgccacatccccaccagaaacgccagcaaggcctgccagaccctgagaaacggcagcaactgcttcggccagctgaactgcctgagcaagagcttccagaccctgaaccactgcagactgagcaccctgggctacaagagctaccagaacccctgcttcatccccagctacgtgagccccctgtgctacatcagcaacagctgccagccccagagctacctggtgagaaactaccactacagcagctacagacccaccagctgcagacccctgagctacctgagcagaagcttcagaagcctgagctacatccccagcaccttcccccccctgagatacctgtgcagcggcagcagacccctgaagtgctactag

SEQ ID NO: 10219 - DNA, 1338 bp, synthetic construct
  source 1..1338: mol_type = other DNA; note = Synthetic coding sequence
atgagagagatcgtgcacctgcaggccggccagtgcggcaaccagatcggcgccaagttctgggaggtgatcagcgacgagcacggcatcgaccccaccggcacctaccacggcgacagcgacctgcagctggagagaatcaacgtgtactacaacgaggccaccggcggcaagtacgtgcccagagccgtgctggtggacctggagcccggcaccatggacagcgtgagaagcggccccttcggccagatcttcagacccgacaacttcgtgttcggccagagcggcgccggcaacaactgggccaagggccactacaccgagggcgccgagctggtggacagcgtgctggacgtggtgagaaaggaggccgagagctgcgactgcctgcagggcttccagctgacccacagcctgggcggcggcaccggcagcggcatgggcaccctgctgatcagcaagatcagagaggagtaccccgacagaatcatgaacaccttcagcgtggtgcccagccccaaggtgagcgacaccgtggtggagccctacaacgccaccctgagcgtgcaccagctggtggagaacaccgacgagacctactgcatcgacaacgaggccctgtacgacatctgcttcagaaccctgaagctgaccacccccacctacggcgacctgaaccacctggtgagcgccaccatgagcggcgtgaccacctgcctgagattccccggccagctgaacgccgacctgagaaagctggccgtgaacatggtgcccttccccagactgcacttcttcatgcccggcttcgcccccctgaccagcagaggcagccagcagtacagagccctgaccgtgcccgagctgacccagcagatgttcgacgccaagaacatgatggccgcctgcgaccccagacacggcagatacctgaccgtggccgccgtgttcagaggcagaatgagcatgaaggaggtggacgagcagatgctgaacgtgcagaacaagaacagcagctacttcgtggagtggatccccaacaacgtgaagaccgccgtgtgcgacatcccccccagaggcctgaagatgagcgccaccttcatcggcaacagcaccgccatccaggagctgttcaagagaatcagcgagcagttcaccgccatgttcagaagaaaggccttcctgcactggtacaccggcgagggcatggacgagatggagttcaccgaggccgagagcaacatgaacgacctggtgagcgagtaccagcagtaccaggacgccaccgccgaggaggagggcgagttcgaggaggaggccgaggaggaggtggcctag

SEQ ID NO: 10220 - DNA, 750 bp, synthetic construct
  source 1..750: mol_type = other DNA; note = Synthetic coding sequence
atggccgagagaggcgagctggacctgaccggcgccaagcagaacaccggcgtgtggctggtgaaggtgcccaagtacctgagccagcagtgggccaaggccagcggcagaggcgaggtgggcaagctgagaatcgccaagacccagggcagaaccgaggtgagcttcaccctgaacgaggacctggccaacatccacgacatcggcggcaagcccgccagcgtgagcgcccccagagagcaccccttcgtgctgcagagcgtgggcggccagaccctgaccgtgttcaccgagagcagcagcgacaagctgagcctggagggcatcgtggtgcagagagccgagtgcagacccgccgccagcgagaactacatgagactgaagagactgcagatcgaggagagcagcaagcccgtgagactgagccagcagctggacaaggtggtgaccaccaactacaagcccgtggccaaccaccagtacaacatcgagtacgagagaaagaagaaggaggacggcaagagagccagagccgacaagcagcacgtgctggacatgctgttcagcgccttcgagaagcaccagtactacaacctgaaggacctggtggacatcaccaagcagcccgtggtgtacctgaaggagatcctgaaggagatcggcgtgcagaacgtgaagggcatccacaagaacacctgggagctgaagcccgagtacagacactaccagggcgaggagaagagcgactag

SEQ ID NO: 10221 - DNA, 2511 bp, synthetic construct
  source 1..2511: mol_type = other DNA; note = Synthetic coding sequence
atgtggagcctgggctgcgtgatcgccgagctgttcctgggctggcccctgtaccccggcgccagcgagtacgaccagatcagatacatcagccagacccagggcctgcccgccgagtacctgctgagcgccggcaccaagaccaccagattcttcaacagagaccccaacctgggctaccccctgtggagactgaagacccccgaggagcacgagctggagaccggcatcaagagcaaggaggccagaaagtacatcttcaactgcctggacgacatggcccaggtgaacatgagcaccgacctggagggcaccgacatgctggccgagaaggccgacagaagagagtacatcgacctgctgaagaagatgctgaccatcgacgccgacaagagaatcacccccctgaagaccctgaaccaccagttcgtgaccatgacccacctgctggacttcccccacagcaaccacgtgaagagctgcttccagaacatggagatctgcaagagaagagtgcacatgtacgacaccgtgagccagatcaagagccccttcaccacccacgtggcccccaacaccagcaccaacctgaccatgagcttcagcaaccagctgaacaccgtgcacaaccaggccagcgtgctggccagcagcagcaccgccgccgccgccaccctgagcctggccaacagcgacgtgagcctgctgaactaccagagcgccctgtaccccagcagcgccgcccccgtgcccggcgtggcccagcagggcgtgagcctgcagcccggcaccacccagatctgcacccagaccgaccccttccagcagaccttcatcgtgtgcccccccgccttccagaccggcctgcaggccaccaccaagcacagcggcttccccgtgagaatggacaacgccgtgcccatcgtgccccaggcccccgccgcccagcccctgcagatccagagcggcgtgctgacccagggcagctgcacccccctgatggtggccaccctgcacccccaggtggccaccatcaccccccagtacgccgtgcccttcaccctgagctgcgccgccggcagacccgccctggtggagcagaccgccgccgtgctgcaggcctggcccggcggcacccagcagatcctgctgcccagcacctggcagcagctgcccggcgtggccctgcacaacagcgtgcagcccaccgccatgatccccgaggccatgggcagcggccagcagctggccgactggagaaacgcccacagccacggcaaccagtacagcaccatcatgcagcagcccagcctgctgaccaaccacgtgaccctggccaccgcccagcccctgaacgtgggcgtggcccacgtggtgagacagcagcagagcagcagcctgcccagcaagaagaacaagcagagcgcccccgtgagcagcaagagcagcctggacgtgctgcccagccaggtgtacagcctggtgggcagcagccccctgagaaccaccagcagctacaacagcctggtgcccgtgcaggaccagcaccagcccatcatcatccccgacacccccagcccccccgtgagcgtgatcaccatcagaagcgacaccgacgaggaggaggacaacaagtacaagcccagcagcagcggcctgaagcccagaagcaacgtgatcagctacgtgaccgtgaacgacagccccgacagcgacagcagcctgagcagcccctacagcaccgacaccctgagcgccctgagaggcaacagcggcagcgtgctggagggccccggcagagtggtggccgacggcaccggcaccagaaccatcatcgtgccccccctgaagacccagctgggcgactgcaccgtggccacccaggccagcggcctgctgagcaacaagaccaagcccgtggccagcgtgagcggccagagcagcggctgctgcatcacccccaccggctacagagcccagagaggcggcaccagcgccgcccagcccctgaacctgagccagaaccagcagagcagcgccgcccccaccagccaggagagaagcagcaaccccgcccccagaagacagcaggccttcgtggcccccctgagccaggccccctacaccttccagcacggcagccccctgcacagcaccggccacccccacctggcccccgcccccgcccacctgcccagccaggcccacctgtacacctacgccgcccccaccagcgccgccgccctgggcagcaccagcagcatcgcccacctgttcagcccccagggcagcagcagacacgccgccgcctacaccacccaccccagcaccctggtgcaccaggtgcccgtgagcgtgggccccagcctgctgaccagcgccagcgtggcccccgcccagtaccagcaccagttcgccacccagagctacatcggcagcagcagaggcagcaccatctacaccggctaccccctgagccccaccaagatcagccagtacagctacctgtag

SEQ ID NO: 10222 - DNA, 2352 bp, synthetic construct
  source 1..2352: mol_type = other DNA; note = Synthetic coding sequence
atgagccaggtgaagagcagctacagctacgacgcccccagcgacttcatcaacttcagcagcctggacgacgagggcgacacccagaacatcgacagctggttcgaggagaaggccaacctggagaacaagctgctgggcaagaacggcaccggcggcctgttccagggcaagacccccctgagaaaggccaacctgcagcaggccatcgtgacccccctgaagcccgtggacaacacctactacaaggaggccgagaaggagaacctggtggagcagagcatccccagcaacgcctgcagcagcctggaggtggaggccgccatcagcagaaagacccccgcccagccccagagaagaagcctgagactgagcgcccagaaggacctggagcagaaggagaagcaccacgtgaagatgaaggccaagagatgcgccacccccgtgatcatcgacgagatcctgcccagcaagaagatgaaggtgagcaacaacaagaagaagcccgaggaggagggcagcgcccaccaggacaccgccgagaagaacgccagcagccccgagaaggccaagggcagacacaccgtgccctgcatgccccccgccaagcagaagttcctgaagagcaccgaggagcaggagctggagaagagcatgaagatgcagcaggaggtggtggagatgagaaagaagaacgaggagttcaagaagctggccctggccggcatcggccagcccgtgaagaagagcgtgagccaggtgaccaagagcgtggacttccacttcagaaccgacgagagaatcaagcagcaccccaagaaccaggaggagtacaaggaggtgaacttcaccagcgagctgagaaagcaccccagcagccccgccagagtgaccaagggctgcaccatcgtgaagcccttcaacctgagccagggcaagaagagaaccttcgacgagaccgtgagcacctacgtgcccctggcccagcaggtggaggacttccacaagagaacccccaacagataccacctgagaagcaagaaggacgacatcaagaccggcagctgcagcgtgacccaggccggcgtgcagtggagagaccacggcagcctgcagtgccccacccccggcctgaagcagagcagctgcctgagcctgcccaacctgctgcccagcaagagcagcgtgaccaagatctgcagagacccccagacccccgtgctgcagaccaagcacagagccagagccgtgacctgcaagagcaccgccgagctggaggccgaggagctggagaagctgcagcagtacaagttcaaggccagagagctggaccccagaatcctggagggcggccccatcctgcccaagaagccccccgtgaagccccccaccgagcccatcggcttcgacctggagatcgagaagagaatccaggagagagagagcaagaagaagaccgaggacgagcacttcgagttccacagcagaccctgccccaccaagatcctggaggacgtggtgggcgtgcccgagaagaaggtgctgcccatcaccgtgcccaagagccccgccttcgccctgaagaacagaatcagaatgcccaccaaggaggacgaggaggaggacgagcccgtggtgatcaaggcccagcccgtgccccactacggcgtgcccttcaagccccagatccccgaggccagaaccgtggagatctgccccttcagcttcgacagcagagacaaggagagacagctgcagaaggagaagaagatcaaggagctgcagaagggcgaggtgcccaagttcaaggccctgcccctgccccacttcgacaccatcaacctgcccgagaagaaggtgaagaacgtgacccagatcgagcccttctgcctggagaccgacagaagaggcgccctgaaggcccagacctggaagcaccagctggaggaggagctgagacagcagaaggaggccgcctgcttcaaggccagacccaacaccgtgatcagccaggagcccttcgtgcccaagaaggagaagaagagcgtggccgagggcctgagcggcagcctggtgcaggagcccttccagctggccaccgagaagagagccaaggagagacaggagctggagaagagaatggccgaggtggaggcccagaaggcccagcagctggaggaggccagactgcaggaggaggagcagaagaaggaggagctggccagactgagaagagagctggtgcacaaggccaaccccatcagaaagtaccagggcctggagatcaagagcagcgaccagcccctgaccgtgcccgtgagccccaagttcagcaccagattccactgctag

SEQ ID NO: 10223 - DNA, 2061 bp, synthetic construct
  source 1..2061: mol_type = other DNA; note = Synthetic coding sequence
atgggcagctacctgagcgtgcccgcctacttcaccagcagagacctgttcagatgcagcgagtgccaggacagcctgaccaactggtactacgagaaggacggcaagctgtactgccccaaggactactggggcaagttcggcgagttctgccacggctgcagcctgctgatgaccggccccttcatggtggccggcgagttcaagtaccaccccgagtgcttcgcctgcatgagctgcaaggtgatcatcgaggacggcgacgcctacgccctggtgcagcacgccaccctgtactgcggcaagtgccacaacgaggtggtgctggcccccatgttcgagagactgagcaccgagagcgtgcaggagcagctgccctacagcgtgaccctgatcagcatgcccgccaccaccgagggcagaagaggcttcagcgtgagcgtggagagcgcctgcagcaactacgccaccaccgtgcaggtgaaggaggtgaacagaatgcacatcagccccaacaacagaaacgccatccaccccggcgacagaatcctggagatcaacggcacccccgtgagaaccctgagagtggaggaggtggaggacgccatcagccagaccagccagaccctgcagctgctgatcgagcacgaccccgtgagccagagactggaccagctgagactggaggccagactggccccccacatgcagaacgccggccacccccacgccctgagcaccctggacaccaaggagaacctggagggcaccctgagaagaagaagcctgagaagaagcaacagcatcagcaagagccccggccccagcagccccaaggagcccctgctgttcagcagagacatcagcagaagcgagagcctgagatgcagcagcagctacagccagcagatcttcagaccctgcgacctgatccacggcgaggtgctgggcaagggcttcttcggccaggccatcaaggtgacccacaaggccaccggcaaggtgatggtgatgaaggagctgatcagatgcgacgaggagacccagaagaccttcctgaccgaggtgaaggtgatgagaagcctggaccaccccaacgtgctgaagttcatcggcgtgctgtacaaggacaagaagctgaacctgctgaccgagtacatcgagggcggcaccctgaaggacttcctgagaagcatggaccccttcccctggcagcagaaggtgagattcgccaagggcatcgccagcggcatggcctacctgcacagcatgtgcatcatccacagagacctgaacagccacaactgcctgatcaagctggacaagaccgtggtggtggccgacttcggcctgagcagactgatcgtggaggagagaaagagagcccccatggagaaggccaccaccaagaagagaaccctgagaaagaacgacagaaagaagagatacaccgtggtgggcaacccctactggatggcccccgagatgctgaacggcaagagctacgacgagaccgtggacatcttcagcttcggcatcgtgctgtgcgagatcatcggccaggtgtacgccgaccccgactgcctgcccagaaccctggacttcggcctgaacgtgaagctgttctgggagaagttcgtgcccaccgactgcccccccgccttcttccccctggccgccatctgctgcagactggagcccgagagcagagccccccccggcgccgccggcgagggccccggctgcgccgacgacgagggccccgtgagaagacagggcaaggtgaccatcaagtacgaccccaaggagctgagaaagcacctgaacctggaggagtggatcctggagcagctgaccagactgtacgactgccaggaggaggagatcagcgagctggagatcgacgtggacgagctgctggacatggagagcgacgacgcctgggccagcagagtgaaggagctgctggtggactgctacaagcccaccgaggccttcatcagcggcctgctggacaagatcagagccatgcagaagctgagcaccccccagaagaagtag

SEQ ID NO: 10224 - DNA, 840 bp, synthetic construct
  source 1..840: mol_type = other DNA; note = Synthetic coding sequence
atgagagccctgaccgtgcagagagtgaagttcgccatggacctgcccctgctgaagagagccggccaggacctggccgagaagaccaagaacttcgtgagcagaagcctggtgatcggcgaggtgctgagcatggccgacatggccaccggcgtgaagtgcggcatcatctactggctgttcggcggcgccatcagaaacctgggcagccccgagcacgtgaccaagtggttccagcccctgcaggagcagaagtacaccggcatgttcgccatgaccgagagaggccacggcagcaacgccagaggcatccagaccgaggccaccttcgacctgagcgcccaggagttcgtgatcgacaccccctgcgagaacgccgagaagatgtacatcggcaacgccatgtacggcaactacgccgccgtgttcgcccagctgatcatcgacggcagaagccagggcccccactgcttcatcgtgcccgtgagagacgagaacggcagcctgtaccccggcgtgaccgccatcgacatgatgtacaaggagggcctgcacggcgtggacaacggcatcctgatcttcgacaaggtgagaatccccagagagaacctgctggacaagttcggcagcgtggcccccgacggccagtaccacagccccatcagaaacaagagcgccagattcaacgccatgctggccgccctgacccccagcagactggccgtggccttccaggccatgggcgccatgaagctgggcctgaccatcgccatcagatacagccacagaagcagaatcatcagccagaactgctgcagcgcccccgccggcctgtactag

SEQ ID NO: 10225 - DNA, 597 bp, synthetic construct
  source 1..597: mol_type = other DNA; note = Synthetic coding sequence
atgaccctgagatgcctggagcccagcggcaacggcggcgagggcaccagaagccagtggggcaccgccggcagcgccgaggagcccagcccccaggccgccagactggccaaggccctgagagagctgggccagaccggctggtactggggcagcatgaccgtgaacgaggccaaggagaagctgaaggaggcccccgagggcaccttcctgatcagagacagcagccacagcgactacctgctgaccatcagcgtgaagaccagcgccggccccaccaacctgagaatcgagtaccaggacggcaagttcagactggacagcatcatctgcgtgaagagcaagctgaagcagttcgacagcgtggtgcacctgatcgactactacgtgcagatgtgcaaggacaagagaaccggccccgaggcccccagaaacggcaccgtgcacctgtacctgaccaagcccctgtacaccagcgcccccagcctgcagcacctgtgcagactgaccatcaacaagtgcaccggcgccatctggggcctgcccctgcccaccagactgaaggactacctggaggagtacaagttccaggtgtag

SEQ ID NO: 10226 - DNA, 570 bp, synthetic construct
  source 1..570: mol_type = other DNA; note = Synthetic coding sequence
atggaggccgacggcgacggcgaggagctggccagactgagaagcgtgttcgccgcctgcgacgccaacagaagcggcagactggagagagaggagttcagagccctgtgcaccgagctgagagtgagacccgccgacgccgaggccgtgttccagagactggacgccgacagagacggcgccatcaccttccaggagttcgccagaggcttcctgggcagcctgagaggcggcagaagaagagactggggccccctggaccccgcccccgccgtgagcgaggccggccccgagacccacgacagcgaggaggacgagggcgacgaggacgccgccgccgccctggccaccagctgcggccccgccagccccggcagagcctggcaggacttccaggccagactgggcgacgaggccaagttcatccccagattcggctacaccatcagcaagcccgccttcgtgttcgtgagacacctgatcaccctgtgcgccctgagctgggccaagaaggagggcagagagaccctgtggaccatcgaggagggcggcgccaagatggccgagtag

SEQ ID NO: 10227 - DNA, 300 bp, synthetic construct
  source 1..300: mol_type = other DNA; note = Synthetic coding sequence
gccctggacgtggccgtgaagaccttcccccccgagagacacgtggccgtgaagtgcttcggcaagaagaaggagaagaagaacaacgccaacagccccgccagcgtgagcaaccccaccgtgaccaagcacgccttcggcatggaggaggagctgcagagagagggcagcatcgagaccctgagcaacagcagcggcagcaccagcggcagcatccccagaaacttcgacggctacagaagccccctgcccaccaacgagagccagcccctgagcctgttccccaccggcttcccctag

SEQ ID NO: 10228 - DNA, 1170 bp, synthetic construct
  source 1..1170: mol_type = other DNA; note = Synthetic coding sequence
atggagagaaaggacttcgagacctggctggacaacatcagcgtgaccttcctgagcctgaccgacctgcagaagaacgagaccctggaccacctgatcagcctgagcggcgccgtgcagctgagacacctgagcaacaacctggagaccctgctgaagagagacttcctgaagctgctgcccctggagctgagcttctacctgctgaagtggctggacccccagaccctgctgacctgctgcctggtgagcaagcagtggaacaaggtgatcagcgcctgcaccgaggtgtggcagaccgcctgcaagaacctgggctggcagatcgacgacagcgtgcaggacgccctgcactggaagaaggtgtacctgaaggccatcctgagaatgaagcagctggaggaccacgaggccttcgagaccagcagcctgatcggccacagcgccagagtgtacgccctgtactacaaggacggcctgctgtgcaccgtgttcagcgtggactacaacgacgagctggacatcctggtgagcggcagcgccgacttcaccgtgaaggtgtgggccctgagcgccggcacctgcctgaacaccctgaccggccacaccgagtgggtgaccaaggtggtgctgcagaagtgcaaggtgaagagcctgctgcacagccccggcgactacatcctgctgagcgccgacaagtacgagatcaagatctggcccatcggcagagagatcaactgcaagtgcctgaagaccctgagcgtgagcgaggacagaagcatctgcctgcagcccagactgcacttcgacggcaagtacatcgtgtgcagcagcgccctgggcctgtaccagtgggacttcgccagctacgacatcctgagagtgatcaagacccccgagatcgccaacctggccctgctgggcttcggcgacatcttcgccctgctgttcgacaacagatacctgtacatcatggacctgagaaccgagagcctgatcagcagatggcccctgcccgagtacagaaagagcaagagaggcagcagcttcctggccggcgaggccagctggctgaacggcctggacggccacaacgacaccggcctggtgttcgccaccagcatgcccgaccacagcatccacctggtgctgtggaaggagcacggctag

SEQ ID NO: 10229 - DNA, 2439 bp, synthetic construct
  source 1..2439: mol_type = other DNA; note = Synthetic coding sequence
atgaagaagcagttcaacagaatgagacagctggccaaccagaccgtgggcagagccgagaagaccgaggtgctgagcgaggacctgctgcaggtggagaagagactggagctggtgaagcaggtgagccacagcacccacaagaagctgaccgcctgcctgcagggccagcagggcgccgaggccgacaagagaagcaagaagctgcccctgaccaccctggcccagtgcctgatggagggcagcgccatcctgggcgacgacaccctgctgggcaagatgctgaagctgtgcggcgagaccgaggacaagctggcccaggagctgatccacttcgagctgcaggtggagagagacgtgatcgagcccctgttcctgctggccgaggtggagatccccaacatccagaagcagagaaagcacctggccaagctggtgctggacatggacagcagcagaaccagatggcagcagaccagcaagagcagcggcctgagcagcagcctgcagcccgccggcgccaaggccgacgccctgagagaggagatggaggaggccgccaacagagtggagatctgcagagaccagctgagcgccgacatgtacagcttcgtggccaaggagatcgactacgccaactacttccagaccctgatcgaggtgcaggccgagtaccacagaaagagcctgaccctgctgcaggccgtgctgccccagatcaaggcccagcaggaggcctgggtggagaagcccagcttcggcaagcccctggaggagcacctgaccatcagcggcagagagatcgccttccccatcgaggcctgcgtgaccatgctgctggagtgcggcatgcaggaggagggcctgttcagagtggcccccagcgccagcaagctgaagaagctgaaggccgccctggactgctgcgtggtggacgtgcaggagtacagcgccgacccccacgccatcgccggcgccctgaagagctacctgagagagctgcccgagcccctgatgaccttcgagctgtacgacgagtggatccaggccagcaacgtgcaggagcaggacaagaagctgcaggccctgtggaacgcctgcgagaagctgcccaaggccaaccacaacaacatcagatacctgatcaagttcctgagcaagctgagcgagtaccaggacgtgaacaagatgacccccagcaacatggccatcgtgctgggccccaacctgctgtggccccaggccgagggcaacatcaccgagatgatgaccaccgtgagcctgcagatcgtgggcatcatcgagcccatcatccagcacgccgactggttcttccccggcgagatcgagttcaacatcaccggcaactacggcagccccgtgcacgtgaaccacaacgccaactacagcagcatgcccagccccgacatggaccccgccgacagaagacagcccgagcaggccagaagacccctgagcgtggccaccgacaacatgatgctggagttctacaagaaggacggcatgggcgtgagagtgatggacaccaactgggtggccagaagaggcagcagcgccggcagaaaggtgagctgcgccccccccagcatgcagccccccgccccccccgccgagctggccgcccccctgcccagccccctgcccgagcagcccctggacagccccgccgcccccgccctgagccccagcggcctgggcctgcagcccggccccgagagaaccagcaccaccaagagcaaggagctgagccccggcagcgcccagaagggcagccccggcagcagccagggcaccgcctgcgccggcacccagcccggcgcccagcccggcgcccagcccggcgccagccccagccccagccagccccccgccgaccagagcccccacaccctgagaaaggtgagcaagaagctggcccccatcccccccaaggtgcccttcggccagcccggcgccatggccgaccagagcgccggccagcccagccccgtgagcctgagccccaccccccccagcacccccagcccctacggcctgagctacccccagggctacagcctggccagcggccagctgagccccgccgccgccccccccctggccagccccagcgtgttcaccagcaccctgagcaagagcagacccacccccaagcccagacagagacccaccctgccccccccccagccccccaccgtgaacctgagcgccagcagcccccagagcaccgaggcccccatgctggacggcatgagccccggcgagagcatgagcaccgacctggtgcacttcgacatccccagcatccacatcgagctgggcagcaccctgagactgagccccctggagcacatgagaagacacagcgtgaccgacaagagagacagcgaggaggagagcgagagcaccgccctgtag

SEQ ID NO: 10230 - DNA, 1119 bp, synthetic construct
  source 1..1119: mol_type = other DNA; note = Synthetic coding sequence
atgagcaagagcgagagccccaaggagcccgagcagctgagaaagctgttcatcggcggcctgagcttcgagaccaccgacgagagcctgagaagccacttcgagcagtggggcaccctgaccgactgcgtggtgatgagagaccccaacaccaagagaagcagaggcttcggcttcgtgacctacgccaccgtggaggaggtggacgccgccatgaacgccagaccccacaaggtggacggcagagtggtggagcccaagagagccgtgagcagagaggacagccagagacccggcgcccacctgaccgtgaagaagatcttcgtgggcggcatcaaggaggacaccgaggagcaccacctgagagactacttcgagcagtacggcaagatcgaggtgatcgagatcatgaccgacagaggcagcggcaagaagagaggcttcgccttcgtgaccttcgacgaccacgacagcgtggacaagatcgtgatccagaagtaccacaccgtgaacggccacaactgcgaggtgagaaaggccctgagcaagcaggagatggccagcgccagcagcagccagagaggcagaagcggcagcggcaacttcggcggcggcagaggcggcggcttcggcggcaacgacaacttcggcagaggcggcaacttcagcggcagaggcggcttcggcggcagcagaggcggcggcggctacggcggcagcggcgacggctacaacggcttcggcaacgacggcggctacggcggcggcggccccggctacagcggcggcagcagaggctacggcagcggcggccagggctacggcaaccagggcagcggctacggcggcagcggcagctacgacagctacaacaacggcggcggcggcggcttcggcggcggcagcggcagcaacttcggcggcggcggcagctacaacgacttcggcaactacaacaaccagagcagcaacttcggccccatgaagggcggcaacttcggcggcagaagcagcggcccctacggcggcggcggccagtacttcgccaagcccagaaaccagggcggctacggcggcagcagcagcagcagcagctacggcagcggcagaagattctag

SEQ ID NO: 10231 - DNA, 1491 bp, synthetic construct
  source 1..1491: mol_type = other DNA; note = Synthetic coding sequence
atgaagctgggcaagaagcccatgtacaagcccgtggacccctacagcagaatgcagagcacctacaactacaacatgagaggcggcgcctacccccccagatacttctaccccttccccgtgccccccctgctgtaccaggtggagctgagcgtgggcggccagcagttcaacggcaagggcaagaccagacaggccgccaagcacgacgccgccgccaaggccctgagaatcctgcagaacgagcccctgcccgagagactggaggtgaacggcagagagagcgaggaggagaacctgaacaagagcgagatcagccaggtgttcgagatcgccctgaagagaaacctgcccgtgaacttcgaggtggccagagagagcggccccccccacatgaagaacttcgtgaccaaggtgagcgtgggcgagttcgtgggcgagggcgagggcaagagcaagaagatcagcaagaagaacgccgccatcgccgtgctggaggagctgaagaagctgccccccctgcccgccgtggagagagtgaagcccagaatcaagaagaagaccaagcccatcgtgaagccccagaccagccccgagtacggccagggcatcaaccccatcagcagactggcccagatccagcaggccaagaaggagaaggagcccgagtacaccctgctgaccgagagaggcctgcccagaagaagagagttcgtgatgcaggtgaaggtgggcaaccacaccgccgagggcaccggcaccaacaagaaggtggccaagagaaacgccgccgagaacatgctggagatcctgggcttcaaggtgccccaggcccagcccaccaagcccgccctgaagagcgaggagaagacccccatcaagaagcccggcgacggcagaaaggtgaccttcttcgagcccggcagcggcgacgagaacggcaccagcaacaaggaggacgagttcagaatgccctacctgagccaccagcagctgcccgccggcatcctgcccatggtgcccgaggtggcccaggccgtgggcgtgagccagggccaccacaccaaggacttcaccagagccgcccccaaccccgccaaggccaccgtgaccgccatgatcgccagagagctgctgtacggcggcaccagccccaccgccgagaccatcctgaagaacaacatcagcagcggccacgtgccccacggccccctgaccagacccagcgagcagctggactacctgagcagagtgcagggcttccaggtggagtacaaggacttccccaagaacaacaagaacgagttcgtgagcctgatcaactgcagcagccagccccccctgatcagccacggcatcggcaaggacgtggagagctgccacgacatggccgccctgaacatcctgaagctgctgagcgagctggaccagcagagcaccgagatgcccagaaccggcaacggccccatgagcgtgtgcggcagatgctag

SEQ ID NO: 10232 - DNA, 5835 bp, synthetic construct
  source 1..5835: mol_type = other DNA; note = Synthetic coding sequence
atgagcaacttctacgaggagagaaccaccatgatcgccgccagagacctgcaggagttcgtgcccttcggcagagaccactgcaagcaccaccccaacgccctgaacctgcagctgagacagctgcagcccgccagcgagctgtggagcagcgacggcgccgccggcctggtgggcagcctgcaggaggtgaccatccacgagaagcagaaggagagctggcagctgagaaagggcgtgagcgagatcggcgaggacgtggactacgacgaggagctgtacgtggccggcaacatggtgatctggagcaagggcagcaagagccaggccctggccgtgtacaaggccttcaccgtggacagccccgtgcagcaggccctgtggtgcgacttcatcatcagccaggacaagagcgagaaggcctacagcagcaacgaggtggagaagtgcatctgcatcctgcagagcagctgcatcaacatgcacagcatcgagggcaaggactacatcgccagcctgcccttccaggtggccaacgtgtggcccaccaagtacggcctgctgttcgagagaagcgccagcagccacgaggtgccccccggcagccccagagagcccctgcccaccatgttcagcatgctgcaccccctggacgagatcacccccctggtgtgcaagagcggcagcctgttcggcagcagcagagtgcagtacgtggtggaccacgccatgaagatcgtgttcctgaacaccgaccccagcatcgtgatgacctacgacgccgtgcagaacgtgcacagcgtgtggaccctgagaagagtgaagagcgaggaggagaacgtggtgctgaagttcagcgagcagggcggcaccccccagaacgtggccaccagcagcagcctgaccgcccacctgagaagcctgagcaagggcgacagccccgtgaccagccccttccagaactacagcagcatccacagccagagcagaagcaccagcagccccagcctgcacagcagaagccccagcatcagcaacatggccgccctgagcagagcccacagccccgccctgggcgtgcacagcttcagcggcgtgcagagattcaacatcagcagccacaaccagagccccaagagacacagcatcagccacagccccaacagcaacagcaacggcagcttcctggcccccgagaccgagcccatcgtgcccgagctgtgcatcgaccacctgtggaccgagaccatcaccaacatcagagagaagaacagccaggccagcaaggtgttcatcaccagcgacctgtgcggccagaagttcctgtgcttcctggtggagagccagctgcagctgagatgcgtgaagttccaggagagcaacgacaagacccagctgatcttcggcagcgtgaccaacatccccgccaaggacgccgcccccgtggagaagatcgacaccatgctggtgctggagggcagcggcaacctggtgctgtacaccggcgtggtgagagtgggcaaggtgttcatccccggcctgcccgcccccagcctgaccatgagcaacaccatgcccagacccagcacccccctggacggcgtgagcacccccaagcccctgagcaagctgctgggcagcctggacgaggtggtgctgctgagccccgtgcccgagctgagagacagcagcaagctgcacgacagcctgtacaacgaggactgcaccttccagcagctgggcacctacatccacagcatcagagaccccgtgcacaacagagtgaccctggagctgagcaacggcagcatggtgagaatcaccatccccgagatcgccaccagcgagctggtgcagacctgcctgcaggccatcaagttcatcctgcccaaggagatcgccgtgcagatgctggtgaagtggtacaacgtgcacagcgcccccggcggccccagctaccacagcgagtggaacctgttcgtgacctgcctgatgaacatgatgggctacaacaccgacagactggcctggaccagaaacttcgacttcgagggcagcctgagccccgtgatcgcccccaagaaggccagacccagcgagaccggcagcgacgacgactgggagtacctgctgaacagcgactaccaccagaacgtggagagccacctgctgaacagaagcctgtgcctgagccccagcgaggccagccagatgaaggacgaggacttcagccagaacctgagcctggacagcagcaccctgctgttcacccacatccccgccatcttcttcgtgctgcacctggtgtacgaggagctgaagctgaacaccctgatgggcgagggcatctgcagcctggtggagctgctggtgcagctggccagagacctgaagctgggcccctacgtggaccactactacagagactaccccaccctggtgagaaccaccggccaggtgtgcaccatcgaccccggccagaccggcttcatgcaccaccccagcttcttcaccagcgagccccccagcatctaccagtgggtgagcagctgcctgaagggcgagggcatgcccccctacccctacctgcccggcatctgcgagagaagcagactggtggtgctgagcatcgccctgtacatcctgggcgacgagagcctggtgagcgacgagagcagccagtacctgaccagaatcaccatcgccccccagaagctgcaggtggagcaggaggagaacagattcagcttcagacacagcaccagcgtgagcagcctggccgagagactggtggtgtggatgaccaacgtgggcttcaccctgagagacctggagaccctgcccttcggcatcgccctgcccatcagagacgccatctaccactgcagagagcagcccgccagcgactggcccgaggccgtgtgcctgctgatcggcagacaggacctgagcaagcaggcctgcgagggcaacctgcccaagggcaagagcgtgctgagcagcgacgtgcccagcggcaccgagaccgaggaggaggacgacggcatgaacgacatgaaccacgaggtgatgagcctgatctggagcgaggacctgagagtgcaggacgtgagaagactgctgcagagcgcccaccccgtgagagtgaacgtggtgcagtaccccgagctgagcgaccacgagttcatcgaggagaaggagaacagactgctgcagctgtgccagagaaccatggccctgcccgtgggcagaggcatgttcaccctgttcagctaccaccccgtgcccaccgagcccctgcccatccccaagctgaacctgaccggcagagccccccccagaaacaccaccgtggacctgaacagcggcaacatcgacgtgccccccaacatgaccagctgggccagcttccacaacggcgtggccgccggcctgaagatcgcccccgccagccagatcgacagcgcctggatcgtgtacaacaagcccaagcacgccgagctggccaacgagtacgccggcttcctgatggccctgggcctgaacggccacctgaccaagctggccaccctgaacatccacgactacctgaccaagggccacgagatgaccagcatcggcctgctgctgggcgtgagcgccgccaagctgggcaccatggacatgagcatcaccagactgctgagcatccacatccccgccctgctgccccccaccagcaccgagctggacgtgccccacaacgtgcaggtggccgccgtggtgggcatcggcctggtgtaccagggcaccgcccacagacacaccgccgaggtgctgctggccgagatcggcagaccccccggccccgagatggagtactgcaccgacagagagagctacagcctggccgccggcctggccctgggcatggtgtgcctgggccacggcagcaacctgatcggcatgagcgacctgaacgtgcccgagcagctgtaccagtacatggtgggcggccacagaagattccagaccggcatgcacagagagaagcacaagagccccagctaccagatcaaggagggcgacaccatcaacgtggacgtgacctgccccggcgccaccctggccctggccatgatctacctgaagaccaacaacagaagcatcgccgactggctgagagcccccgacaccatgtacctgctggacttcgtgaagcccgagttcctgctgctgagaaccctggccagatgcctgatcctgtgggacgacatcctgcccaacagcaagtgggtggacagcaacgtgccccagatcatcagagagaacagcatcagcctgagcgagatcgagctgccctgcagcgaggacctgaacctggagaccctgagccaggcccacgtgtacatcatcgccggcgcctgcctgagcctgggcttcagattcgccggcagcgagaacctgagcgccttcaactgcctgcacaagttcgccaaggacttcatgacctacctgagcgcccccaacgccagcgtgaccggcccccacaacctggagacctgcctgagcgtggtgctgctgagcctggccatggtgatggccggcagcggcaacctgaaggtgctgcagctgtgcagattcctgcacatgaagaccggcggcgagatgaactacggcttccacctggcccaccacatggccctgggcctgctgttcctgggcggcggcagatacagcctgagcaccagcaacagcagcatcgccgccctgctgtgcgccctgtacccccacttccccgcccacagcaccgacaacagataccacctgcaggccctgagacacctgtacgtgctggccgccgagcccagactgctggtgcccgtggacgtggacaccaacaccccctgctacgccctgctggaggtgacctacaagggcacccagtggtacgagcagaccaaggaggagctgatggcccccaccctgctgcccgagctgcacctgctgaagcagatcaaggtgaagggccccagatactgggagctgctgatcgacctgagcaagggcacccagcacctgaagagcatcctgagcaaggacggcgtgctgtacgtgaagctgagagccggccagctgagctacaaggaggaccccatgggctggcagagcctgctggcccagaccgtggccaacagaaacagcgaggccagagccttcaagcccgagaccatcagcgccttcaccagcgaccccgccctgctgagcttcgccgagtacttctgcaagcccaccgtgaacatgggccagaagcaggagatcctggacctgttcagcagcgtgctgtacgagtgcgtgacccaggagacccccgagatgctgcccgcctacatcgccatggaccaggccatcagaagactgggcagaagagagatgagcgagaccagcgagctgtggcagatcaagctggtgctggagttcttcagcagcagaagccaccaggagagactgcagaaccaccccaagagaggcctgttcatgaacagcgagttcctgcccgtggtgaagtgcaccatcgacaacaccctggaccagtggctgcaggtgggcggcgacatgtgcgtgcacgcctacctgagcggccagcccctggaggagagccagctgagcatgctggcctgcttcctggtgtaccacagcgtgcccgccccccagcacctgccccccatcggcctggagggcagcaccagcttcgccgagctgctgttcaagttcaagcagctgaagatgcccgtgagagccctgctgagactggcccccctgctgctgggcaacccccagcccatggtgatgtag

SEQ ID NO: 10233 - DNA, 1263 bp, synthetic construct; identical to SEQ ID NO: 9866
  source 1..1263: mol_type = other DNA; note = Synthetic coding sequence

SEQ ID NO: 10234 - DNA, 1257 bp, synthetic construct
  source 1..1257: mol_type = other DNA; note = Synthetic coding sequence
atgagagagtgcatcagcatccacgtgggccaggccggcgtgcagatcggcaacgcctgctgggagctgtactgcctggagcacggcatccagcccgacggccagatgcccagcgacaagaccatcggcggcggcgacgacagcttcaacaccttcttcagcgagaccggcgccggcaagcacgtgcccagagccgtgttcgtggacctggagcccaccgtggtggacgaggtgagaaccggcacctacagacagctgttccaccccgagcagctgatcaccggcaaggaggacgccgccaacaactacgccagaggccactacaccatcggcaaggagatcgtggacctggtgctggacagaatcagaaagctggccgacctgtgcaccggcctgcagggcttcctgatcttccacagcttcggcggcggcaccggcagcggcttcgccagcctgctgatggagagactgagcgtggactacggcaagaagagcaagctggagttcgccatctaccccgccccccaggtgagcaccgccgtggtggagccctacaacagcatcctgaccacccacaccaccctggagcacagcgactgcgccttcatggtggacaacgaggccatctacgacatctgcagaagaaacctggacatcgagagacccacctacaccaacctgaacagactgatcggccagatcgtgagcagcatcaccgccagcctgagattcgacggcgccctgaacgtggacctgaccgagttccagaccaacctggtgccctaccccagaatccacttccccctggccacctacgcccccgtgatcagcgccgagaaggcctaccacgagcagctgagcgtggccgagatcaccaacgcctgcttcgagcccgccaaccagatggtgaagtgcgaccccagacacggcaagtacatggcctgctgcatgctgtacagaggcgacgtggtgcccaaggacgtgaacgccgccatcgccaccatcaagaccaagagaaccatccagttcgtggactggtgccccaccggcttcaaggtgggcatcaactaccagccccccaccgtggtgcccggcggcgacctggccaaggtgcagagagccgtgtgcatgctgagcaacaccaccgccatcgccgaggcctgggccagactggacctggccgccctggagaaggactacgaggaggtgggcgtggacagcgtggaggccgaggccgaggagggcgaggagtactag

SEQ ID NO: 10235 - DNA, 417 bp, synthetic construct
  source 1..417: mol_type = other DNA; note = Synthetic coding sequence
atgcagctgccccccttcgacatgtggaaggactacttcaacctgagccaggtggtgtgggccctgatcgccagcagaggccagagactggagacccaggagatcgaggagcccagccccggcccccccctgggccaggaccagggcctgggcgcccccggcgccaacggcggcctgggcaccctgtgcaacttctgcaagcacaacggcgagagcagacacgtgtacagcagccaccagctgaagacccccgacggcgtggtggtgtgccccatcctgagacactacgtgtgccccgtgtgcggcgccaccggcgaccaggcccacaccctgaagtactgccccctgaacggcggccagcagagcctgtacagaagaagcggcagaaacagcgccggcagaagagtgaagagatag

SEQ ID NO: 10236 - DNA, 375 bp, synthetic construct
  source 1..375: mol_type = other DNA; note = Synthetic coding sequence
atgagagccagcccctgcatcagccagcccgccgccagctggcaccccagacccagcgccctgagacccaccgccggcagcggccccgacaccagaacccccggcaccgtggaggacggcagcgccccctgccccgccttcagaagccccgccgtgagcccctgcggcgaggagccctgctgcttccagatcagccccgccgaggagaccctggagctgggcagactggtgagccccggcaactgcgacaccctgagccccagagccgccggcttctacgcctgccacgtgagaagcctgatcccctgcagaagcaccaagggcagatggcccctgaccgccagcgccgccggcctgagcagcttcagcggctag

SEQ ID NO: 10237 - DNA, 363 bp, synthetic construct
  source 1..363: mol_type = other DNA; note = Synthetic coding sequence
atggccgagcccagcagcgccagaagacccgtgcccctgatcgagagcgagctgtacttcctgatcgccagatacctgagcgccggcccctgcagaagagccgcccaggtgctggtgcaggagctggagcagtaccagctgctgcccaagagactggactgggagggcaacgagcacaacagaagctacgaggagctggtgctgagcaacaagcacgtggcccccgaccacctgctgcagatctgccagagaatcggccccatgctggacaaggagatcccccccagcatcagcagagtgaccagcctgctgggcgccggcagacagagcctgctgagaaccgccaagggcaccctgatctag

SEQ ID NO: 10238 - DNA, 2607 bp, synthetic construct
  source 1..2607: mol_type = other DNA; note = Synthetic coding sequence
atgatccccaagagcctggtgcaggccgccgagacccagagaggcctgtgcgagcccggcggcaagggcagagagggcagaagcggcggcaagggcgagaccagacccagaggcgtgggcacccaggagggcaagggcaccatccccggcagccccagagagaagagaggcgagagaggcgagggcgaccccgccctgctgcccgccgaggacctgtggagactgcccggcagcaaggacagactgagaagcagcctgctgcccccccccggcccccccagcagcgacagcggccccggcccccccagcagccacagcggcaagaccgcccagggccccagaaccctgaactgggccagaaagcagagcgccagaaccagcagcaacctgtgcgcctggagcctggccatggccaccaagatggccgagatccccagcagcccctacgagcccggccagagaggcatgaaggacacccagagaggcgacgccccccagagaggcagccccgagcccagaatcctgcagctggccagagtgggcaacgtgtacctgaaggaggagagcagcagaagcggcagactggaggccaagaagtggatccccaccaagttcctggagaacctgagcgtgccccacgtggacctgggcggcaaccagctgtggagcggcggcatggaggccctgaccacccagctgggccccggcagagagggcagcagcagccccaacagcaagcaggagctgcagccctacagcggcagcagcgccctgaagcccaaccaggtgggcgagaccagcctgtacggcgtgcccatcgtgagcctggtgatcgacggccaggagagactgtgcctggcccagatcagcaacaccctgctgaagaactacagctacaacgagatccacaacagaagagtggccctgggcatcacctgcgtgcagtgcacccccgtgcagctggagatcctgagaagagccggcgccatgcccatcagcagcagaagatgcggcatgatcaccaagagagaggccgagagactgtgcaagagcttcctgggcgagcacaagccccccaagctgcccgagaacttcgccttcgacgtggtgcacgagtgcgcctggggcagcagaggcagcttcatccccgccagatacaacagcagcagagccaagtgcatcaagtgcggctactgcagcatgtacttcagccccaacaagttcatcttccacagccacagaacccccgacgccaagtacacccagcccgacgccgccaacttcaacagctggagaagacacctgaagctgagcgacaagagcgccaccgacgagctgagccacgcctgggaggacagaggcctgggcctggccaccggcgccagcggccccgccggccccggcggccccggcggcggcgccggcgtgagaagctaccccgtgatccccgtgcccagcaagggcttcggcctgctgcagaagctgcccccccccctgttcccccacccctacggcttccccaccgccttcggcctgtgccccaagaaggacgaccccgtgctgggcgccggcgagcccaagggcggcagctacgtgagcgccttcagacccgtggtgaaggacaccgagagcatcgccaagctgtacggcagcgccagagaggcctacggcgccggccccgccagaggccccggccccggcgccggcagcggcggctacgtgagccccgacttcctgagcgagggcagcagcagctacaacagcgccagccccgacgtggacaccgccgacgagcccgaggtggacgtggagagcaacagattccccgacgacgaggacgcccaggaggagaccgagcccagcgcccccagcgccggcggcggccccgacgccggcagacccgccttcggcgacctggccgccgaggacctggtgagaagacccgagagaagcccccccagcggcggcggcggctacgagctgagagagccctgcggccccctgggcggccccgcccccgccaaggtgttcgcccccgagagagacgagcacgtgaagagcgccgccgtggccctgggccccgccgccagctacgtgtgcacccccgaggcccacgagcccgacaaggaggacaaccacagccccgccgacgacctggagaccagaaagagctaccccgaccagagaagcatcagccagcccagccccgccaacaccgacagaggcgaggacggcctgaccctggacgtgaccggcacccacctggtggagaaggacatcgagaacctggccagagaggagctgcagaagctgctgctggagcagatggagctgagaaagaagctggagagagagttccagagcctgaaggacaacttccaggaccagatgaagagagagctggcctacagagaggagatggtgcagcagctgcagatcgtgagagacaccctgtgcaacgagctggaccaggagagaaaggccagatacgccatccagcagaagctgaaggaggcccacgacgccctgcaccacttcagctgcaagatgctgacccccagacactgcaccggcaactgcagcttcaagccccccctgctgccctag

SEQ ID NO: 10239 - DNA, 3585 bp, synthetic construct
  source 1..3585: mol_type = other DNA; note = Synthetic coding sequence
atgcacgacctgccccccgacagcggcgccagaagaggcggcagaggcctggccgaccacagcttccccgccggcgccagagcccccggccagccccccagcagaggcgccgcctacagaagagcctgccccagagacggcgagagaggcggcggcggcagacccagacagcaggtgagcccccccagaagcccccagagagagcccagaggcggccagctgagaacccccagaatgagacccagctgcagcagaagcctggagagcctgagagtgggcgccaagcccccccccttccagagatggcccagcgacagctggatcagatgcggcgcccacagagactgggacgagcccccccccagaggcggcagaatggacggctggagcggcgacagagccagagccgccgcccccaccggcctgcagccccccggctgcaaggaccacggctgcagcagcggcagccccttcagagaccccgccggcagcagcgtgatcagaagcggcaagggcgacagacaggagggccccagcttcctgagaccccccgccgtgaccgtgaagaagctgcagaagtggatgtacaagggcagactgctgagcctgggcatgaagggcagagccagaggcaccgcccccaaggtgaccggcacccaggccgccagccccaacgtgggcgccctgaaggtgagagagaacagagtgctgagcgtgccccccgaccagagaatcaccctgaccgacctgttcgagaacgcctacggcagcagcatgaagggcagagagctggaggagctgaaggacaacatcgagttcagaggccacaagcccctgaacagcatcaccgtgagcaagaagagaaactggctgtaccagagcaccctgagacccctgaacctggaggaggagaacaagaagtgccaggacagaagccacctgagcatcagccccgtgagcctgcccaagcaccagctgagccagagcttcctgaagagcagcaaggagtactgcacctacgtggtgtgcaacgccaccaacagcagcctgagcaagaactgcgccctggacttcaacgaggagaacgacgccgacgacgagggcgagatctggtacaaccccatccccgaggacgacgacctgggcatcagcagcgccctgagcttcggcgaggccgacagcgccgtgctgaagctgcccgccgtgaacctgagcatgctgagcggcagcgacctgatgaaggccgagagacacaccgaggacagcctgtgcagcagcgagcacgccggcgacatccagaccaccagaagcaacggcatgaaccccatccaccccgcccacagcaccgagttcgtgcagcagtacaagcagaagctgggccacaagacccaggagggcatcatggtggaggacagccccatgctgaagagccccttcgccggcagcggcatcctggccgccaccaacagcaccgagctgggcatcatggagcccagcagccccaaccccagccccgtgaagaagggcagcagcatcaactggagcctgcccgacaagatcaagagccccagaaccgtgagaaagctgagcatgaagatgaagaagctgcccgagttcagcagaaagctgagcgtgaagggcaccctgaactacatcaacagccccgacaacacccccagcctgagcaagtacaactgcagagaggtgcaccacaccgacatcctgcccagcggcaacaccaccaccgccgccaagagaaacgtgatcagcagataccacctggacaccagcgtgagcagccagcagagctaccagaagaagaacagcatgagcagcaagtacagctgcaagggcggctacctgagcgacggcgacagccccgagctgaccaccaaggccagcaagcacggcagcgagaacaagttcggcaagggcaaggagatcatcagcaacagctgcagcaagaacgagatcgacatcgacgccttcagacactacagcttcagcgaccagcccaagtgcagccagtacatcagcggcctgatgagcgtgcacttctacggcgccgaggacctgaagccccccagaatcgacagcaaggacgtgttctgcgccatccaggtggacagcgtgaacaaggccagaaccgccctgctgacctgcagaaccaccttcctggacatggaccacaccttcaacatcgagatcgagaacgcccagcacctgaagctggtggtgttcagctgggagcccacccccagaaagaacagagtgtgctgccacggcaccgtggtgctgcccaccctgttcagagtgaccaagacccaccagctggccgtgaagctggagcccagaggcctgatctacgtgaaggtgaccctgatggagcagtgggagaacagcctgcacggcctggacatcaaccaggagcccatcatcttcggcgtggacatccagaaggtggtggagaaggagaacatcggcctgatggtgcccctgctgatccagaagtgcatcatggagatcgagaagagaggctgccaggtggtgggcctgtacagactgtgcggcagcgccgccgtgaagaaggagctgagagaggccttcgagagagacagcaaggccgtgggcctgtgcgagaaccagtaccccgacatcaacgtgatcaccggcgtgctgaaggactacctgagagagctgcccagccccctgatcaccaagcagctgtacgaggccgtgctggacgccatggccaagagccccctgaagatgagcagcaacggctgcgagaacgaccccggcgacagcaagtacaccgtggacctgctggactgcctgcccgagatcgagaaggccaccctgaagatgctgctggaccacctgaagctggtggccagctaccacgaggtgaacaagatgacctgccagaacctggccgtgtgcttcggccccgtgctgctgagccagagacaggagcccagcacccacaacaacagagtgttcaccgacagcgaggagctggccagcgccctggacttcaagaagcacatcgaggtgctgcactacctgctgcagctgtggcccgtgcagagactgaccgtgaagaagagcaccgacaacctgttccccgagcagaagagcagcctgaactacctgagacagaagaaggagagaccccacatgctgaacctgagcggcaccgacagcagcggcgtgctgagacccagacagaacagactggacagccccctgagcaacagatacgccggcgactggagcagctgcggcgagaactacttcctgaacaccaaggagaacctgaacgacgtggactacgacgacgtgcccagcgaggacagaaagatcggcgagaactacagcaagatggacggccccgaggtgatgatcgagcagcccatccccatgagcaaggagtgcaccttccagacctacctgaccatgcagaccgtggagagcaccgtggacagaaagaacaacctgaaggacctgcaggagagcatcgacaccctgatcggcaacctggagagagagctgaacaagaacaagctgaacatgagcttctag

SEQ ID NO: 10240 - DNA, 1353 bp, synthetic construct
  source 1..1353: mol_type = other DNA; note = Synthetic coding sequence
atggaccccggcaacgagaacagcgccaccgaggccgccgccatcatcgacctggaccccgacttcgagccccagagcagacccagaagctgcacctggcccctgcccagacccgagatcgccaaccagcccagcgagccccccgaggtggagcccgacctgggcgagaaggccatcgagagcgcccccgagaagagactgaccctggcccagatctacgagtggatggtgagaaccgtgccctacttcaaggacaagggcgacagcaacagcagcgccggctggaagaacagcatcagacacaacctgagcctgcacagcaagttcatcaaggtgcacaacgaggccaccggcaagagcagctggtggatgctgaaccccgagggcggcaagagcggcaaggcccccagaagaagagccgccagcatggacagcagcagcaagctgctgagaggcagaagcaaggcccccaagaagaagcccagcgtgctgcccgccccccccgagggcgccacccccaccagccccgtgggccacttcgccaagtggagcggcagcccctgcagcagaaacagagaggaggccgacatgtggaccaccttcagacccagaagcagcagcaacgccagcagcgtgagcaccagactgagccccctgagacccgagagcgaggtgctggccgaggagatccccgccagcgtgagcagctacgccggcggcgtgccccccaccctgaacgagggcctggagctgctggacggcctgaacctgaccagcagccacagcctgctgagcagaagcggcctgagcggcttcagcctgcagcaccccggcgtgaccggccccctgcacacctacagcagcagcctgttcagccccgccgagggccccctgagcgccggcgagggctgcttcagcagcagccaggccctggaggccctgctgaccagcgacaccccccccccccccgccgacgtgctgatgacccaggtggaccccatcctgagccaggcccccaccctgctgctgctgggcggcctgcccagcagcagcaagctggccaccggcgtgggcctgtgccccaagcccctggaggcccccggccccagcagcctggtgcccaccctgagcatgatcgcccccccccccgtgatggccagcgcccccatccccaaggccctgggcacccccgtgctgaccccccccaccgaggccgccagccaggacagaatgccccaggacctggacctggacatgtacatggagaacctggagtgcgacatggacaacatcatcagcgacctgatggacgagggcgagggcctggacttcaacttcgagcccgacccctag

SEQ ID NO: 10241 - DNA, 1125 bp, synthetic construct
  source 1..1125: mol_type = other DNA; note = Synthetic coding sequence
atggccggctacctgagcgagagcgacttcgtgatggtggaggagggcttcagcaccagagacctgctgaaggagctgaccctgggcgccagccaggccaccaccgacgaggtggccgccttcttcgtggccgacctgggcgccatcgtgagaaagcacttctgcttcctgaagtgcctgcccagagtgagacccttctacgccgtgaagtgcaacagcagccccggcgtgctgaaggtgctggcccagctgggcctgggcttcagctgcgccaacaaggccgagatggagctggtgcagcacatcggcatccccgccagcaagatcatctgcgccaacccctgcaagcagatcgcccagatcaagtacgccgccaagcacggcatccagctgctgagcttcgacaacgagatggagctggccaaggtggtgaagagccaccccagcgccaagttcgtgcagcagagaggcaccgcctgcctgatcagaatggtgctgtgcatcgccaccgacgacagccacagcctgagctgcctgagcctgaagttcggcgtgagcctgaagagctgcagacacctgctggagaacgccaagaagcaccacgtggaggtggtgggcgtgagcttccacatcggcagcggctgccccgacccccaggcctacgcccagagcatcgccgacgccagactggtgttcgagatgggcaccgagctgggccacaagatgcacgtgctggacctgggcggcggcttccccggcaccgagggcgccaaggtgagattcgaggagatcgccagcgtgatcaacagcgccctggacctgtacttccccgagggctgcggcgtggacatcttcgccgagctgggcagatactacgtgaccagcgccttcaccgtggccgtgagcatcatcgccaagaaggaggtgctgctggaccagcccggcagagaggaggagaacggcagcaccagcaagaccatcgtgtaccacctggacgagggcgtgtacggcatcttcaacagcgtgctgttcgacaacatctgccccacccccatcctgcagaagagcaagaaccacagcccctgctacatgagcctggagagcatccacttcatcgccgtgtag

SEQ ID NO: 10242 - DNA, 1629 bp, synthetic construct
  source 1..1629: mol_type = other DNA; note = Synthetic coding sequence
atggacagaagcaagagaaacagcatcgccggcttcccccccagagtggagagactggaggagttcgagggcggcggcggcggcgagggcaacgtgagccaggtgggcagagtgtggcccagcagctacagagccctgatcagcgccttcagcagactgaccagactggacgacttcacctgcgagaagatcggcagcggcttcttcagcgaggtgttcaaggtgagacacagagccagcggccaggtgatggccctgaagatgaacaccctgagcagcaacagagccaacatgctgaaggaggtgcagctgatgaacagactgagccaccccaacatcctgagattcatgggcgtgtgcgtgcaccagggccagctgcacgccctgaccgagtacatcaacagcggcaacctggagcagctgctggacagcaacctgcacctgccctggaccgtgagagtgaagctggcctacgacatcgccgtgggcctgagctacctgcacttcaagggcatcttccacagagacctgaccagcaagaactgcctgatcaagagagacgagaacggctacagcgccgtggtggccgacttcggcctggccgagaagatccccgacgtgagcatgggcagcgagaagctggccgtggtgggcagccccttctggatggcccccgaggtgctgagagacgagccctacaacgagaaggccgacgtgttcagctacggcatcatcctgtgcgagatcatcgccagaatccaggccgaccccgactacctgcccagaaccgagatggaccccaagctgagacccagcttcgtggagatcggcaagaccctggaggagatcctgagcagactgcaggaggaggagcaggagagagacagaaagctgcagcccaccgccagaggcctgctggagaaggcccccggcgtgaagagactgagcagcctggacgacaagatcccccacaagagcccctgccccagaagaaccatctggctgagcagaagccagagcgacatcttcagcagaaagccccccagaaccgtgagcgtgctggacccctactacagacccagagacggcgccgccagaacccccaaggtgaaccccttcagcgccagacaggacctgatgggcggcaagatcaagttcttcgacctgcccagcaagagcgtgatcagcctggtgttcgacctggacgcccccggccccggcaccatgcccctggccgactggcaggagcccctggccccccccatcagaagatggagaagcctgcccggcagccccgagttcctgcaccaggaggcctgccccttcgtgggcagagaggagagcctgagcgacggccccccccccagactgagcagcctgaagtacagagtgaaggagatcccccccttcagagccagcgccctgcccgccgcccaggcccacgaggccatggactgcagcatcctgcaggaggagaacggcttcggcagcagaccccagggcaccagcccctgccccgccggcgccagcgaggagatggaggtggaggagagacccgccggcagcacccccgccaccttcagcaccagcggcatcggcctgcagacccagggcaagcaggacggctag

SEQ ID NO: 10243 - DNA, 786 bp, synthetic construct
  source 1..786: mol_type = other DNA; note = Synthetic coding sequence
atgggcagcagaaagaaggagatcgccctgcaggtgaacatcagcacccaggagctgtgggaggagatgctgagcagcaagggcctgaccgtggtggacgtgtaccagggctggtgcggcccctgcaagcccgtggtgagcctgttccagaagatgagaatcgaggtgggcctggacctgctgcacttcgccctgatcaaggacgaggccctgagcgacgaggacgagtgcgtgagccacggcaagaacaacggcgaggacgaggacatggtgagcagcgagagaacctgcaccctggccatcatcaagcccgacgccgtggcccacggcaagaccgacgagatcatcatgaagatccaggaggccggcttcgagatcctgaccaacgaggagagaaccatgaccgaggccgaggtgagactgttctaccagcacaaggccggcgaggaggccttcgagaagctggtgcaccacatgtgcagcggccccagccacctgctgatcctgaccagaaccgagggcttcgaggacgtggtgaccacctggagaaccgtgatgggccccagagaccccaacgtggccagaagagagcagcccgagagcctgagagcccagtacggcaccgagatgcccttcaacgccgtgcacggcagcagagacagagaggacgccgacagagagctggccctgctgttccccagcctgaagttcagcgacaaggacaccgaggccccccagggcgagagcagcacccagcccagactgaagatcaccgacctggactag

SEQ ID NO: 10244 - DNA, 1767 bp, synthetic construct
  source 1..1767: mol_type = other DNA; note = Synthetic coding sequence
atggaggccgccgacgccagcagaagcaacggcagcagccccgaggccagagacgccagaagccccagcggccccagcggcagcctggagaacggcaccaaggccgacggcaaggacgccaagaccaccaacggccacggcggcgaggccgccgagggcaagagcctgggcagcgccctgaagcccggcgagggcagaagcgccctgttcgccggcaacgagtggagaagacccatcatccagttcgtggagagcggcgacgacaagaacagcaactacttcagcatggacagcatggagggcaagagaagcccctacgccggcctgcagctgggcgccgccaagaagccccccgtgaccttcgccgagaagggcgagctgagaaagagcatcttcagcgagagcagaaagcccaccgtgagcatcatggagcccggcgagaccagaagaaacagctaccccagagccgacaccggcctgttcagcagaagcaagagcggcagcgaggaggtgctgtgcgacagctgcatcggcaacaagcagaaggccgtgaagagctgcctggtgtgccaggccagcttctgcgagctgcacctgaagccccacctggagggcgccgccttcagagaccaccagctgctggagcccatcagagacttcgaggccagaaagtgccccgtgcacggcaagaccatggagctgttctgccagaccgaccagacctgcatctgctacctgtgcatgttccaggagcacaagaaccacagcaccgtgaccgtggaggaggccaaggccgagaaggagaccgagctgagcctgcagaaggagcagctgcagctgaagatcatcgagatcgaggacgaggccgagaagtggcagaaggagaaggacagaatcaagagcttcaccaccaacgagaaggccatcctggagcagaacttcagagacctggtgagagacctggagaagcagaaggaggaggtgagagccgccctggagcagagagagcaggacgccgtggaccaggtgaaggtgatcatggacgccctggacgagagagccaaggtgctgcacgaggacaagcagaccagagagcagctgcacagcatcagcgacagcgtgctgttcctgcaggagttcggcgccctgatgagcaactacagcctgcccccccccctgcccacctaccacgtgctgctggagggcgagggcctgggccagagcctgggcaacttcaaggacgacctgctgaacgtgtgcatgagacacgtggagaagatgtgcaaggccgacctgagcagaaacttcatcgagagaaaccacatggagaacggcggcgaccacagatacgtgaacaactacaccaacagcttcggcggcgagtggagcgcccccgacaccatgaagagatacagcatgtacctgacccccaagggcggcgtgagaaccagctaccagcccagcagccccggcagattcaccaaggagaccacccagaagaacttcaacaacctgtacggcaccaagggcaactacaccagcagagtgtgggagtacagcagcagcatccagaacagcgacaacgacctgcccgtggtgcagggcagcagcagcttcagcctgaagggctaccccagcctgatgagaagccagagccccaaggcccagccccagacctggaagagcggcaagcagaccatgctgagccactacagacccttctacgtgaacaagggcaacggcatcggcagcaacgaggccccctag

SEQ ID NO: 10245 - DNA, 3567 bp, synthetic construct
  source 1..3567: mol_type = other DNA; note = Synthetic coding sequence
atgaagaagaagcagaccgtgcagggcaccttcagcaagctgttcggcaagaagcacaccaccacccccagcaccagcctgtacgccaccaaccccccctggatcttcacccaggaggcccccgaggagggcaccggcggcttcgacggcatctactacggcgacaacagattcaacaccgtgagcgagagcggcaccgccaccctgaaggccagacccagagtgagacccctgctgaccttcctgcccctgaacgcccaggagaaccacggcctggccgtgcccacccccagcgtgcccgacgacttcgccgacaaggaggtgaccggcaccagcagcctggtgaacggcaacctgagactgtacagcagcgtgggcgacctgagacccggccagtacggccaggacctgctgatccccccccccccccccggccccgcccccggccccccccaggacatcagcgagccccccggcggcagccccctgcccagcccccccagcaccgcccccccccccccccccctgctgctggagcccccccccccccccagcatggcccccccccccccccccgtgctggaggccctgagccccccccacaccctgagcagccccagcatccccaccccccccgacttcatcccccccgccccccccctggccttcctggcccccccccccccccccgtgcccgcccccgccccccccgcccccgccagcccccacaccgtgggcaccagactgttcccccccggcggcgtgaccaagtggaagagcgacgtggccctgaacggcagacaggccgaggccaccagagccagcccccccagaagccccgccgagcccaagggcagcgccctgggccccaaccccgagccccacctgaccttccccagaagcttcaaggtgcccccccccacccccgtgagaaccagcagcatccccgtgcaggaggcccaggaggcccccagaaaggaggagggcgccaccaagaaggcccccagcagactgcccctgccccccagcttccacatcagacccgccagccaggtgtaccccgacagagcccccgagcccgactgccccggcgagctgaaggccaccgcccccgccagccccagactgggccagagccagagccaggccgacgagagagccggcacccccccccccgccccccccctgcccccccccgccccccccctgcccccccccgccccccccctgccccccgccgccccccccctgccctgcgcccagaaggccgcccacccccccgccggcttcaccaagacccccaagagcagcagccccgccctgaagcccaagcccaacccccccagccccgagaacaccgccagcagcgcccccgtggactggagagaccccagccagatggagaagctgagaaacgagctggccgcctacctgtgcggcagcagaagagaggacagattcctgagccacagacccggccccaccgtggccccccagagcaaggagggcaagaagggccccagactgcccgagaaggagaccctgctgagcctgcccgccaaggacaccccccccggcgtgcccgagaagagcctgggcggcagcagcctgaccgagaccgaggccgcccccagcctgaccctgcccagcgtggactacatcccccaggacagccccacccccagcgtgagacagatcagaaacgagctggaggccagactgagcagcgccgccgagaaggaggccaagcccagcatcggcagcctgccccccaagcccagactggagggcggcagaatctgcgagaacggcgccgacgacgacaagctgagcaagcccgtggccaagaacctgcccccccagagcaccaccctgctgcccaccaccagcctgcagcccaaggccatgctgggccccgccatcccccccaaggccacccccgagcccgccatcccccccaaggccaccctgtggcccgccaccccccccaaggccaccctgggccccgccacccccctgaaggccaccagcggccccaccacccccctgaaggccaccagcggccccgccatcgccagcaccgccaccaccctgcccaccaccaccagccagctgatggccgagaaggacagcggccccgccggccagcccgagaagcccgccagccaggaggtgagcacccccagccaggccagaggcgagggcagccccagcgaggccaccagactgcccacccagggcgccagaagcagcgccgccttcccccccaagaccagccccggcggcggcgaggtgccctgcctgtacaagccccactgccaccagagcagcctgagcagagaggtggccgtggtgatgcccaccctggccagaggcggcgccgccggccccggcgagcccgtggaggtgaaggagccccccggcctgcccgccaagccccccgccagcgcccagcccaccgacgagctgctgagacaccccgtgaccggcgaggtggtggagagaggcagccccatggccctgctgctggccgccagacagagagcccagaagggcagaagcgtgggcgccgccctgggcagaagcagcctgcccggcagcctgagagaccacagccaccaggccgaggccagcagcgacagcatcttccacagccagggcacccccaacagcttcaccgtggtgcccaagctgcccaaggaggccgagaaggacagccccctgaccaccgagatccccaacaagtggggccccagactgggcagagacgccgagggcaccgagctgagcagaagacacaactggaccaagcccgagccccaggcccccgtggcctgggagagagtggcccccagcaacctgccccagggccaccccctgcccaagagcttcagcagcccccccagccccagcaacaagagagaggaggaggaggaggagttcaacttcgaggtgatcccccccccccccgagttcagcaacgaccccgagccccccgcccccgccctgcagtacctgggcagacagagcagcccccccagaaacaactacagcgacctgagacagctgcccaacgccggccccggcgccccccccgccctgggcttcagcagattccccgccggcgccagatacgccggcgccggcggcctggagagattcagcggcggcggcagaagcctgatcaagaagagactgtacgtgggcgagccccacagaggccccggcctgccccacggcggcaccggcagaagcctgagcagccccaactgcttcggcccccagcccggcggccccgagatgagaagagtgaacagcgccggcagagccccccccggcggcctgcacgcccccagactgagcctggagggcgccgccagaggcgccgccgaggccaagcacaaggcccccggcagcgccgactacggcttcgcccccgccgccggcagaagcccctacaccaccaccagatacggcagccccatcaacaccttcaccgtgagacccggcaccagacaccccatcagctacgtgtgcagcggcgcccacagaaaggccaccagctag

SEQ ID NO: 10246 - DNA, 2598 bp, synthetic construct
  source 1..2598: mol_type = other DNA; note = Synthetic coding sequence
atggccgtggccagagtggacgccgccctgccccccggcgagggcagcgtggtgaactggagcggccagggcctgcagaagctgggccccaacctgccctgcgaggccgacatccacaccctgatcctggacaagaaccagatcatcaagctggagaacctggagaagtgcaagagactgatccagctgagcgtggccaacaacagactggtgagaatgatgggcgtggccaagctgaccctgctgagagtgctgaacctgccccacaacagcatcggctgcgtggagggcctgaaggagctggtgcacctggagtggctgaacctggccggcaacaacctgaaggccatggagcagatcaacagctgcaccgccctgcagcacctggacctgagcgacaacaacatcagccagatcggcgacctgagcaagctggtgagcctgaagaccctgctgctgcacggcaacatcatcaccagcctgagaatggcccccgcctacctgcccagaagcctggccatcctgagcctggccgagaacgagatcagagacctgaacgagatcagcttcctggccagcctgaccgagctggagcagctgagcatcatgaacaacccctgcgtgatggccacccccagcatccccggcttcgactacagaccctacatcgtgagctggtgcctgaacctgagagtgctggacggctacgtgatcagccagaaggagagcctgaaggccgagtggctgtacagccagggcaagggcagagcctacagacccggccagcacatccagctggtgcagtacctggccaccgtgtgccccctgaccagcaccctgggcctgcagaccgccgaggacgccaagctggagaagatcctgagcaagcagagattccaccagagacagctgatgaaccagagccagaacgaggagctgagccccctggtgcccgtggagaccagagccagcctgatccccgagcacagcagccccgtgcaggactgccagatcagccaggagagcgagcccgtgatccaggtgaacagctgggtgggcatcaacagcaacgacgaccagctgttcgccgtgaagaacaacttccccgccagcgtgcacaccaccagatacagcagaaacgacctgcacctggaggacatccagaccgacgaggacaagctgaactgcagcctgctgagcagcgagagcaccttcatgcccgtggccagcggcctgagccccctgagccccaccgtggagctgagactgcagggcatcaacctgggcctggaggacgacggcgtggccgacgagagcgtgaagggcctggagagccaggtgctggacaaggaggaggagcagcccctgtgggccgccaacgagaacagcgtgcagatgatgagaagcgagatcaacaccgaggtgaacgagaaggccggcctgctgccctgccccgagcccaccatcatcagcgccatcctgaaggacgacaaccacagcctgaccttcttccccgagagcaccgagcagaagcagagcgacatcaagaagcccgagaacacccagcccgagaacaaggagaccatcagccaggccaccagcgagaagctgcccatgatcctgacccagagaagcgtggccctgggccaggacaaggtggccctgcagaagctgaacgacgccgccaccaagctgcaggcctgctggagaggcttctacgccagaaactacaacccccaggccaaggacgtgagatacgagatcagactgagaagaatgcaggagcacatcgtgtgcctgaccgacgagatcagaagactgagaaaggagagagacgaggagagaatcaagaagttcgtgcaggaggaggccttcagattcctgtggaaccaggtgagaagcctgcaggtgtggcagcagaccgtggaccagagactgagcagctggcacaccgacgtgccccccatcagcagcaccctggtgcccagcaagcaccccctgttcacccagagccaggagagcagctgcgaccagaacgccgactggttcatcgccagcgacgtggccccccaggagaagagcctgcccgagttccccgacagcggcttccacagcagcctgaccgagcaggtgcacagcctgcagcacagcctggacttcgagaagagcagcaccgagggcagcgagagcagcatcatgggcaacagcatcgacaccgtgagatacggcaaggagagcgacctgggcgacgtgagcgaggagcacggcgagtggaacaaggagagcagcaacaacgagcaggacaacagcctgctggagcagtacctgaccagcgtgcagcagctggaggacgccgacgagagaaccaacttcgacaccgagaccagagacagcaagctgcacatcgcctgcttccccgtgcagctggacaccctgagcgacggcgccagcgtggacgagagccacggcatcagcccccccctgcagggcgagatcagccagacccaggagaacagcaagctgaacgccgaggtgcagggccagcagcccgagtgcgacagcaccttccagctgctgcacgtgggcgtgaccgtgtag

SEQ ID NO: 10247 - DNA, 1275 bp, synthetic construct
  source 1..1275: mol_type = other DNA; note = Synthetic coding sequence
atgagcgtgggctgccccgagcccgagccccccagaagcctgacctgctgcggccccggcaccgcccccggccccggcgccggcgtgcccctgctgaccgaggacatgcaggccctgaccctgagaaccctggccgccagcgacgtgaccaagcactacgagctggtgagagagctgggcaagggcacctacggcaaggtggacctggtggtgtacaagggcaccggcaccaagatggccctgaagttcgtgaacaagagcaagaccaagctgaagaacttcctgagagaggtgagcatcaccaacagcctgagcagcagccccttcatcatcaaggtgttcgacgtggtgttcgagaccgaggactgctacgtgttcgcccaggagtacgcccccgccggcgacctgttcgacatcatccccccccaggtgggcctgcccgaggacaccgtgaagagatgcgtgcagcagctgggcctggccctggacttcatgcacggcagacagctggtgcacagagacatcaagcccgagaacgtgctgctgttcgacagagagtgcagaagagtgaagctggccgacttcggcatgaccagaagagtgggctgcagagtgaagagagtgagcggcaccatcccctacaccgcccccgaggtgtgccaggccggcagagccgacggcctggccgtggacaccggcgtggacgtgtgggccttcggcgtgctgatcttctgcgtgctgaccggcaacttcccctgggaggccgccagcggcgccgacgccttcttcgaggagttcgtgagatggcagagaggcagactgcccggcctgcccagccagtggagaagattcaccgagcccgccctgagaatgttccagagactgctggccctggagcccgagagaagaggccccgccaaggaggtgttcagattcctgaagcacgagctgaccagcgagctgagaagaagacccagccacagagccagaaagccccccggcgacagaccccccgccgccggccccctgagactggaggcccccggccccctgaagagaaccgtgctgaccgagagcggcagcggcagcagacccgccccccccgccgtgggcagcgtgcccctgcccgtgcccgtgcccgtgcccgtgcccgtgcccgtgcccgtgcccgagcccggcctggccccccagggcccccccggcagaaccgacggcagagccgacaagagcaagggccaggtggtgctggccaccgccatcgagatctgcgtgtag

SEQ ID NO: 10248 - DNA, 1632 bp, synthetic construct
  source 1..1632: mol_type = other DNA; note = Synthetic coding sequence
atggccaccagaagactgggcgtgggcgagaccctgggcgccctgaacgccgccctgggccccggcggccccgtgtggatcaaggagaccagaaccagacacctgagaagcagagacttcctggccccccacagagccctgcaggccagattcgacgacggccaggtgcccgagcacctgctgcacgccctggcctgcctgcagggccccggcgtggcccccgtgctgagatgcgcccccacccccgccggcctgagcctgcagctgcagagaagcgccgtgttcgagagagtgctgagcgccgtggccgcctacgccacccccgccagccccgccagcctgggccagagagtgctgctgcactgccccgccctgagaagcagcccctgcgccctgagactgagccagctgagaaccgtgctggtggccgaccacctggccagagccctgagagcccacggcgtgtgcgtgagactggtgcccgccgtgagagacccccacatgctgaccttcctgcagcagctgagagtggactggcccgccgccagcgagagagccagcagccacaccctgagaagccacgccctggaggagctgaccagcgccaacgacggcagaaccctgagccccggcatcctgggcagactgtgcctgaaggagctggtggaggagcagggcagaaccgccggctacgaccccaacctggacaactgcctggtgaccgaggacctgctgagcgtgctggccgagctgcaggaggccctgtggcactggcccgaggacagccaccccggcctggccggcgccagcgacaccggcaccggcggctgcctggtggtgcacgtggtgagctgcgaggaggagttccagcagcagaagctggacctgctgtggcagaagctggtggacaaggcccccctgagacagaagcacctgatctgcggccccgtgaaggtggccggcgcccccggcaccctgatgaccgcccccgagtactacgagttcagacacacccaggtgtgcaaggccagcgccctgaagcacggcggcgacctggcccaggaccccgcctggaccgagatcttcggcgtgctgagcgtggccaccatcaagttcgagatgctgagcaccgccccccagagccagctgttcctggccctggccgacagcagcatcagcaccaagggcaccaagagcggcaccttcgtgatgtacaactgcgccagactggccaccctgttcgagagctacaagtgcagcatggagcagggcctgtaccccaccttcccccccgtgagcagcctggacttcagcctgctgcacgacgagggcgagtggctgctgctgttcaacagcatcctgcccttccccgacctgctgagcagaaccgccgtgctggactgcaccgcccccggcctgcacatcgccgtgagaaccgagatgatctgcaagttcctggtgcagctgagcatggacttcagcagctactacaacagagtgcacatcctgggcgagcccagaccccacctgttcggccagatgttcgtgagactgcagctgctgagagccgtgagagaggtgctgcacaccggcctggccatgctgggcctgccccccctgagccacatctag

SEQ ID NO: 10249 - DNA, 1353 bp, synthetic construct
  source 1..1353: mol_type = other DNA; note = Synthetic coding sequence
atgggcaagagcttcgccaacttcatgtgcaagaaggacttccaccccgccagcaagagcaacatcaagaaggtgtggatggccgagcagaagatcagctacgacaagaagaagcaggaggagctgatgcagcagtacctgaaggagcaggagagctacgacaacagactgctgatgggcgacgagagagtgaagaacggcctgaacttcatgtacgaggccccccccggcgccaagaaggagaacaaggagaaggaggagaccgagggcgagaccgagtacaagttcgagtggcagaagggcgcccccagagagaagtacgccaaggacgacatgaacatcagagaccagcccttcggcatccaggtgagaaacgtgagatgcatcaagtgccacaagtggggccacgtgaacaccgacagagagtgccccctgttcggcctgagcggcatcaacgccagcagcgtgcccaccgacggcagcggccccagcatgcaccccagcgagctgatcgccgagatgagaaacagcggcttcgccctgaagagaaacgtgctgggcagaaacctgaccgccaacgaccccagccaggagtacgtggccagcgagggcgaggaggaccccgaggtggagttcctgaagagcctgaccaccaagcagaagcagaagctgctgagaaagctggacagactggagaagaagaagaagaagaaggacagaaagaagaagaagttccagaagagcagaagcaagcacaagaagcacaagagcagcagcagcagcagcagcagcagcagcagcagcagcagcaccgagaccagcgagagcagcagcgagagcgagagcaacaacaaggagaagaagatccagagaaagaagagaaagaagaacaagtgcagcggccacaacaacagcgacagcgaggagaaggacaagagcaagaagagaaagctgcacgaggagctgagcagcagccaccacaacagagagaaggccaaggagaagcccagattcctgaagcacgagagcagcagagaggacagcaagtggagccacagcgacagcgacaagaagagcagaacccacaagcacagccccgagaagagaggcagcgagagaaaggagggcagcagcagaagccacggcagagaggagagaagcagaagaagcagaagcagaagccccggcagctacaagcagagagagaccagaaagagagcccagagaaaccccggcgaggagcagagcagaagaaacgacagcagaagccacggcaccgacctgtacagaggcgagaagatgtacagagagcaccccggcggcacccacaccaaggtgacccagagagagtag

SEQ ID NO: 10250 - DNA, 1152 bp, synthetic construct
  source 1..1152: mol_type = other DNA; note = Synthetic coding sequence
atgagccccgaggtggccctgaacagaatcagccccatgctgagccccttcatcagcagcgtggtgagaaacggcaaggtgggcctggacgccaccaactgcctgagaatcaccgacctgaagagcggctgcaccagcctgacccccggccccaactgcgacagattcaagctgcacatcccctacgccggcgagaccctgaagtgggacatcatcttcaacgcccagtaccccgagctgccccccgacttcatcttcggcgaggacgccgagttcctgcccgaccccagcgccctgcagaacctggccagctggaaccccagcaaccccgagtgcctgctgctggtggtgaaggagctggtgcagcagtaccaccagttccagtgcagcagactgagagagagcagcagactgatgttcgagtaccagaccctgctggaggagccccagtacggcgagaacatggagatctacgccggcaagaagaacaactggaccggcgagttcagcgccagattcctgctgaagctgcccgtggacttcagcaacatccccacctacctgctgaaggacgtgaacgaggaccccggcgaggacgtggccctgctgagcgtgagcttcgaggacaccgaggccacccaggtgtaccccaagctgtacctgagccccagaatcgagcacgccctgggcggcagcagcgccctgcacatccccgccttccccggcggcggctgcctgatcgactacgtgccccaggtgtgccacctgctgaccaacaaggtgcagtacgtgatccagggctaccacaagagaagagagtacatcgccgccttcctgagccacttcggcaccggcgtggtggagtacgacgccgagggcttcaccaagctgaccctgctgctgatgtggaaggacttctgcttcctggtgcacatcgacctgcccctgttcttccccagagaccagcccaccctgaccttccagagcgtgtaccacttcaccaacagcggccagctgtacagccaggcccagaagaactacccctacagccccagatgggacggcaacgagatggccaagagagccaaggcctacttcaagaccttcgtgccccagttccaggaggccgccttcgccaacggcaagctgtag

SEQ ID NO: 10251 - DNA, 675 bp, synthetic construct
  source 1..675: mol_type = other DNA; note = Synthetic coding sequence
atgcccaacagatgcggcatcatccacgtgagaggccccatgccccccaacagaatcagccacggcgaggtgctggagtggcagaagaccttcgaggagaagctgacccccctgctgagcgtgagagagagcctgagcgaggaggaggcccagaagatgggcagaaaggaccccgagcaggaggtggagaagttcgtgaccagcaacacccaggagctgggcaaggacaagtggctgtgccccctgagcggcaagaagttcaagggccccgagttcgtgagaaagcacatcttcaacaagcacgccgagaagatcgaggaggtgaagaaggaggtggccttcttcaacaacttcctgaccgacgccaagagacccgccctgcccgagatcaagcccgcccagccccccggccccgcccagatcctgccccccggcctgacccccggcctgccctacccccaccagaccccccagggcctgatgccctacggccagcccagaccccccatcggcctgtggagctggtgctgccccccctgcagcccccaggaggccctgcacacccccatgcccagaatggtgctggtggagggcaccatgatgcccagcgaggccagagaggtgatcctgggcaacctggccaccggctggttcgtggagacccagggcccctag

SEQ ID NO: 10252 - DNA, 4806 bp, synthetic construct
  source 1..4806: mol_type = other DNA; note = Synthetic coding sequence
atggaggccggcagcgtggtgagagccatcttcgacttctgccccagcgtgagcgaggagctgcccctgttcgtgggcgacatcatcgaggtgctggccgtggtggacgagttctggctgctgggcaagaaggaggacgtgaccggccagttccccagcagcttcgtggagatcgtgaccatccccagcctgaaggagggcgagagactgttcgtgtgcatctgcgagttcaccagccaggagctggacaacctgcccctgcacagaggcgacctggtgatcctggacggcatccccaccgccggctggctgcagggcagaagctgctggggcgccagaggcttcttccccagcagctgcgtgagagagctgtgcctgagcagccagagcagacagtggcacagccagagcgccctgttccagatccccgagtacagcatgggccaggccagagccctgatgggcctgagcgcccagctggacgaggagctggacttcagagagggcgacgtgatcaccatcatcggcgtgcccgagcccggctggttcgagggcgagctggagggcagaagaggcatcttccccgagggcttcgtggagctgctgggccccctgagaaccgtggacgagagcgtgagcagcggcaaccaggacgactgcatcgtgaacggcgaggtggacacccccgtgggcgaggaggagatcggccccgacgaggacgaggaggagcccggcacctacggcgtggccctgtacagattccaggccctggagcccaacgagctggacttcgaggtgggcgacaagatcagaatcctggccaccctggaggacggctggctggagggcagcctgaagggcagaaccggcatcttcccctacagattcgtgaagctgtgccccgacaccagagtggaggagaccatggccctgccccaggagggcagcctggccagaatccccgagaccagcctggactgcctggagaacaccctgggcgtggaggagcagagacacgagaccagcgaccacgaggccgaggagcccgactgcatcatcagcgaggcccccaccagccccctgggccacctgaccagcgagtacgacaccgacagaaacagctaccaggacgaggacaccgccggcggcccccccagaagccccggcgtggagtgggagatgcccctggccaccgacagccccaccagcgaccccaccgaggtggtgaacggcatcagcagccagccccaggtgcccttccaccccaacctgcagaagagccagtactacagcaccgtgggcggcagccacccccacagcgagcagtaccccgacctgctgcccctggaggccagaaccagagactacgccagcctgccccccaagagaatgtacagccagctgaagaccctgcagaagcccgtgctgcccctgtacagaggcagcagcgtgagcgccagcagagtggtgaagcccagacagagcagcccccagctgcacaacctggccagctacaccaagaagcaccacaccagcagcgtgtacagcatcagcgagagactggagatgaagcccggcccccaggcccagggcctggtgatggaggccgccacccacagccagggcgacggcagcaccgacctggacagcaagctgacccagcagctgatcgagttcgagaagagcctggccggccccggcaccgagcccgacaagatcctgagacacttcagcatcatggacttcaacagcgagaaggacatcgtgagaggcagcagcaagctgatcaccgagcaggagctgcccgagagaagaaaggccctgagaccccccccccccagaccctgcacccccgtgagcaccagcccccacctgctggtggaccagaacctgaagcccgccccccccctggtggtgagacccagcagacccgcccccctgccccccagcgcccagcagagaaccaacgccgtgagccccaagctgctgagcagacacagacccacctgcgagaccctggagaaggagggccccggccacatgggcagaagcctggaccagaccagcccctgccccctggtgctggtgagaatcgaggagatggagagagacctggacatgtacagcagagcccaggaggagctgaacctgatgctggaggagaagcaggacgagagcagcagagccgagaccctggaggacctgaagttctgcgagagcaacatcgagagcctgaacatggagctgcagcagctgagagagatgaccctgctgagcagccagagcagcagcctggtggcccccagcggcagcgtgagcgccgagaaccccgagcagagaatgctggagaagagagccaaggtgatcgaggagctgctgcagaccgagagagactacatcagagacctggagatgtgcatcgagagaatcatggtgcccatgcagcaggcccaggtgcccaacatcgacttcgagggcctgttcggcaacatgcagatggtgatcaaggtgagcaagcagctgctggccgccctggagatcagcgacgccgtgggccccgtgttcctgggccacagagacgagctggagggcacctacaagatctactgccagaaccacgacgaggccatcgccctgctggagatctacgagaaggacgagaagatccagaagcacctgcaggacagcctggccgacctgaagagcctgtacaacgagtggggctgcaccaactacatcaacctgggcagcttcctgatcaagcccgtgcagagagtgatgagataccccctgctgctgatggagctgctgaacagcacccccgagagccaccccgacaaggtgcccctgaccaacgccgtgctggccgtgaaggagatcaacgtgaacatcaacgagtacaagagaagaaaggacctgggcaagaacagcatcatcgccgagaaggagtacgcccacgccgaggagagcgccttcctgacctacagcctggtgctgaagtacagaaagggcgacgaggacagcctgatggagaagatcagcaagctgaacatccacagcatcatcaagaagagcaacagagtgagcagccacctgaagcacctgaccggcttcgccccccagatcaaggacgaggtgttcgaggagaccgagaagaacttcagaatgcaggagagactgatcaagagcttcatcagagacctgagcctgtacctgcagcacatcagagagagcgcctgcgtgaaggtggtggccgccgtgagcatgtgggacgtgtgcatggagagaggccacagagacctggagcagttcgagagagtgcacagatacatcagcgaccagctgttcaccaacttcaaggagagaaccgagagactggtgatcagccccctgaaccagctgctgagcatgttcaccggcccccacaagctggtgcagaagagattcgacaagctgctggacttctacaactgcaccgagagagccgagaagctgaaggacaagaagaccctggaggagctgcagagcgccagaaacaactacgaggccctgaacgcccagctgctggacgagctgcccaagttccaccagtacgcccagggcctgttcaccaactgcgtgcacggctacgccgaggcccactgcgacttcgtgcaccaggccctggagcagctgaagcccctgctgagcctgctgaaggtggccggcagagagggcaacctgatcgccatcttccacgaggagcacagcagagtgctgcagcagctgcaggtgttcaccttcttccccgagagcctgcccgccaccaagaagcccttcgagagaaagaccatcgacagacagagcgccagaaagcccctgctgggcctgcccagctacatgctgcagagcgaggagctgagagccagcctgctggccagatacccccccgagaagctgttccaggccgagagaaacttcaacgccgcccaggacctggacgtgagcctgctggagggcgacctggtgggcgtgatcaagaagaaggaccccatgggcagccagaacagatggctgatcgacaacggcgtgaccaagggcttcgtgtacagcagcttcctgaagccctacaaccccagaagaagccacagcgacgccagcgtgggcagccacagcagcaccgagagcgagcacggcagcagcagccccagattccccagacagaacagcggcagcaccctgaccttcaaccccagcagcatggccgtgagcttcaccagcggcagctgccagaagcagccccaggacgccagccccccccccaaggagtgcgaccagggcaccctgagcgccagcctgaaccccagcaacagcgagagcagccccagcagatgccccagcgaccccgacagcaccagccagcccagaagcggcgacagcgccgacgtggccagagacgtgaagcagcccaccgccacccccagaagctacagaaacttcagacaccccgagatcgtgggctacagcgtgcccggcagaaacggccagagccaggacctggtgaagggctgcgccagaaccgcccaggcccccgaggacagaagcaccgagcccgacggcagcgaggccgagggcaaccaggtgtacttcgccgtgtacaccttcaaggccagaaaccccaacgagctgagcgtgagcgccaaccagaagctgaagatcctggagttcaaggacgtgaccggcaacaccgagtggtggctggccgaggtgaacggcaagaagggctacgtgcccagcaactacatcagaaagaccgagtacacctag

SEQ ID NO: 10253 - DNA, 1596 bp, synthetic construct
  source 1..1596: mol_type = other DNA; note = Synthetic coding sequence
atgaagtgccactacgaggccctgggcgtgagaagagacgccagcgaggaggagctgaagaaggcctacagaaagctggccctgaagtggcaccccgacaagaacctggacaacgccgccgaggccgccgagcagttcaagctgatccaggccgcctacgacgtgctgagcgacccccaggagagagcctggtacgacaaccacagagaggccctgctgaagggcggcttcgacggcgagtaccaggacgacagcctggacctgctgagatacttcaccgtgacctgctacagcggctacggcgacgacgagaagggcttctacaccgtgtacagaaacgtgttcgagatgatcgccaaggaggagctggagagcgtgctggaggaggaggtggacgacttccccaccttcggcgacagccagagcgactacgacaccgtggtgcaccccttctacgcctactggcagagcttctgcacccagaagaacttcgcctggaaggaggagtacgacaccagacaggccagcaacagatgggagaagagagccatggagaaggagaacaagaagatcagagacaaggccagaaaggagaagaacgagctggtgagacagctggtggccttcatcagaaagagagacaagagagtgcaggcccacagaaagctggtggaggagcagaacgccgagaaggccagaaaggccgaggagatgagaagacagcagaagctgaagcaggccaagctggtggagcagtacagagagcagagctggatgaccatggccaacctggagaaggagctgcaggagatggaggccagatacgagaaggagttcggcgacggcagcgacgagaacgagatggaggagcacgagctgaaggacgaggaggacggcaaggacagcgacgaggccgaggacgccgagctgtacgacgacctgtactgccccgcctgcgacaagagcttcaagaccgagaaggccatgaagaaccacgagaagagcaagaagcacagagagatggtggccctgctgaagcagcagctggaggaggaggaggagaacttcagcagaccccagatcgacgagaaccccctggacgacaacagcgaggaggagatggaggacgcccccaagcagaagctgagcaagaagcagaagaagaagaagcagaagcccgcccagaactacgacgacaacttcaacgtgaacggccccggcgagggcgtgaaggtggaccccgaggacaccaacctgaaccaggacagcgccaaggagctggaggacagcccccaggagaacgtgagcgtgaccgagatcatcaagccctgcgacgaccccaagagcgaggccaagagcgtgcccaagcccaagggcaagaagaccaaggacatgaagaagcccgtgagagtgcccgccgagccccagaccatgagcgtgctgatcagctgcaccacctgccacagcgagttccccagcagaaacaagctgttcgaccacctgaaggccaccggccacgccagagcccccagcagcagcagcctgaacagcgccaccagcagccagagcaagaaggagaagagaaagaacagatag

SEQ ID NO: 10254 - DNA, 1353 bp, synthetic construct
  source 1..1353: mol_type = other DNA; note = Synthetic coding sequence
atggtggtgcaggccgccgtggcccccaacagaagccagagactgctgctgaagatcccctacggcagcctgagaagaagaagcgtggagagaatgaccgagggcagaagatgccaggtgcacctgctggacgacagaaagctggagctgctggtgcagcccaagctgctggccaaggagctgctggacctggtggccagccacttcaacctgaaggagaaggagtacttcggcatcgccttcaccgacgagaccggccacctgaactggctgcagctggacagaagagtgctggagcacgacttccccaagaagagcggccccgtggtgctgtacttctgcgtgagattctacatcgagagcatcagctacctgaaggacaacgccaccatcgagctgttcttcctgaacgccaagagctgcatctacaaggagctgatcgacgtggacagcgaggtggtgttcgagctggccagctacatcctgcaggaggccaagggcgacttcagcagcaacgaggtggtgagaagcgacctgaagaagctgcccgccctgcccacccaggccctgaaggagcaccccagcctggcctactgcgaggacagagtgatcgagcactacaagaagctgaacggccagaccagaggccaggccatcgtgaactacatgagcatcgtggagagcctgcccacctacggcgtgcactactacgccgtgaaggacaagcagggcatcccctggtggctgggcctgagctacaagggcatcttccagtacgactaccacgacaaggtgaagcccagaaagatcttccagtggagacagctggagaacctgtacttcagagagaagaagttcagcgtggaggtgcacgaccccagaagagccagcgtgaccagaagaaccttcggccacagcggcatcgccgtgcacacctggtacgcctgccccgccctgatcaagagcatctgggccatggccatcagccagcaccagttctacctggacagaaagcagagcaagagcaagatccacgccgccagaagcctgagcgagatcgccatcgacctgaccgagaccggcaccctgaagaccagcaagctggccaacatgggcagcaagggcaagatcatcagcggcagcagcggcagcctgctgagcagcggcagacagagacccgccggcggcaccccccccgagcacggctgggaccccagaggcgaccccggcagatggggcgagctgcagctgggcagactgcagggcaagctgctgcagagctggctgtgcttccccgaccagggctgggaccccaacgccaacctgagaaagctgctgcccggcatcaagtag

SEQ ID NO: 10255 - DNA, 1020 bp, synthetic construct
  source 1..1020: mol_type = other DNA; note = Synthetic coding sequence
atggagggcgagcccccccccgtggaggagagaagaagactgcaggaggagctgaacgagttcgtggagagcggctgcagaaccctggaggaggtgaccgccagcctgggctgggacctggacagcctggaccccggcgaggaggaggccgccgaggacgaggtggtgatctgcccctacgacagcaaccaccacatgcccaagagcagcctggccaagcacatggccagctgcagactgagaaagatgggctacaccaaggaggaggaggacgagatgtacaaccccgagttcttctacgagaacgtgaagatccccagcatcaccctgaacaaggacagccagttccagatcatcaagcaggccagaaccgccgtgggcaaggacagcgactgctacaaccagagaatctacagcagcctgcccgtggaggtgcccctgaaccacaagagattcgtgtgcgacctgacccaggccgacagactggccctgtacgacttcgtggtggaggagaccaagaagaagagaagcgacagccagatcatcgagaacgacagcgacctgttcgtggacctggccgccaagatcaaccaggacaacagcagaaagagccccaagagctacctggagatcctggccgaggtgagagactacaagagaagaagacagagctacagagccaagaacgtgcacatcaccaagaagagctacaccgaggtgatcagagacgtgatcaacgtgcacatggaggagctgagcaaccactggcaggaggagcaggagaaggccgaggacgacgccgagaagaacgaggagagaagaagcgccagcgtggacagcagacagagcggcggcagctacctggacgccgagtgcagcagacacagaagagacagaagcagaagcccccacaagagaaagagaaacaaggacaaggacaagaactgcgagagcagaagaagaaaggagagagacggcgagagacaccacagccacaagagaagaaagcagaagatctag

SEQ ID NO: 10256 - DNA, 6810 bp, synthetic construct
  source 1..6810: mol_type = other DNA; note = Synthetic coding sequence
atggccgagcccagcagcgccagaagacccgtgcccctgatcgagagcgagctgtacttcctgatcgccagatacctgagcgccggcccctgcagaagagccgcccaggtgctggtgcaggagctggagcagtaccagctgctgcccaagagactggactgggagggcaacgagcacaacagaagctacgaggagctggtgctgagcaacaagcacgtggcccccgaccacctgctgcagatctgccagagaatcggccccatgctggacaaggagatcccccccagcatcagcagagtgaccagcctgctgggcgccggcagacagagcctgctgagaaccgccaaggactgcagacacaccgtgtggaagggcagcgccttcgccgccctgcacagaggcagaccccccgagatgcccgtgaactacggcagcccccccaacctggtggagatccacagaggcaagcagctgaccggctgcagcaccttcagcaccgccttccccggcaccatgtaccagcacatcaagatgcacagaagaatcctgggccacctgagcgccgtgtactgcgtggccttcgacagaaccggccacagaatcttcaccggcagcgacgactgcctggtgaagatctggagcacccacaacggcagactgctgagcaccctgagaggccacagcgccgagatcagcgacatggccgtgaactacgagaacaccatgatcgccgccggcagctgcgacaagatcatcagagtgtggtgcctgagaacctgcgcccccgtggccgtgctgcagggccacaccggcagcatcaccagcctgcagttcagccccatggccaagggcagccagagatacatggtgagcaccggcgccgacggcaccgtgtgcttctggcagtgggacctggagagcctgaagttcagccccagacccctgaagttcaccgagaagcccagacccggcgtgcagatgctgtgcagcagcttcagcgtgggcggcatgttcctggccaccggcagcaccgaccacgtgatcagaatgtacttcctgggcttcgaggcccccgagaagatcgccgagctggagagccacaccgacaaggtggacagcatccagttctgcaacaacggcgacagattcctgagcggcagcagagacggcaccgccagaatctggagattcgagcagctggagtggagaagcatcctgctggacatggccaccagaatcagcggcgacctgagcagcgaggaggagagattcatgaagcccaaggtgaccatgatcgcctggaaccagaacgacagcatcgtggtgaccgccgtgaacgaccacgtgctgaaggtgtggaacagctacaccggccagctgctgcacaacctgatgggccacgccgacgaggtgttcgtgctggagacccaccccttcgacagcagaatcatgctgagcgccggccacgacggcagcatcttcatctgggacatcaccaagggcaccaagatgaagcactacttcaacatgatcgagggccagggccacggcgccgtgttcgactgcaagttcagccaggacggccagcacttcgcctgcaccgacagccacggccacctgctgatcttcggcttcggctgcagcaagccctacgagaagatccccgaccagatgttcttccacaccgactacagacccctgatcagagacagcaacaactacgtgctggacgagcagacccagcaggccccccacctgatgcccccccccttcctggtggacgtggacggcaacccccaccccaccaagtaccagagactggtgcccggcagagagaacagcgccgacgagcacctgatcccccagctgggctacgtggccaccagcgacggcgaggtgatcgagcagatcatcagcctgcagaccaacgacaacgacgagagaagccccgagagcagcatcctggacggcatgatcagacagctgcagcagcagcaggaccagagaatgggcgccgaccaggacaccatccccagaggcctgagcaacggcgaggagacccccagaagaggcttcagaagactgagcctggacatccagagcccccccaacatcggcctgagaagaagcggccaggtggagggcgtgagacagatgcaccagaacgcccccagaagccagatcgccaccgagagagacctgcaggcctggaagagaagagtggtggtgcccgaggtgcccctgggcatcttcagaaagctggaggacttcagactggagaagggcgaggaggagagaaacctgtacatcatcggcagaaagagaaagaccctgcagctgagccacaagagcgacagcgtggtgctggtgagccagagcagacagagaacctgcagaagaaagtaccccaactacggcagaagaaacagaagctggagagagctgagcagcggcaacgagagcagcagcagcgtgagacacgagaccagctgcgaccagagcgagggcagcggcagcagcgaggaggacgagtggagaagcgacagaaagagcgagagctacagcgagagcagcagcgacagcagcagcagatacagcgactggaccgccgacgccggcatcaacctgcagccccccctgagaaccagctgcagaagaagaatcaccagattctgcagcagcagcgaggacgagatcagcaccgagaacctgagcccccccaagagaagaagaaagagaaagaaggagaacaagcccaagaaggagaacctgagaagaatgacccccgccgagctggccaacatggagcacctgtacgagttccacccccccgtgtggatcaccgacaccaccctgagaaagagccccttcgtgccccagatgggcgacgaggtgatctacttcagacagggccacgaggcctacatcgaggccgtgagaagaaacaacatctacgagctgaaccccaacaaggagccctggagaaagatggacctgagagaccaggagctggtgaagatcgtgggcatcagatacgaggtgggcccccccaccctgtgctgcctgaagctggccttcatcgaccccgccaccggcaagctgatggacaagagcttcagcatcagataccacgacatgcccgacgtgatcgacttcctggtgctgagacagttctacgacgaggccagacagagaaactggcagagctgcgacagattcagaagcatcatcgacgacgcctggtggttcggcaccgtgctgagccaggagccctaccagccccagtaccccgacagccacttccagtgctacatcgtgagatgggacaacaccgagatcgagaagctgagcccctgggacatggagcccatccccgacaacgtggacccccccgaggagctgggcgccagcatcagcgtgaccaccgacgagctggagaagctgctgtacaagccccaggccggcgagtggggccagaagagcagagacgaggagtgcgacagaatcatcagcggcatcgaccagctgctgaacctggacatcgccgccgccttcgccggccccgtggacctgtgcacctaccccaagtactgcaccgtggtggcctaccccaccgacctgtacaccatcagaatgagactggtgaacagattctacagaagactgagcgccctggtgtgggaggtgagatacatcgagcacaacgccagaaccttcaacgagcccgagagcgtgatcgccagaagcgccaagaagatcaccgaccagctgctgaagttcatcaagaaccagcactgcaccaacatcagcgagctgagcaacaccagcgagaacgacgagcagaacgccgaggacctggacgacagcgacctgcccaagaccagcagcggcagaagaagagtgcacgacggcaagaagagcatcagagccaccaactacgtggagagcaactggaagaagcagtgcaaggagctggtgaacctgatcttccagtgcgaggacagcgagcccttcagacagcccgtggacctggtggagtaccccgactacagagacatcatcgacacccccatggacttcggcaccgtgagagagaccctggacgccggcaactacgacagccccctggagttctgcaaggacatcagactgatcttcagcaacgccaaggcctacacccccaacaagagaagcaagatctacagcatgaccctgagactgagcgccctgttcgaggagaagatgaagaagatcagcagcgacttcaagatcggccagaagttcaacgagaagctgagaagaagccagagattcaagcagagacagaactgcaagggcgacagccagcccaacaagagcatcagaaacctgaagcccaagagactgaagagccagaccaagatcatccccgagctggtgggcagccccacccagagcaccagcagcagaaccgcctacctgggcacccacaagaccagcgccggcatcagcagcggcgtgaccagcggcgacagcagcgacagcgccgagagcagcgagagaagaaagagaaacagacccatcaccaacggcagcaccctgagcgagagcgaggtggaggacagcctggccaccagcctgagcagcagcgccagcagcagcagcgaggagagcaaggagagcagcagagccagagagagcagcagcagaagcggcctgagcagaagcagcaacctgagagtgaccagaaccagagccgcccagagaaagaccggccccgtgagcctggccaacggctgcggcagaaaggccaccagaaagagagtgtacctgagcgacagcgacaacaacagcctggagaccggcgagatcctgaaggccagagccggcaacaacagaaaggtgctgagaaagtgcgccgccgtggccgccaacaagatcaagctgatgagcgacgtggaggagaacagcagcagcgagagcgtgtgcagcggcagaaagctgccccacagaaacgccagcgccgtggccagaaagaagctgctgcacaacagcgaggacgagcagagcctgaagagcgagatcgaggaggaggagctgaaggacgagaaccagctgctgcccgtgagcagcagccacaccgcccagagcaacgtggacgagagcgagaacagagacagcgagagcgagagcgacctgagagtggccagaaagaactggcacgccaacggctacaagagccacacccccgcccccagcaagaccaagttcctgaagatcgagagcagcgaggaggacagcaagagccacgacagcgaccacgcctgcaacagaaccgccggccccagcaccagcgtgcagaagctgaaggccgagagcatcagcgaggaggccgacagcgagcccggcagaagcggcggcagaaagtacaacaccttccacaagaacgccagcttcttcaagaagaccaagatcctgagcgacagcgaggacagcgagagcgaggagcaggacagagaggacggcaagtgccacaagatggagatgaaccccatcagcggcaacctgaactgcgaccccatcgccatgagccagtgcagcagcgaccacggctgcgagaccgacctggacagcgacgacgacaagatcgagaagcccaacaacttcatgaaggacagcgccagccaggacaacggcctgagcagaaagatcagcagaaagagagtgtgcagcagcgacagcgacagcagcctgcaggtggtgaagaagagcagcaaggccagaaccggcctgctgagaatcaccagaagatgcgccgccaccgccgccaacaagatcaagctgatgagcgacgtggaggacgtgagcctggagaacgtgcacaccagaagcaagaacggcagaaagaagcccctgcacctggcctgcaccaccgccaagaagaagctgagcgactgcgagggcagcgtgcactgcgaggtgcccagcgagcagtacgcctgcgagggcaagccccccgaccccgacagcgagggcagcaccaaggtgctgagccaggccctgaacggcgacagcgacagcgaggacatgctgaacagcgagcacaagcacagacacaccaacatccacaagatcgacgcccccagcaagagaaagagcagcagcgtgaccagcagcggcgaggacagcaagagccacatccccggcagcgagaccgacagaaccttcagcagcgagagcaccctggcccagaaggccaccgccgagaacaacttcgaggtggagctgaactacggcctgagaagatggaacggcagaagactgagaacctacggcaaggcccccttcagcaagaccaaggtgatccacgacagccaggagaccgccgagaaggaggtgaagagaaagagaagccaccccgagctggagaacgtgaagatcagcgagaccaccggcaacagcaagttcagacccgacaccagcagcaagagcagcgacctgggcagcgtgaccgagagcgacatcgactgcaccgacaacaccaagaccaagagaagaaagaccaagggcaaggccaaggtggtgagaaagggcaagaccttcaccgccaacatcagcaagaccgtgagaagacagagacagagcaagagacccagactgagcgtggacgacaacgactgggaggacctggactacgccaagagcaagagagtgctgagaagaagcaagatcaagaccagaaaccagggcagaagaaccgtgagataccacgacggcgacgacgacagaagcctggagaacgtgctggacttcaacggctgcaccctgtag

SEQ ID NO: 10257 - DNA, 492 bp, synthetic construct
  source 1..492: mol_type = other DNA; note = Synthetic coding sequence
atgaccgcccccagctgcgccttccccgtgcagttcagacagcccagcgtgagcggcctgagccagatcaccaagagcctgtacatcagcaacggcgtggccgccaacaacaagctgatgctgagcagcaaccagatcaccatggtgatcaacgtgagcgtggaggtggtgaacaccctgtacgaggacatccagtacatgcaggtgcccgtggccgacagccccaacagcagactgtgcgacttcttcgaccccatcgccgaccacatccacagcgtggagatgaagcagggcagaaccctgctgcactgcgccgccggcgtgagcagaagcgccgccctgtgcctggcctacctgatgaagtaccacgccatgagcctgctggacgcccacacctggaccaagagctgcagacccatcatcagacccaacagcggcttctgggagcagctgatccactacgagttccagctgttcggcaagaacacctag

SEQ ID NO: 10258 - DNA, 756 bp, synthetic construct
  source 1..756: mol_type = other DNA; note = Synthetic coding sequence
atgatcagcaccaccagcaaggagaccaagaaggacaccaagctgtactgcatctgcaagaccccctacgacgagagcaagttctacatcggctgcgacctgtgcaccaactggtaccacggcgagtgcgtgggcatcaccgagaaggaggccaagaagatggacgtgtacatctgcaacgactgcaagagagcccaggagggcagcagcgaggagctgtactgcatctgcagaaccccctacgacgagagccagttctacatcggctgcgacagatgccagaactggtaccacggcagatgcgtgggcatcctgcagagcgaggccgagctgatcgacgagtacgtgtgcccccagtgccagagcaccgaggacgccatgaccgtgctgacccccctgaccgagaaggactacgagggcctgaagagagtgctgagaagcctgcaggcccacaagatggcctggcccttcctggagcccgtggaccccaacgacgcccccgactactacggcgtgatcaaggagcccatggacctggccaccatggaggagagagtgcagagaagatactacgagaagctgaccgagttcgtggccgacatgaccaagatcttcgacaactgcagatactacaaccccagcgacagccccttctaccagtgcgccgaggtgctggagagcttcttcgtgcagaagctgaagggcttcaaggccagcagaagccacaacaacaagctgcagagcaccgccagctag

SEQ ID NO: 10259 - DNA, 501 bp, synthetic construct
  source 1..501: mol_type = other DNA; note = Synthetic coding sequence
atgtacagcctgaaccaggagatcaaggccttcagcagaaacaacctgagaaagcagtgcaccagagtgaccaccctgaccggcaagaagatcatcgagacctggaaggacgccagaatccacgtggtggaggaggtggagcccagcagcggcggcggctgcggctacgtgcaggacctgagcagcgacctgcaggtgggcgtgatcaagccctggctgctgctgggcagccaggacgccgcccacgacctggacaccctgaagaagaacaaggacggcgtggtgctggtgcactgcaacgccggcgtgagcagagccgccgccatcgtgatcggcttcctgatgaacagcgagcagaccagcttcaccagcgccttcagcctggtgaagaacgccagacccagcatctgccccaacagcggcttcatggagcagctgagaacctaccaggagggcaaggagagcaacaagtgcgacagaatccaggagaacagcagctag

SEQ ID NO: 10260 - DNA, 963 bp, synthetic construct
  source 1..963: mol_type = other DNA; note = Synthetic coding sequence
atgagcaagagcgccagccccaaggagcccgagcagctgagaaagctgttcatcggcggcctgagcttcgagaccaccgacgagagcctgagaagccacttcgagcagtggggcaccctgaccgactgcgtggtgatgagagaccccaacaccaagagaagcagaggcttcggcttcgtgacctacgccaccgtggaggaggtggacgccgccatgaacaccaccccccacaaggtggacggcagagtggtggagcccaagagagccgtgagcagagaggacagccagagacccggcgcccacctgaccgtgaagaagatcttcgtgggcggcatcaaggaggacaccgaggagcaccacctgagagactacttcgagcagtacggcaagatcgaggtgatcgagatcatgaccgacagaggcagcggcaagaagagaggcttcgccttcgtgaccttcgacgaccacgacagcgtggacaagatcgtgatccagaagtaccacaccgtgaagggccacaactgcgaggtgagaaaggccctgcccaagcaggagatggccagcgccagcagcagccagagaggcagaagaggcagcggcaacttcggcggcggcagaggcgacggcttcggcggcaacgacaacttcggcagaggcggcaacttcagcggcagaggcggcttcggcggcagctgcggcggcggcggctacggcggcagcggcgacggctacaacggcttcggcaacgacggcagcaacttcggcggcggcggcagctacaacgacttcggcaactacaacaaccagagcagcaacttcggccccatgaagggcggcaacttcggcggcagaagcagcggcccctacggcggcggcggccagtacttcgccaagccccagaaccagggcggctacggcgtgagcagcagcagcagcagctacggcagcggcagaagattctag

SEQ ID NO: 10261 - DNA, 357 bp, synthetic construct
  source 1..357: mol_type = other DNA; note = Synthetic coding sequence
atgagcctgctgaacaagcccaagagcgagatgacccccgaggagctgcagaagagagaggaggaggagttcaacaccggccccctgagcgtgctgacccagagcgtgaagaacaacacccaggtgctgatcaactgcagaaacaacaagaagctgctgggcagagtgaaggccttcgacagacactgcaacatggtgctggagaacgtgaaggagatgtggaccgaggtgcccaagagcggcaagggcaagaagaagagcaagcccgtgaacaaggacagatacatcagcaagatgttcctgagaggcgacagcgtgatcgtggtgctgagaaaccccctgatcgccggcaagtag

SEQ ID NO: 10262 - DNA, 1179 bp, synthetic construct
  source 1..1179: mol_type = other DNA; note = Synthetic coding sequence
atgaaggacaccctgggccaggcccagcagagagtggccgagctggagcccctgaaggagcagctgagaggcgcccaggagctggccgccagcagccagcagaaggccaccctgctgggcgaggagctggccagcgccgccgccgccagagacagaaccatcgccgagctgcacagaagcagactggaggtggccgaggtgaacggcagactggccgagctgggcctgcacctgaaggaggagaagtgccagtggagcaaggagagagccggcctgctgcagagcgtggaggccgagaaggacaagatcctgaagctgagcgccgagatcctgagactggagaaggccgtgcaggaggagagaacccagaaccaggtgttcaagaccgagctggccagagagaaggacagcagcctggtgcagctgagcgagagcaagagagagctgaccgagctgagaagcgccctgagagtgctgcagaaggagaaggagcagctgcaggaggagaagcaggagctgctggagtacatgagaaagctggaggccagactggagaaggtggccgacgagaagtggaacgaggacgccaccaccgaggacgaggaggccgccgtgggcctgagctgccccgccgccctgaccgacagcgaggacgagagccccgaggacatgagactgcccccctacggcctgtgcgagagaggcgaccccggcagcagccccgccggccccagagaggccagccccctggtggtgatcagccagcccgcccccatcagcccccacctgagcggccccgccgaggacagcagcagcgacagcgaggccgaggacgagaagagcgtgctgatggccgccgtgcagagcggcggcgaggaggccaacctgctgctgcccgagctgggcagcgccttctacgacatggccagcaccatcttctgcagagcccagatcgccctgctgcccctgagccccgccagcacccccagccccaccaccagcggcttcaccgtgggcaccctgagcgagaccagcaccggcggccccgccacccccacctggaaggagtgccccatctgcaaggagagattccccgccgagagcgacaaggacgccctggaggaccacatggacggccacttcttcttcagcacccaggaccccttcaccttcgagtag

SEQ ID NO: 10263 - DNA, 600 bp, synthetic construct
  source 1..600: mol_type = other DNA; note = Synthetic coding sequence
atgacccccctggccccctgggaccccaagtacgaggccaaggccggccccagacccgtgtggggcgccaactgcagcagcggcgccagcttcagcggcagaaccctgtgccaccccagcttctggcccctgtacgaggccgccagcggcagaggcctgagacccgtggcccccgccaccggccactggaacggccagcaggccccccccgacgccggcttccccgtggtgtgctgcgaggacgtgttcctgagcgaccccctgctgcccagaggccagagagtgcccctgtacctgagcaaggccccccagcagatgatgggcagcctgaagctgctgccccccccccccatcatgagcgccagagtgctgcccagacccagccccagcagaggccccagcaccgcctggctgagcggccccgagctgatcgccctgaccggcctgctgcagatgagccagggcgagcccagacccagcagcagcgccgtgggcccccccgaccacaccagcgacccccccagcccctgcggcagccccagcagcagccagggcgccgacctgagcctgccccagacccccgacacccactgcccctag

SEQ ID NO: 10264 - DNA, 1155 bp, synthetic construct
  source 1..1155: mol_type = other DNA; note = Synthetic coding sequence
atggagggcctgggcagaagctgcctgtggctgagaagagagctgagcccccccagacccagactgctgctgctggactgcagaagcagagagctgtacgagagcgccagaatcggcggcgccctgagcgtggccctgcccgccctgctgctgagaagactgagaagaggcagcctgagcgtgagagccctgctgcccggcccccccctgcagccccccccccccgcccccgtgctgctgtacgaccagggcggcggcagaagaagaagaggcgaggccgaggccgaggccgaggagtgggaggccgagagcgtgctgggcaccctgctgcagaagctgagagaggagggctacctggcctactacctgcagggcggcttcagcagattccaggccgagtgcccccacctgtgcgagaccagcctggccggcagagccggcagcagcatggcccccgtgcccggccccgtgcccgtggtgggcctgggcagcctgtgcctgggcagcgactgcagcgacgccgagagcgaggccgacagagacagcatgagctgcggcctggacagcgagggcgccacccccccccccgtgggcctgagagccagcttccccgtgcagatcctgcccaacctgtacctgggcagcgccagagacagcgccaacctggagagcctggccaagctgggcatcagatacatcctgaacgtgacccccaacctgcccaacttcttcgagaagaacggcgacttccactacaagcagatccccatcagcgaccactggagccagaacctgagcagattcttccccgaggccatcgagttcatcgacgaggccctgagccagaactgcggcgtgctggtgcactgcctggccggcgtgagcagaagcgtgaccgtgaccgtggcctacctgatgcagaagctgcacctgagcctgaacgacgcctacgacctggtgaagagaaagaagagcaacatcagccccaacttcaacttcatgggccagctgctggacttcgagagaagcctgagactggaggagagacacagccaggagcagggcagcggcggccaggccagcgccgccagcaacccccccagcttcttcaccacccccaccagcgacggcgccttcgagctggcccccacctag

SEQ ID NO: 10265 - DNA, 2208 bp, synthetic construct
  source 1..2208: mol_type = other DNA; note = Synthetic coding sequence
atggccgagcccctgctgagaaagaccttcagcagactgagaggcagagagaagctgcccagaaagaagagcgacgccaaggagagaggccaccccgcccagagacccgagcccagcccccccgagcccgagccccaggcccccgagggcagccaggccggcgccgagggccccagcagccccgaggccagcagaagccccgccagaggcgcctacctgcagagcctggagcccagcagcagaagatgggtgctgggcggcgccaagcccgccgaggacaccagcctgggccccggcgtgcccggcaccggcgagcccgccggcgagatctggtacaaccccatccccgaggaggaccccagaccccccgcccccgagccccccggcccccagcccggcagcgccgagagcgagggcctggccccccagggcgccgcccccgccagcccccccaccaaggccagcagaaccaagagccccggccccgccagaagactgagcatcaagatgaagaagctgcccgagctgagaagaagactgagcctgagaggccccagagccggcagagagagagagagagccgcccccgccggcagcgtgatcagcagataccacctggacagcagcgtgggcggccccggccccgccgccggccccggcggcaccagaagccccagagccggctacctgagcgacggcgacagccccgagagacccgccggcccccccagccccaccagcttcagaccctacgaggtgggccccgccgccagagccccccccgccgccctgtggggcagactgagcctgcacctgtacggcctgggcggcctgagacccgcccccggcgccacccccagagacctgtgctgcctgctgcaggtggacggcgaggccagagccagaaccggccccctgagaggcggccccgacttcctgagactggaccacaccttccacctggagctggaggccgccagactgctgagagccctggtgctggcctgggaccccggcgtgagaagacacagaccctgcgcccagggcaccgtgctgctgcccaccgtgttcagaggctgccaggcccagcagctggccgtgagactggagccccagggcctgctgtacgccaagctgaccctgagcgagcagcaggaggcccccgccaccgccgagcccagagtgttcggcctgcccctgcccctgctggtggagagagagagaccccccggccaggtgcccctgatcatccagaagtgcgtgggccagatcgagagaagaggcctgagagtggtgggcctgtacagactgtgcggcagcgccgccgtgaagaaggagctgagagacgccttcgagagagacagcgccgccgtgtgcctgagcgaggacctgtaccccgacatcaacgtgatcaccggcatcctgaaggactacctgagagagctgcccacccccctgatcacccagcccctgtacaaggtggtgctggaggccatggccagagacccccccaacagagtgccccccaccaccgagggcaccagaggcctgctgagctgcctgcccgacgtggagagagccaccctgaccctgctgctggaccacctgagactggtgagcagcttccacgcctacaacagaatgaccccccagaacctggccgtgtgcttcggccccgtgctgctgcccgccagacaggcccccaccagacccagagccagaagcagcggccccggcctggccagcgccgtggacttcaagcaccacatcgaggtgctgcactacctgctgcagagctggcccgaccccagactgcccagacagagccccgacgtggccccctacctgagacccaagagacagccccccctgcacctgcccctggccgaccccgaggtggtgaccagacccagaggcagaggcggccccgagagcccccccagcaacagatacgccggcgactggagcgtgtgcggcagagacttcctgccctgcggcagagacttcctgagcggccccgactacgaccacgtgaccggcagcgacagcgaggacgaggacgaggaggtgggcgagcccagagtgaccggcgacttcgaggacgacttcgacgcccccttcaacccccacctgaacctgaaggacttcgacgccctgatcctggacctggagagagagctgagcaagcagatcaacgtgtgcctgtag

SEQ ID NO: 10266 - DNA, 660 bp, synthetic construct
  source 1..660: mol_type = other DNA; note = Synthetic coding sequence
atgcccagaggcagaaagagcagaagaagaagaaacgccagagccgccgaggagaacagaaacaacagaaagatccaggccagcgaggccagcgagacccccatggccgccagcgtggtggccagcacccccgaggacgacctgagcggccccgaggaggaccccagcacccccgaggaggccagcaccacccccgaggaggccagcagcaccgcccaggcccagaagcccagcgtgcccagaagcaacttccagggcaccaagaagagcctgctgatgagcatcctggccctgatcttcatcatgggcaacagcgccaaggaggccctggtgtggaaggtgctgggcaagctgggcatgcagcccggcagacagcacagcatcttcggcgaccccaagaagatcgtgaccgaggagttcgtgagaagaggctacctgatctacaagcccgtgcccagaagcagccccgtggagtacgagttcttctggggccccagagcccacgtggagagcagcaagctgaaggtgatgcacttcgtggccagagtgagaaacagatgcagcaaggactggccctgcaactacgactgggacagcgacgacgacgccgaggtggaggccatcctgaacagcggcgccagaggctacagcgccccctag

SEQ ID NO: 10267 - DNA, 702 bp, synthetic construct
  source 1..702: mol_type = other DNA; note = Synthetic coding sequence
atgaacctgaacttcaccagccccctgcaccccgccagcagccagagacccaccagcttcttcatcgaggacatcctgctgcacaagcccaagcccctgagagaggtggcccccgaccacttcgccagcagcctggccagcagagtgcccctgctggactacggctaccccctgatgcccacccccaccctgctggccccccacgcccaccaccccctgcacaagggcgaccaccaccacccctacttcctgaccaccagcggcatgcccgtgcccgccctgttcccccacccccagcacgccgagctgcccggcaagcactgcagaagaagaaaggccagaaccgtgttcagcgacagccagctgagcggcctggagaagagattcgagatccagagatacctgagcacccccgagagagtggagctggccaccgccctgagcctgagcgagacccaggtgaagacctggttccagaacagaagaatgaagcacaagaagcagctgagaaagagccaggacgagcccaaggcccccgacggccccgagagccccgagggcagccccagaggcagcgaggccgccaccgccgccgaggccagactgagcctgcccgccggccccttcgtgctgaccgagcccgaggacgaggtggacatcggcgacgagggcgagctgggcagcggcccccacgtgctgtag

SEQ ID NO: 10268 - DNA, 873 bp, synthetic construct
  source 1..873: mol_type = other DNA; note = Synthetic coding sequence
atggagctgcccgccgtgggcgagcacgtgttcgccgtggagagcatcgagaagaagagaatcagaaagggcagagtggagtacctggtgaagtggagaggctggagccccaagtacaacacctgggagcccgaggagaacatcctggaccccagactgctgatcgccttccagaacagagagagacaggagcagctgatgggctacagaaagagaggccccaagcccaagcccctggtggtgcaggtgcccaccttcgccagaagaagcaacgtgctgaccggcctgcaggacagcagcaccgacaacagagccaagctggacctgggcgcccagggcaagggccagggccaccagtacgagctgaacagcaagaagcaccaccaccacgccgtgggcctgaacctgagccacgtgagaaagagatgcctgagcgagacccacggcgagagagagccctgcaagaagagactgaccgccagaagcatcagcacccccacctgcctgggcggcagccccgccgccgagagacccgccgacctgccccccgccgccgccctgccccagcccgaggtgatcctgctggacagcgacctggacgagcccatcgacctgagatgcgtgaagaccagaagcgaggccggcgagccccccagcagcctgcaggtgaagcccgagacccccgccagcgccgccgtggccgtggccgccgccgccgcccccaccaccaccgccgagaagccccccgccgaggcccaggacgagcccgccgagagcctgagcgagttcaagcccttcttcggcaacatcatcatcaccgacgtgaccgccaactgcctgaccgtgaccttcaaggagtacgtgaccgtgtag

SEQ ID NO: 10269 - DNA, 744 bp, synthetic construct
  source 1..744: mol_type = other DNA; note = Synthetic coding sequence
atgaccgaggacagccagagaaacttcagaagcgtgtactacgagaaggtgggcttcagaggcgtggaggagaagaagagcctggagatcctgctgaaggacgacagactggacaccgagaagctgtgcaccttcagccagagattccccctgcccagcatgtacagagccctggtgtggaaggtgctgctgggcatcctgcccccccaccacgagagccacgccaaggtgatgatgtacagaaaggagcagtacctggacgtgctgcacgccctgaaggtggtgagattcgtgagcgacgccaccccccaggccgaggtgtacctgagaatgtaccagctggagagcggcaagctgcccagaagccccagcttccccctgcccaaggccttcgagcagtacctgaacctggaggacggcagactgctgacccacctgagaatgtgcagcgccgcccccaagctgccctacgacctgtggttcaagagatgcttcgccggctgcctgcccgagagcagcctgcagagagtgtgggacaaggtggtgagcggcagctgcaagatcctggtgttcgtggccgtggagatcctgctgaccttcaagatcaaggtgatggccctgaacagcgccgagaagatcaccaagttcctggagaacatcccccaggacagcagcgacgccatcgtgagcaaggccatcgacctgtggcacaagcactgcggcacccccgtgcacagcagctag

SEQ ID NO: 10270 - DNA, 546 bp, synthetic construct
  source 1..546: mol_type = other DNA; note = Synthetic coding sequence
atggtgagcagctgctgcggcagcgtgagcagcgagcagagctgcggcctggagaactgctgcagacccagctgctgccagaccacctgctgcagaaccacctgctgcagacccagctgctgcaagccccagtgctgccagagcgtgtgctaccagcccacctgctgccaccccagctgctgcatcagcagctgctgcagaccctactgctgcgagagcagctgctgcagaccctgctgctgccagaccacctgctgcagaaccacctgctgcagaaccacctgctgctgccccagctgctgcgtgagcagctgctgcagaccccagtgctgccagagcgtgtgctgccagcccacctgctgcagacccagctgctgcatcagcagctgctgccaccccagctgctgcgagagcagctgctgcagaccctgctgctgcgtgagacccgtgtgcggcagagtgagctgccacaccacctgctacagacccacctgcgtgatcagcacctgccccagacccctgtgctgcgccagcagctgctgctag

SEQ ID NO: 10271 - DNA, 1086 bp, synthetic construct
  source 1..1086: mol_type = other DNA; note = Synthetic coding sequence
atggccctgaacgtggcccccgtgagagacaccaagtggctgaccctggaggtgtgcagacagttccagagaggcacctgcagcagaagcgacgaggagtgcaagttcgcccacccccccaagagctgccaggtggagaacggcagagtgatcgcctgcttcgacagcctgaagggcagatgcagcagagagaactgcaagtacctgcacccccccacccacctgaagacccagctggagatcaacggcagaaacaacctgatccagcagaagaccgccgccgccatgctggcccagcagatgcagttcatgttccccggcacccccctgcaccccgtgcccaccttccccgtgggccccgccatcggcaccaacaccgccatcagcttcgccccctacctggcccccgtgacccccggcgtgggcctggtgcccaccgagatcctgcccaccacccccgtgatcgtgcccggcagcccccccgtgaccgtgcccggcagcaccgccacccagaagctgctgagaaccgacaagctggaggtgtgcagagagttccagagaggcaactgcgccagaggcgagaccgactgcagattcgcccaccccgccgacagcaccatgatcgacaccagcgacaacaccgtgaccgtgtgcatggactacatcaagggcagatgcatgagagagaagtgcaagtacttccacccccccgcccacctgcaggccaagatcaaggccgcccagcaccaggccaaccaggccgccgtggccgcccaggccgccgccgccgccgccaccgtgatggccttcccccccggcgccctgcaccccctgcccaagagacaggccctggagaagagcaacggcaccagcgccgtgttcaaccccagcgtgctgcactaccagcaggccctgaccagcgcccagctgcagcagcacgccgccttcatccccaccgacaacagcgagatcatcagcagaaacggcatggagtgccaggagagcgccctgagaatcaccaagcactgctactgcacctactaccccgtgagcagcagcatcgagctgccccagaccgcctgctag

SEQ ID NO: 10272 - DNA, 1017 bp, synthetic construct
  source 1..1017: mol_type = other DNA; note = Synthetic coding sequence
atgctgaagaacaagggccacagcagcaagaaggacaacctggccgtgaacgccgtggccctgcaggaccacatcctgcacgacctgcagctgagaaacctgagcgtggccgaccacagcaagacccaggtgcagaagaaggagaacaagagcctgaagagagacaccaaggccatcatcgacaccggcctgaagaagaccacccagtgccccaagctggaggacagcgagaaggagtacgtgctggaccccaagcccccccccctgaccctggcccagaagctgggcctgatcggccccccccccccccccctgagcagcgacgagtgggagaaggtgaagcagagaagcctgctgcagggcgacagcgtgcagccctgccccatctgcaaggaggagttcgagctgagaccccaggtgttcagcatcagaggcaagaaccagtaccagaccagagtgatccacgacggcgccagactgttcagaatcaagtgcgtgaccagaatccaggcctactggagaggctgcgtggtgagaaagtggtacagaaacctgagaaagaccgtgccccccaccgacgccaagctgagaaagaagttcttcgagaagaagttcaccgagatcagccacagaatcctgtgcagctacaacaccaacatcgaggagctgttcgccgagatcgaccagtgcctggccatcaacagaagcgtgctgcagcagctggaggagaagtgcggccacgagatcaccgaggaggagtgggagaagatccaggtgcaggccctgagaagagagacccacgagtgcagcatctgcctggcccccctgagcgccgccggcggccagagagtgggcgccggcagaagaagcagagagatggccctgctgagctgcagccacgtgttccaccacgcctgcctgctggccctggaggagttcagcgtgggcgacagaccccccttccacgcctgccccctgtgcagaagctgctaccagaagaagatcctggagtgctag

SEQ ID NO: 10273 - DNA, 1098 bp, synthetic construct
  source 1..1098: mol_type = other DNA; note = Synthetic coding sequence
atggccgccgccgccgccggcaccgccaccagccagagattcttccagagcttcagcgacgccctgatcgacgaggacccccaggccgccctggaggagctgaccaaggccctggagcagaagcccgacgacgcccagtactactgccagagagcctactgccacatcctgctgggcaactactgcgtggccgtggccgacgccaagaagagcctggagctgaaccccaacaacagcaccgccatgctgagaaagggcatctgcgagtaccacgagaagaactacgccgccgccctggagaccttcaccgagggccagaagctggacatcgagaccggcttccacagagtgggccaggccggcctgcagctgctgaccagcagcgacccccccgccctggacagccagagcgccggcatcaccggcgccgacgccaacttcagcgtgtggatcaagagatgccaggaggcccagaacggcagcgagagcgaggtgtggacccaccagagcaagatcaagtacgactggtaccagaccgagagccaggtggtgatcaccctgatgatcaagaacgtgcagaagaacgacgtgaacgtggagttcagcgagaaggagctgagcgccctggtgaagctgcccagcggcgaggactacaacctgaagctggagctgctgcaccccatcatccccgagcagagcaccttcaaggtgctgagcaccaagatcgagatcaagctgaagaagcccgaggccgtgagatgggagaagctggagggccagggcgacgtgcccacccccaagcagttcgtggccgacgtgaagaacctgtaccccagcagcagcccctacaccagaaactgggacaagctggtgggcgagatcaaggaggaggagaagaacgagaagctggagggcgacgccgccctgaacagactgttccagcagatctacagcgacggcagcgacgaggtgaagagagccatgaacaagagcttcatggagagcggcggcaccgtgctgagcaccaactggagcgacgtgggcaagagaaaggtggagatcaacccccccgacgacatggagtggaagaagtactag

SEQ ID NO: 10274 - DNA, 1389 bp, synthetic construct
  source 1..1389: mol_type = other DNA; note = Synthetic coding sequence
atggacaaggacagccagggcctgctggacagcagcctgatggccagcggcaccgccagcagaagcgaggacgaggagagcctggccggccagaagagagccagcagccaggccctgggcaccatccccaagagaagaagcagcagcagattcatcaagagaaagaagttcgacgacgagctggtggagagcagcctggccaagagcagcaccagagccaagggcgccagcggcgtggagcccggcagatgcagcggcagcgagcccagcagcagcgagaagaagaaggtgagcaaggcccccagcacccccgtgccccccagccccgcccccgcccccggcctgaccaagagagtgaagaagagcaagcagcccctgcaggtgaccaaggacctgggcagatggaagcccgccgacgacctgctgctgatcaacgccgtgctgcagaccaacgacctgaccagcgtgcacctgggcgtgaagttcagctgcagattcaccctgagagaggtgcaggagagatggtacgccctgctgtacgaccccgtgatcagcaagctggcctgccaggccatgagacagctgcaccccgaggccatcgccgccatccagagcaaggccctgttcagcaaggccgaggagcagctgctgagcaaggtgggcagcaccagccagcccaccctggagaccttccaggacctgctgcacagacaccccgacgccttctacctggccagaaccgccaaggccctgcaggcccactggcagctgatgaagcagtactacctgctggaggaccagaccgtgcagcccctgcccaagggcgaccaggtgctgaacttcagcgacgccgaggacctgatcgacgacagcaagctgaaggacatgagagacgaggtgctggagcacgagctgatggtggccgacagaagacagaagagagagatcagacagctggagcaggagctgcacaagtggcaggtgctggtggacagcatcaccggcatgagcagccccgacttcgacaaccagaccctggccgtgctgagaggcagaatggtgagatacctgatgagaagcagagagatcaccctgggcagagccaccaaggacaaccagatcgacgtggacctgagcctggagggccccgcctggaagatcagcagaaagcagggcgtgatcaagctgaagaacaacggcgacttcttcatcgccaacgagggcagaagacccatctacatcgacggcagacccgtgctgtgcggcagcaagtggagactgagcaacaacagcgtggtggagatcgccagcctgagattcgtgttcctgatcaaccaggacctgatcgccctgatcagagccgaggccgccaagatcaccccccagtag

SEQ ID NO: 10275 - DNA, 963 bp, synthetic construct
  source 1..963: mol_type = other DNA; note = Synthetic coding sequence
atgagcgtgggcttcatcggcgccggccagctggcctacgccctggccagaggcttcaccgccgccggcatcctgagcgcccacaagatcatcgccagcagccccgagatgaacctgcccaccgtgagcgccctgagaaagatgggcgtgaacctgaccagaagcaacaaggagaccgtgaagcacagcgacgtgctgttcctggccgtgaagccccacatcatccccttcatcctggacgagatcggcgccgacgtgcaggccagacacatcgtggtgagctgcgccgccggcgtgaccatcagcagcgtggagaagaagctgatggccttccagcccgcccccaaggtgatcagatgcatgaccaacacccccgtggtggtgcaggagggcgccaccgtgtacgccaccggcacccacgccctggtggaggacggccagctgctggagcagctgatgagcagcgtgggcttctgcaccgaggtggaggaggacctgatcgacgccgtgaccggcctgagcggcagcggccccgcctacgccttcatggccctggacgccctggccgacggcggcgtgaagatgggcctgcccagaagactggccatccagctgggcgcccaggccctgctgggcgccgccaagatgctgctggacagcgagcagcacccctgccagctgaaggacaacgtgtgcagccccggcggcgccaccatccacgccctgcacttcctggagagcggcggcttcagaagcctgctgatcaacgccgtggaggccagctgcatcagaaccagagagctgcagagcatggccgaccaggagaagatcagccccgccgccctgaagaagaccctgctggacagagtgaagctggagagccccaccgtgagcaccctgacccccagcagccccggcaagctgctgaccagaagcctggccctgggcggcaagaaggactag

SEQ ID NO: 10276 - DNA, 2370 bp, synthetic construct
  source 1..2370: mol_type = other DNA; note = Synthetic coding sequence
atggaggacggccccagcaacaacgccagctgcttcagaagactgaccgagtgcttcctgagccccagcctgaccgacgagaaggtgaaggcctacctgagcctgcacccccaggtgctggacgagttcgtgagcgagagcgtgagcgccgagaccgtggagaagtggctgaagagaaagaacaacaagagcgaggacgagagcgcccccaaggaggtgagcagataccaggacaccaacatgcagggcgtggtgtacgagctgaacagctacatcgagcagagactggacaccggcggcgacaaccagctgctgctgtacgagctgagcagcatcatcaagatcgccaccaaggccgacggcttcgccctgtacttcctgggcgagtgcaacaacagcctgtgcatcttcaccccccccggcatcaaggagggcaagcccagactgatccccgccggccccatcacccagggcaccaccgtgagcgcctacgtggccaagagcagaaagaccctgctggtggaggacatcctgggcgacgagagattccccagaggcaccggcctggagagcggcaccagaatccagagcgtgctgtgcctgcccatcgtgaccgccatcggcgacctgatcggcatcctggagctgtacagacactggggcaaggaggccttctgcctgagccaccaggaggtggccaccgccaacctggcctgggccagcgtggccatccaccaggtgcaggtgtgcagaggcctggccaagcagaccgagctgaacgacttcctgctggacgtgagcaagacctacttcgacaacatcgtggccatcgacagcctgctggagcacatcatgatctacgccaagaacctggtgaacgccgacagatgcgccctgttccaggtggaccacaagaacaaggagctgtacagcgacctgttcgacatcggcgaggagaaggagggcaagcccgtgttcaagaagaccaaggagatcagattcagcatcgagaagggcatcgccggccaggtggccagaaccggcgaggtgctgaacatccccgacgcctacgccgaccccagattcaacagagaggtggacctgtacaccggctacaccaccagaaacatcctgtgcatgcccatcgtgagcagaggcagcgtgatcggcgtggtgcagatggtgaacaagatcagcggcagcgccttcagcaagaccgacgagaacaacttcaagatgttcgccgtgttctgcgccctggccctgcactgcgccaacatgtaccacagaatcagacacagcgagtgcatctacagagtgaccatggagaagctgagctaccacagcatctgcaccagcgaggagtggcagggcctgatgcagttcaccctgcccgtgagactgtgcaaggagatcgagctgttccacttcgacatcggccccttcgagaacatgtggcccggcatcttcgtgtacatggtgcacagaagctgcggcaccagctgcttcgagctggagaagctgtgcagattcatcatgagcgtgaagaagaactacagaagagtgccctaccacaactggaagcacgccgtgaccgtggcccactgcatgtacgccatcctgcagaacaaccacaccctgttcaccgacctggagagaaagggcctgctgatcgcctgcctgtgccacgacctggaccacagaggcttcagcaacagctacctgcagaagttcgaccaccccctggccgccctgtacagcaccagcaccatggagcagcaccacttcagccagaccgtgagcatcctgcagctggagggccacaacatcttcagcaccctgagcagcagcgagtacgagcaggtgctggagatcatcagaaaggccatcatcgccaccgacctggccctgtacttcggcaacagaaagcagctggaggagatgtaccagaccggcagcctgaacctgaacaaccagagccacagagacagagtgatcggcctgatgatgaccgcctgcgacctgtgcagcgtgaccaagctgtggcccgtgaccaagctgaccgccaacgacatctacgccgagttctgggccgagggcgacgagatgaagaagctgggcatccagcccatccccatgatggacagagacaagaaggacgaggtgccccagggccagctgggcttctacaacgccgtggccatcccctgctacaccaccctgacccagatcctgccccccaccgagcccctgctgaaggcctgcagagacaacctgagccagtgggagaaggtgatcagaggcgaggagaccgccacctggatcagcagccccagcgtggcccagaaggccgccgccagcgaggactag

SEQ ID NO: 10277 - DNA, 645 bp, synthetic construct
  source 1..645: mol_type = other DNA; note = Synthetic coding sequence
atggacgacagcgagaccggcttcaacctgaaggtggtgctggtgagcttcaagcagtgcctggacgagaaggaggaggtgctgctggacccctacatcgccagctggaagggcctggtgagattcctgaacagcctgggcaccatcttcagcttcatcagcaaggacgtggtgagcaagctgagaatcatggagagactgagaggcggcccccagagcgagcactacagaagcctgcaggccatggtggcccacgagctgagcaacagactggtggacctggagagaagaagccaccaccccgagagcggctgcagaaccgtgctgagactgcacagagccctgcactggctgcagctgttcctggagggcctgagaaccagccccgaggacgccagaaccagcgccctgtgcgccgacagctacaacgccagcctggccgcctaccacccctgggtggtgagaagagccgtgaccgtggccttctgcaccctgcccaccagagaggtgttcctggaggccatgaacgtgggcccccccgagcaggccgtgcagatgctgggcgaggccctgcccttcatccagagagtgtacaacgtgagccagaagctgtacgccgagcacagcctgctggacctgccctag

SEQ ID NO: 10278 - DNA, 4293 bp, synthetic construct
  source 1..4293: mol_type = other DNA; note = Synthetic coding sequence
atgaccagcgccgccgagatcaagaagccccccgtggcccccaagcccaagttcgtggtggccaacaacaagcccgcccccccccccatcgcccccaagcccgacatcgtgatcagcagcgtgccccagagcaccaagaagatgaagcccgccatcgcccccaagcccaaggtgctgaagaccagccccgtgagagagatcggccagagccccagcagaaagatcatgctgaacctggagggccacaagcaggagctggccgagagcaccgacaacttcaactgcaagtacgagggcaaccagagcaacgactacatcagccccatgtgcagctgcagcagcgagtgcatccacaagctgggccacagagagaacctgtgcgtgaagcagctggtgctggagcccctggagatgaacgagaacctggagaacagcaagatcgacgagaccctgaccatcaagaccagaagcaagtgcgacctgtacggcgagaaggccaagaaccagggcggcgtggtgctgaaggccagcgtgctggaggaggagctgaaggacgccctgatccaccagatgccccccttcatcagcgcccagaagcacagacccaccgacagccccgagatgaacggcggctgcaacagcaacggccagttcagaatcgagttcgccgacctgagccccagccccagcagcttcgagaaggtgcccgaccaccacagctgccacctgcagctgcccagcgacgagtgcgagcacttcgagacctgccaggacgacagcgagaagagcaacaactgcttccagagcagcgagctggaggccctggagaacggcaagagaagcaccctgatcagcagcgacggcgtgagcaagaagagcgaggtgaaggacctgggccccctggagatccacctggtgccctacacccccaagttccccacccccaagcccagaaagaccagaaccgccagactgctgagacagaagtgcgtggacacccccagcgagagcaccgaggagcccggcaacagcgacagcagcagcagctgcctgaccgagaacagcctgaagatcaacaagatcagcgtgctgcaccagaacgtgctgtgcaagcaggagcaggtggacaagatgaagctgggcaacaagagcgagctgaacatggagagcaacagcgacgcccaggacctggtgaacagccagaaggccatgtgcaacgagaccaccagcttcgagaagatggcccccagcttcgacaaggacagcaacctgagcagcgacagcaccaccgtggacggcagcagcatgagcctggccgtggacgagggcaccggcttcatcagatgcaccgtgagcatgagcctgcccaagcagctgaagctgacctgcaacgagcacctgcagagcggcagaaacctgggcgtgagcgccccccagatgcagaaggagagcgtgatcaaggaggagaacagcctgagaatcgtgcccaagaagccccagagacacagcctgcccgccaccggcgtgctgaagaaggccgccagcgaggagctgctggagaagagcagctaccccagcagcgaggagaagagcagcgagaagagcctggagagaaaccacctgcagcacctgtgcgcccagaacagaggcgtgagcagcagcttcgacatgcccaagagagccagcgagaagcccgtgtggaagctgccccaccccatcctgcccttcagcggcaaccccgagttcctgaagagcgtgaccgtgagcagcaacagcgagcccagcaccgccctgaccaagcccagagccaagagcctgagcgccatggacgtggagaagtgcaccaagccctgcaaggacagcaccaagaagaacagcttcaagaagctgctgagcatgaagctgagcatctgcttcatgaagagcgacttccagaagttctggagcaagagcagccagctgggcgacaccaccaccggccacctgagcagcggcgagcagaagggcatcgagagcgactggcagggcctgctggtgggcgaggagaagagaagcaagcccatcaaggcctacagcaccgagaactacagcctggagagccagaagaagagaaagaagagcagaggccagaccagcgccgccaacggcctgagagccgagagcctggacgaccagatgctgagcagagagagcagcagccaggccccctacaagagcgtgaccagcctgtgcgcccccgagtacgagaacatcagacactacgaggagatccccgagtacgagaacctgcccttcatcatggccatcagaaagacccaggagctggagtggcagaacagcagcagcatggaggacgccgacgccaacgtgtacgaggtggaggagccctacgaggcccccgacggccagctgcagctgggccccagacaccagcacagcagcagcggcgccagccaggaggagcagaacgacctgggcctgggcgacctgcccagcgacgaggaggagatcatcaacagcagcgacgaggacgacgtgagcagcgagagcagcaagggcgagcccgaccccctggaggacaagcaggacgaggacaacggcatgaagagcaaggtgcaccacatcgccaaggagatcatgagcagcgagaaggtgttcgtggacgtgctgaagctgctgcacatcgacttcagagacgccgtggcccacgccagcagacagctgggcaagcccgtgatcgaggacagaatcctgaaccagatcctgtactacctgccccagctgtacgagctgaacagagacctgctgaaggagctggaggagagaatgctgcactggaccgagcagcagagaatcgccgacatcttcgtgaagaagggcccctacctgaagatgtacagcacctacatcaaggagttcgacaagaacatcgccctgctggacgagcagtgcaagaagaaccccggcttcgccgccgtggtgagagagttcgagatgagccccagatgcgccaacctggccctgaagcactacctgctgaagcccgtgcagagaatcccccagtacagactgctgctgaccgactacctgaagaacctgatcgaggacgccggcgactacagagacacccaggacgccctggccgtggtgatcgaggtggccaaccacgccaacgacaccatgaagcagggcgacaacttccagaagctgatgcagatccagtacagcctgaacggccaccacgagatcgtgcagcccggcagagtgttcctgaaggagggcatcctgatgaagctgagcagaaaggtgatgcagcccagaatgttcttcctgttcaacgacgccctgctgtacaccacccccgtgcagagcggcatgtacaagctgaacaacatgctgagcctggccggcatgaaggtgagaaagcccacccaggaggcctaccagaacgagctgaagatcgagagcgtggagagaagcttcatcctgagcgccagcagcgccaccgagagagacgagtggctggaggccatcagcagagccatcgaggagtacgccaagaagagaatcaccttctgccccagcagaagcctggacgaggccgacagcgagaacaaggaggaggtgagccccctgggcagcaaggcccccatctggatccccgacaccagagccaccatgtgcatgatctgcaccagcgagttcaccctgacctggagaagacaccactgcagagcctgcggcaagatcgtgtgccaggcctgcagcagcaacaagtacggcctggactacctgaagaaccagcccgccagagtgtgcgagcactgcttccaggagctgcagaagctggaccaccagcacagccccagaatcggcagccccggcaaccacaagagccccagcagcgccctgagcagcgtgctgcacagcatccccagcggcagaaagcagaagaagatccccgccgccctgaaggaggtgagcgccaacaccgaggacagcagcatgagcggctacctgtacagaagcaagggcaacaagaagccctggaagcacttctggttcgtgatcaagaacaaggtgctgtacacctacgccgccagcgaggacgtggccgccctggagagccagcccctgctgggcttcaccgtgatccaggtgaaggacgagaacagcgagagcaaggtgttccagctgctgcacaagaacatgctgttctacgtgttcaaggccgaggacgcccacagcgcccagaagtggatcgaggccttccaggagggcaccatcctgtag

SEQ ID NO: 10279 - DNA, 1641 bp, synthetic construct
  source 1..1641: mol_type = other DNA; note = Synthetic coding sequence
atgggcgcctacctgagccagcccaacaccgtgaagtgcagcggcgacggcgtgggcgcccccagactgcccctgccctacggcttcagcgccatgcagggctggagagtgagcatggaggacgcccacaactgcatccccgagctggacagcgagaccgccatgttcagcgtgtacgacggccacggcggcgaggaggtggccctgtactgcgccaagtacctgcccgacatcatcaaggaccagaaggcctacaaggagggcaagctgcagaaggccctggaggacgccttcctggccatcgacgccaagctgaccaccgaggaggtgatcaaggagctggcccagatcgccggcagacccaccgaggacgaggacgagaaggagaaggtggccgacgaggacgacgtggacaacgaggaggccgccctgctgcacgaggaggccaccatgaccatcgaggagctgctgaccagatacggccagaactgccacaagggccccccccacagcaagagcggcggcggcaccggcgaggagcccggcagccagggcctgaacggcgaggccggccccgaggacagcaccagagagacccccagccaggagaacggccccaccgccaaggcctacaccggcttcagcagcaacagcgagagaggcaccgaggccggccaggtgggcgagcccggcatccccaccggcgaggccggccccagctgcagcagcgccagcgacaagctgcccagagtggccaagagcaagttcttcgaggacagcgaggacgagagcgacgaggccgaggaggaggaggaggacagcgaggagtgcagcgaggaggaggacggctacagcagcgaggaggccgagaacgaggaggacgaggacgacaccgaggaggccgaggaggacgacgaggaggaggaggaggagatgatggtgcccggcatggagggcaaggaggagcccggcagcgacagcggcaccaccgccgtggtggccctgatcagaggcaagcagctgatcgtggccaacgccggcgacagcagatgcgtggtgagcgaggccggcaaggccctggacatgagctacgaccacaagcccgaggacgaggtggagctggccagaatcaagaacgccggcggcaaggtgaccatggacggcagagtgaacggcggcctgaacctgagcagagccatcggcgaccacttctacaagagaaacaagaacctgccccccgaggagcagatgatcagcgccctgcccgacatcaaggtgctgaccctgaccgacgaccacgagttcatggtgatcgcctgcgacggcatctggaacgtgatgagcagccaggaggtggtggacttcatccagagcaagatcagccagagagacgagaacggcgagctgagactgctgagcagcatcgtggaggagctgctggaccagtgcctggcccccgacaccagcggcgacggcaccggctgcgacaacatgacctgcatcatcatctgcttcaagcccagaaacaccgccgagctgcagcccgagagcggcaagagaaagctggaggaggtgctgagcaccgagggcgccgaggagaacggcaacagcgacaagaagaagaaggccaagagagactag

SEQ ID NO: 10280 - DNA, 273 bp, synthetic construct
  source 1..273: mol_type = other DNA; note = Synthetic coding sequence
atgagcaccgccatgaacttcggcaccaagagcttccagcccagaccccccgacaagggcagcttccccctggaccacctgggcgagtgcaagagcttcaaggagaagttcatgaagtgcctgcacaacaacaacttcgagaacgccctgtgcagaaaggagagcaaggagtacctggagtgcagaatggagagaaagctgatgctgcaggagcccctggagaagctgggcttcggcgacctgaccagcggcaagagcgaggccaagaagtag

SEQ ID NO: 10281 - DNA, 726 bp, synthetic construct
  source 1..726: mol_type = other DNA; note = Synthetic coding sequence
atgaacagcggcagacccgagaccatggagaacctgcccgccctgtacaccatcttccagggcgaggtggccatggtgaccgactacggcgccttcatcaagatccccggctgcagaaagcagggcctggtgcacagaacccacatgagcagctgcagagtggacaagcccagcgagatcgtggacgtgggcgacaaggtgtgggtgaagctgatcggcagagagatgaagaacgacagaatcaaggtgagcctgagcatgaaggtggtgaaccagggcaccggcaaggacctggaccccaacaacgtgatcatcgagcaggaggagagaagaagaagaagcttccaggactacaccggccagaagatcaccctggaggccgtgctgaacaccacctgcaagaagtgcggctgcaagggccacttcgccaaggactgcttcatgcagcccggcggcaccaagtacagcctgatccccgacgaggaggaggagaaggaggaggccaagagcgccgagttcgagaagcccgaccccaccagaaaccccagcagaaagagaaagaaggagaagaagaagaagaagcacagagacagaaagagcagcgacagcgacagcagcgacagcgagagcgacaccggcaagagagccagacacaccagcaaggacagcaaggccgccaagaagaagaagaagaagaagaagcacaagaagaagcacaaggagtag

SEQ ID NO: 10282 - DNA, 1758 bp, synthetic construct
  source 1..1758: mol_type = other DNA; note = Synthetic coding sequence
atggccgccgccgccgccgccgtgggccccggcgccggcggcgccggcagcgccgtgcccggcggcgccggcccctgcgccaccgtgagcgtgttccccggcgccagactgctgaccatcggcgacgccaacggcgagatccagagacacgccgagcagcaggccctgagactggaggtgagagccggccccgacagcgccggcatcgccctgtacagccacgaggacgtgtgcgtgttcaagtgcagcgtgagcagagagaccgagtgcagcagagtgggcaagcagagcttcatcatcaccctgggctgcaacagcgtgctgatccagttcgccacccccaacgacttctgcagcttctacaacatcctgaagacctgcagaggccacaccctggagagaagcgtgttcagcgagagaaccgaggagagcagcgccgtgcagtacttccagttctacggctacctgagccagcagcagaacatgatgcaggactacgtgagaaccggcacctaccagagagccatcctgcagaaccacaccgacttcaaggacaagatcgtgctggacgtgggctgcggcagcggcatcctgagcttcttcgccgcccaggccggcgccagaaagatctacgccgtggaggccagcaccatggcccagcacgccgaggtgctggtgaagagcaacaacctgaccgacagaatcgtggtgatccccggcaaggtggaggaggtgagcctgcccgagcaggtggacatcatcatcagcgagcccatgggctacatgctgttcaacgagagaatgctggagagctacctgcacgccaagaagtacctgaagcccagcggcaacatgttccccaccatcggcgacgtgcacctggcccccttcaccgacgagcagctgtacatggagcagttcaccaaggccaacttctggtaccagcccagcttccacggcgtggacctgagcgccctgagaggcgccgccgtggacgagtacttcagacagcccgtggtggacaccttcgacatcagaatcctgatggccaagagcgtgaagtacaccgtgaacttcctggaggccaaggagggcgacctgcacagaatcgagatccccttcaagttccacatgctgcacagcggcctggtgcacggcctggccttctggttcgacgtggccttcatcggcagcatcatgaccgtgtggctgagcaccgcccccaccgagcccctgacccactggtaccaggtgagatgcctgttccagagccccctgttcgccaaggccggcgacaccctgagcggcacctgcctgctgatcgccaacaagagacagagctacgacatcagcatcgtggcccaggtggaccagaccggcagcaagagcagcaacctgctggacctgaagaaccccttcttcagatacaccggcaccacccccagccccccccccggcagccactacaccagccccagcgagaacatgtggaacaccggcagcacctacaacctgagcagcggcatggccgtggccggcatgcccaccgcctacgacctgagcagcgtgatcgccagcggcagcagcgtgggccacaacaacctgatccccctgggcagcagcggcgcccagggcagcggcggcggcagcaccagcgcccactacgccgtgaacagccagttcaccatgggcggccccgccatcagcatggccagccccatgagcatccccaccaacaccatgcactacggcagctag

SEQ ID NO: 10283 - DNA, 771 bp, synthetic construct
  source 1..771: mol_type = other DNA; note = Synthetic coding sequence
atggccagcggcagacccgaggagctgtgggaggccgtggtgggcgccgccgagagattcagagccagaaccggcaccgagctggtgctgctgaccgccgcccccccccccccccccagacccggcccctgcgcctacgccgcccacggcagaggcgccctggccgaggccgccagaagatgcctgcacgacatcgccctggcccacagagccgccaccgccgccagaccccccgcccccccccccgccccccagccccccagccccacccccagcccccccagacccaccctggccagagaggacaacgaggaggacgaggacgagcccaccgagaccgagaccagcggcgagcagctgggcatcagcgacaacggcggcctgttcgtgatggacgaggacgccaccctgcaggacctgccccccttctgcgagagcgaccccgagagcaccgacgacggcagcctgagcgaggagacccccgccggcccccccacctgcagcgtgccccccgccagcgccctgcccacccagcagtacgccaagagcctgcccgtgagcgtgcccgtgtggggcttcaaggagaagagaaccgaggccagaagcagcgacgaggagaacggcccccccagcagccccgacctggacagaatcgccgccagcatgagagccctggtgctgagagaggccgaggacacccaggtgttcggcgacctgcccagacccagactgaacaccagcgacttccagaagctgaagagaaagtactag

SEQ ID NO: 10284 - DNA, 4293 bp, synthetic construct
  source 1..4293: mol_type = other DNA; note = Synthetic coding sequence
atgtgcctggagagcaacctgagcagctgcaagcacctgccctgctgcggcaagctgcacttccagagctgccacggcaacgtgcacaagctgcaccagttccccagcctgcagggctgcaccagcgccggctacttcccctgcagcgacttcaccagcggcgcccccggccacctggaggagcacatcagccagagcgagctgaccccccacctgtgcaccaacagcctgcacctgaacgtggtgccccccgtgtgcctgaagggcagcctgtactgcgaggactgcctgaacaagcccgccagaaacagcatcatcgacgccgccaaggtgtggcccaacatccccccccccaacacccagcccgcccccctggccgtgcccctgtgcaacggctgcggcaccaagggcaccggcaaggagaccaccctgctgctggccaccagcctgggcaaggccgccagcaagttcggcagccccgaggtggccgtggccggccaggtgctggagaacctgccccccatcggcgtgttctgggacatcgagaactgcagcgtgcccagcggcagaagcgccaccgccgtggtgcagagaatcagagagaagttcttcaagggccacagagaggccgagttcatctgcgtgtgcgacatcagcaaggagaacaaggaggtgatccaggagctgaacaactgccaggtgaccgtggcccacatcaacgccaccgccaagaacgccgccgacgacaagctgagacagagcctgagaagattcgccaacacccacaccgcccccgccaccgtggtgctggtgagcaccgacgtgaacttcgccctggagctgagcgacctgagacacagacacggcttccacatcatcctggtgcacaagaaccaggccagcgaggccctgctgcaccacgccaacgagctgatcagattcgaggagttcatcagcgacctgccccccagactgcccctgaagatgccccagtgccacaccctgctgtacgtgtacaacctgcccgccaacaaggacggcaagagcgtgagcaacagactgagaagactgagcgacaactgcggcggcaaggtgctgagcatcaccggctgcagcgccatcctgagattcatcaaccaggacagcgccgagagagcccagaagagaatggagaacgaggacgtgttcgagaagaaggacaaggaggagaccgtgttccaggtgagctaccccagcgccttcagcaagctggtggccagcagacaggtgagccccctgctggccagccagagctggagcagcagagccagccccctggccttcaacatcgccaacagcagcagcgaggccgactgccccgaccccttcgccaacggcgccgacgtgcaggtgagcaacatcgactacagactgagcagaaaggagctgcagcagctgctgcaggaggccttcgccagacacggcaaggtgaagagcgtggagctgagcccccacaccgactaccagctgaaggccgtggtgcagatggagaacctgcaggacgccatcggcgccgtgaacagcctgcacagatacaagatcggcagcaagaagatcctggtgagcctggccaccggcgccgccagcaagagcctgagcctgctgagattcggccacaagctgaacgtgagcgacctgtacaagctgaccgacaccgtggccatcagagagcagggcaacggcagactggtgtgcctgctgcccagcagccaggccagacagagccccctgggcagcagccagagccacgacggcagcagcaccaactgcagccccatcatcttcgaggagctggagtaccacgagcccgtgtgcagacagcactgcagcaacaaggacttcagcttccccgactgctacatcgccgagttcggcgacctggaggtggtgcaggagaaccagggcggcgtgcccctggagcacttcatcacctgcgtgcccggcgtgaacatcgccaccgcccagaacggcatcaaggtggtgaagtggatccacaacaagccccccccccccaacaccgacccctggctgctgagaagcaagagccccgtgggcaacccccagctgatccagttcagcagagaggtgatcgacctgctgaagagccagcccagctgcgtgatccccatcagccacttcatccccagctaccaccaccacttcgccaagcagtgcagagtgagcgactacggctacagcaagctgatcgagctgctggaggccgtgccccacgtgctgcagatcctgggcatgggcagcaagagactgctgaccctgacccacagagcccaggtgaagagattcacccaggacctgctgaagctgctgaagagccaggccagcaagcaggtgatcgtgagagagttcagccaggcctaccactggtgcttcagcaaggactgggacgtgaccgagtacggcgtgtgcgagctgatcgacatcgtgagcgagatccccgacaccaccatctgcctgagccagcaggacaacgagatggtgatctgcatccccaagagagagagaacccaggacgagatcgagagaaccaagcagttcagcaaggacgtggtggacctgctgagacaccagccccacttcagaatgcccttcaacaagttcatccccagctaccaccaccacttcggcagacagtgcaagctggcctactacggcttcaccaagctgctggagctgttcgaggccatccccgacaccctgcaggtgctggagtgcggcgaggagaagatcctgaccctgaccgaggtggagagattcaaggccctggccgcccagttcgtgaagctgctgagaagccagaaggacaactgcctgatgatgaccgacctgctgaccgagtacgccaagaccttcggctacaccttcagactgcaggactacgacgtgagcagcatcagcgccctgacccagaagctgtgccacgtggtgaaggtggccgacatcgagagcggcagacagatccagctgatcaacagaaagagcctgagaagcctgaccgcccagctgctggtgctgctgatgagctgggagggcaccacccacctgagcgtggaggagctgaagagacactacgagagcacccacaacacccccctgaacccctgcgagtacggcttcatgaccctgaccgagctgctgaagagcctgccctacctggtggagaccgccgccgccttcgacctgcagatcgagctgaagttcgccggcggctacagcctgctgctggaggagatcctggagtacatccccccccccttcctgagccccctgcccagcttcctgccccccccccccttcttcttcttcgtgttcttcgtgatcttcatcttcttcatcttcgtgttcgtgcagttcgtggtgttcgtgttcttcatcgtggtgttcgtgttcttcatcgtggtgttcgtgttcaccaacgacaagatggaggagtgcgtgaagctgaccagcctgtacctgttcgccaagaacgtgagaagcctgctgcacacctaccactaccagcagatcttcctgcacgagttcagcatggcctacaccaagtacgtgggcgagaccctgcagcccaagacctacggccacagcagcgtggaggagctgctgggcgccatcccccaggtggtggtgcagttcctgcagaagaacggcaaggagctgagctgcgagaactacctgaacctgtacgccaaggccggcagactgagcagcctgagcctgagccccgccaaccacgagaaccagcccagcgagggcgagagaatcctggaggtgcccgagagccacaccgccagcgagctgaagctgggcgccgacggcagcggccccagccacaccgagcaggagctgctgagactgaccgacgacagccccgtggacctgctgtgcgcccccgtgcccagctgcctgcccagcccccagctgagacccgaccccgtgatcctgcagagcgccgacctgatccagttcgaggagagaccccaggagcccagcgagatcatgatcctgaaccaggaggagaagatggagatccccatccccggcaagagcaagaccctgaccagcgacagcagcagcagctgcatcagcgccgccgtgcccgtgcccccctgccccagcagcgagaccagcgagagcctgctgagcaaggaccccgtggagagccccgccaagaagcagcccaagaacagagtgaagctggccgccaacttcagcctggcccccatcaccaagctgtag

SEQ ID NO: 10285 - DNA, 2346 bp, synthetic construct
  source 1..2346: mol_type = other DNA; note = Synthetic coding sequence
atgggccagctgagagactggttccccaacacccaggacctggccggcaacgaccaggagaacatcagacacgccgacagaaacaacagcgacgacaaccacctggccagcgaggacaccagcgccaagcagagcggcaagcccggcatctacgaggacagagaccccctgagagtgagcatcagcagagagcagagcttcttcggcagccccctggcccacgaccccttcagctgcctgcagctggtgggccaggagaacgtgtgcggcgacgactacgacgaggccgtgaagctgaaggagagcgtggtggagaaccacgccgtgctgagctacgccgtggaggaggagcacgcctacctgggccccaccgtgaagcccgacgacaaggccaagaccctgagctacgagcccctgagcagcgccaccgtgagcaccggcagcctgctgagctacgagaacaccgacctgagcctgaccgaccccgagagcttcagcgagcacatggacgacagcaagcaggagagcaccaccagcaaggaggaggagaccaacatcatcagcagcatcgtgcccagcacccaggacatctaccagagacagaacagcagcgacgtgcacaagagcctgctgcccgccgtggacgagaccacctgcggccacacccacttccagcagatgatcgacaagtacatcaacgaggccaacctgatccccgagaagaccgacctgcaggagctggagcacatcttccccaacctgcaccaccagctgttcaagcccctggagccccaccccgacttcgacctgagcagcagcagcagcggcatcagccccgacaacagagacttctaccagagaagcgacagcagcagcgagagccactgcgccaccggcctgagcaagagcaccgtgtacttcaccgccctgagaagaaccagcatgcacagcagcctgaacaccagccccaaccagcagcccgacaccaacctggcccacgtgggcgcccacagcttcgccaccgagaacatcatcggcggcagcgagcagtgcttcgagcagctgcagcccgagtacagcagccaggaggagagccagcacgccgacctgcccagcatcttcagcatcgaggccagagacagcagccagggcatgaagaaccagaactaccccagcgaggagcacaccgagatcctgcagaacaagaagaagatcgtgcacttccagctgagcatcggcaacctgagcagcgtgtacagcagcagcgacgaggccaacgtgttcgaccagctgaacgtgcagcacagcaccccctgcggcagcaacagcagcgagtgcagcaccaagcaccagctggagagcagaaaggagagcatgggcttcgaggagctgagcaagagaggcgtggtgaccatgctgcagagccagggcctgatcgaggacaacaagaacgagacctgcagagtgctggacatcaacccccaggtggaggagaccgacagcagactgtgcgtgagaaccgtggagatgggcaccagcatccaggccccctacagcctgaccacccagaacgagaagtacttcgagaacagcgccgagaccgacatccccaagatcaccaagaagctgagccagctgggcgagagcgagctgttcgccagcagcggcagcttcagcctgcagagcagcatccccgtgtgggagaccgagaccggccacggcatcatggaggagcccgagctgaccctgatcagcaccaccgacaccagcatcgccgagatggacttcgccaacctgaccctggaggagaagagcgagaacgaggccaagtgcttcttccaggtgagcgagttcctgcccctggtgagcgccaccgaggccagcgactaccccgccgtgagcgagctgagcatcgagaagcccagaaccgccagcaccgagacccccagaagactgacccccgtgcccggcagcctgcaggaggccttcatcaagagaaagaagagcttcatggagagaagccaccagagacagaaggagatcagaaacaagatccacgtgagcgagaacagccagatcaagaccgtgaaggagaagcccagcatcagcagcagcgtgagcagactgaagggcgtgaacaaggtgagagccagcttccccgaggacagaaagaccacccaggccctgagacaccagagaggcctgagactgtacaaccagctggccgaggtgaagcagcagaaggaggagaagaccaagcaggaggcctacgcccagaacagagccagagccaaggagttccacaagaagaccctggagaagctgagagccaagaacacctgctag

SEQ ID NO: 10286 - DNA, 513 bp, synthetic construct
  source 1..513: mol_type = other DNA; note = Synthetic coding sequence
atgggcaagagatacttctgcgactactgcgacagaagcttccaggacaacctgcacaacagaaagaagcacctgaacggcctgcagcacctgaaggccaagaaggtgtggtacgacatgttcagagacgccgccgccatcctgctggacgagcagaacaagagaccctgcagaaagttcctgctgaccggccagtgcgacttcggcagcaactgcagattcagccacatgagcgagagagacctgcaggagctgagcatccaggtggaggaggagagaagagccagagagtggctgctggacgcccccgagctgcccgagggccacctggaggactggctggagaagagagccaagagactgagcagcgcccccagcagcagagccgagcccatcagaaccaccgtgttccagtaccccgtgggctggccccccgtgcaggagctgccccccagcctgagagcccccccccccggcggctggcccctgcagcccagagtgcagtggggctag

SEQ ID NO: 10287 - DNA, 1542 bp, synthetic construct
  source 1..1542: mol_type = other DNA; note = Synthetic coding sequence
atggccagcgtgctgagcagaagactgggcaagagaagcctgctgggcgccagagtgctgggccccagcgccagcgagggccccagcgccgccccccccagcgagcccctgctggagggcgccgccccccagcccttcaccaccagcgacgacaccccctgccaggagcagcccaaggaggtgctgaaggcccccagcaccagcggcctgcagcaggtggccttccagcccggccagaaggtgtacgtgtggtacggcggccaggagtgcaccggcctggtggagcagcacagctggatggagggccaggtgaccgtgtggctgctggagcagaagctgcaggtgtgctgcagagtggaggaggtgtggctggccgagctgcagggcccctgcccccaggccccccccctggagcccggcgcccaggccctggcctacagacccgtgagcagaaacatcgacgtgcccaagagaaagagcgacgccgtggagatggacgagatgatggccgccatggtgctgaccagcctgagctgcagccccgtggtgcagagcccccccggcaccgaggccaacttcagcgccagcagagccgcctgcgacccctggaaggagagcggcgacatcagcgacagcggcagcagcaccaccagcggccactggagcggcagcagcggcgtgagcacccccagccccccccacccccaggccagccccaagtacctgggcgacgccttcggcagcccccagaccgaccacggcttcgagaccgaccccgaccccttcctgctggacgagcccgcccccagaaagagaaagaacagcgtgaaggtgatgtacaagtgcctgtggcccaactgcggcaaggtgctgagaagcatcgtgggcatcaagagacacgtgaaggccctgcacctgggcgacaccgtggacagcgaccagttcaagagagaggaggacttctactacaccgaggtgcagctgaaggaggagagcgccgccgccgccgccgccgccgccgccggcacccccgtgcccggcacccccaccagcgagcccgcccccacccccagcatgaccggcctgcccctgagcgccctgcccccccccctgcacaaggcccagagcagcggccccgagcaccccggccccgagagcagcctgcccagcggcgccctgagcaagagcgcccccggcagcttctggcacatccaggccgaccacgcctaccaggccctgcccagcttccagatccccgtgagcccccacatctacaccagcgtgagctgggccgccgcccccagcgccgcctgcagcctgagccccgtgagaagcagaagcctgagcttcagcgagccccagcagcccgcccccgccatgaagagccacctgatcgtgaccagcccccccagagcccagagcggcgccagaaaggccagaggcgaggccaagaagtgcagaaaggtgtacggcatcgagcacagagaccagtggtgcaccgcctgcagatggaagaaggcctgccagagattcctggactag

SEQ ID NO: 10288 - DNA, 555 bp, synthetic construct
  source 1..555: mol_type = other DNA; note = Synthetic coding sequence
atgggcaacggcatgaacaagatcctgcccggcctgtacatcggcaacttcaaggacgccagagacgccgagcagctgagcaagaacaaggtgacccacatcctgagcgtgcacgacagcgccagacccatgctggagggcgtgaagtacctgtgcatccccgccgccgacagccccagccagaacctgaccagacacttcaaggagagcatcaagttcatccacgagtgcagactgagaggcgagagctgcctggtgcactgcctggccggcgtgagcagaagcgtgaccctggtgatcgcctacatcatgaccgtgaccgacttcggctgggaggacgccctgcacaccgtgagagccggcagaagctgcgccaaccccaacgtgggcttccagagacagctgcaggagttcgagaagcacgaggtgcaccagtacagacagtggctgaaggaggagtacggcgagagccccctgcaggacgccgaggaggccaagaacatcctggccgcccccggcatcctgaagttctgggccttcctgagaagactgtag

SEQ ID NO: 10289 - DNA, 642 bp, synthetic construct
  source 1..642: mol_type = other DNA; note = Synthetic coding sequence
atgctgcagctgagagacagcgtggacagcgccggcaccagccccaccgccgtgctggccgccggcgaggaggtgggcgccggcggcggccccggcggcggcagacccggcgccggcacccccctgagacagaccctgtggcccctgagcatccacgaccccaccagaagagccagagtgaaggagtacttcgtgttcagacccggcagcatcgagcaggccgtggaggagatcagagtggtggtgagacccgtggaggacggcgagatccagggcgtgtggctgctgaccgagagagagggcttcggcatcagaatccagtgggacaagcagagcagacccagcttcatcaacagatggaacccctggagcaccaacgtgccctacgccaccttcaccgagcaccccatggccggcgccgacgagaagaccgccagcctgtgccagctggagagcttcaaggccctgctgatccaggccgtgaagaaggcccagaaggagagccccctgcccggccaggccaacggcgtgctgatcctggagagacccctgctgatcgagacctacgtgggcctgatgagcttcatcaacaacgaggccaagctgggctacagcatgaccagaggcaagatcggcttctag

SEQ ID NO: 10290 - DNA, 888 bp, synthetic construct; identical to SEQ ID NO: 10194
  source 1..888: mol_type = other DNA; note = Synthetic coding sequence

SEQ ID NO: 10291 - DNA, 3867 bp, synthetic construct
  source 1..3867: mol_type = other DNA; note = Synthetic coding sequence
atgcccagaaagggcacccagcccagcaccgccagaagaagagaggagggcccccccccccccagccccgacggcgccagcagcgacgccgagcccgagccccccagcggcagaaccgagagccccgccaccgccgccgagaccgccagcgaggagctggacaacagaagcctggaggagatcctgaacagcatcccccccccccccccccccgccatgaccaacgaggccggcgcccccagactgatgatcacccacatcgtgaaccagaacttcaagagctacgccggcgagaagatcctgggccccttccacaagagattcagctgcatcatcggccccaacggcagcggcaagagcaacgtgatcgacagcatgctgttcgtgttcggctacagagcccagaagatcagaagcaagaagctgagcgtgctgatccacaacagcgacgagcacaaggacatccagagctgcaccgtggaggtgcacttccagaagatcatcgacaaggagggcgacgactacgaggtgatccccaacagcaacttctacgtgagcagaaccgcctgcagagacaacaccagcgtgtaccacatcagcggcaagaagaagaccttcaaggacgtgggcaacctgctgagaagccacggcatcgacctggaccacaacagattcctgatcctgcagggcgaggtggagcagatcgccatgatgaagcccaagggccagaccgagcacgacgagggcatgctggagtacctggaggacatcatcggctgcggcagactgaacgagcccatcaaggtgctgtgcagaagagtggagatcctgaacgagcacagaggcgagaagctgaacagagtgaagatggtggagaaggagaaggacgccctggagggcgagaagaacatcgccatcgagttcctgaccctggagaacgagatcttcagaaagaagaaccacgtgtgccagtactacatctacgagctgcagaagagaatcgccgagatggagacccagaaggagaagatccacgaggacaccaaggagatcaacgagaagagcaacatcctgagcaacgagatgaaggccaagaacaaggacgtgaaggacaccgagaagaagctgaacaagatcaccaagttcatcgaggagaacaaggagaagttcacccagctggacctggaggacgtgcaggtgagagagaagctgaagcacgccaccagcaaggccaagaagctggagaagcagctgcagaaggacaaggagaaggtggaggagttcaagagcatccccgccaagagcaacaacatcatcaacgagaccaccaccagaaacaacgccctggagaaggagaaggagaaggaggagaagaagctgaaggaggtgatggacagcctgaagcaggagacccagggcctgcagaaggagaaggagagcagagagaaggagctgatgggcttcagcaagagcgtgaacgaggccagaagcaagatggacgtggcccagagcgagctggacatctacctgagcagacacaacaccgccgtgagccagctgaccaaggccaaggaggccctgatcgccgccagcgagaccctgaaggagagaaaggccgccatcagagacatcgagggcaagctgccccagaccgagcaggagctgaaggagaaggagaaggagctgcagaagctgacccaggaggagaccaacttcaagagcctggtgcacgacctgttccagaaggtggaggaggccaagagcagcctggccatgaacagaagcagaggcaaggtgctggacgccatcatccaggagaagaagagcggcagaatccccggcatctacggcagactgggcgacctgggcgccatcgacgagaagtacgacgtggccatcagcagctgctgccacgccctggactacatcgtggtggacagcatcgacatcgcccaggagtgcgtgaacttcctgaagagacagaacatcggcgtggccaccttcatcggcctggacaagatggccgtgtgggccaagaagatgaccgagatccagacccccgagaacacccccagactgttcgacctggtgaaggtgaaggacgagaagatcagacaggccttctacttcgccctgagagacaccctggtggccgacaacctggaccaggccaccagagtggcctaccagaaggacagaagatggagagtggtgaccctgcagggccagatcatcgagcagagcggcaccatgaccggcggcggcagcaaggtgatgaagggcagaatgggcagcagcctggtgatcgagatcagcgaggaggaggtgaacaagatggagagccagctgcagaacgacagcaagaaggccatgcagatccaggagcagaaggtgcagctggaggagagagtggtgaagctgagacacagcgagagagagatgagaaacaccctggagaagttcaccgccagcatccagagactgatcgagcaggaggagtacctgaacgtgcaggtgaaggagctggaggccaacgtgctggccaccgcccccgacaagaagaagcagaagctgctggaggagaacgtgagcgccttcaagaccgagtacgacgccgtggccgagaaggccggcaaggtggaggccgaggtgaagagactgcacaacaccatcgtggagatcaacaaccacaagctgaaggcccagcaggacaagctggacaagatcaacaagcagctggacgagtgcgccagcgccatcaccaaggcccaggtggccatcaagaccgccgacagaaacctgcagaaggcccaggacagcgtgctgagaaccgagaaggagatcaaggacaccgagaaggaggtggacgacctgaccgccgagctgaagagcctggaggacaaggccgccgaggtggtgaagaacaccaacgccgccgaggagagcctgcccgagatccagaaggagcacagaaacctgctgcaggagctgaaggtgatccaggagaacgagcacgccctgcagaaggacgccctgagcatcaagctgaagctggagcagatcgacggccacatcgccgagcacaacagcaagatcaagtactggcacaaggagatcagcaagatcagcctgcaccccatcgaggacaaccccatcgaggagatcagcgtgctgagccccgaggacctggaggccatcaagaaccccgacagcatcaccaaccagatcgccctgctggaggccagatgccacgagatgaagcccaacctgggcgccatcgccgagtacaagaagaaggaggagctgtacctgcagagagtggccgagctggacaagatcacctacgagagagacagcttcagacaggcctacgaggacctgagaaagcagagactgaacgagttcatggccggcttctacatcatcaccaacaagctgaaggagaactaccagatgctgaccctgggcggcgacgccgagctggagctggtggacagcctggaccccttcagcgagggcatcatgttcagcgtgagaccccccaagaagagctggaagaagatcttcaacctgagcggcggcgagaagaccctgagcagcctggccctggtgttcgccctgcaccactacaagcccacccccctgtacttcatggacgagatcgacgccgccctggacttcaagaacgtgagcatcgtggccttctacatctacgagcagaccaagaacgcccagttcatcatcatcagcctgagaaacaacatgttcgagatcagcgacagactgatcggcatctacaagacctacaacatcaccaagagcgtggccgtgaaccccaaggagatcgccagcaagggcctgtgctag

SEQ ID NO: 10292 - DNA, 2856 bp, synthetic construct
  source 1..2856: mol_type = other DNA; note = Synthetic coding sequence
atgctgggcagcatggccagaaagaagcccagaaacaccagcagactgcccctggccctgaaccccctgaagagcaaggacgtgctggccgtgctggccgagagaaacgaggccatcgtgcccgtgggcgcctgggtggagcccgccagccccggcagcagcgagatccccgcctacaccagcgcctacctgatcgaggaggagctgaaggagcagctgagaaagaagcaggaggccctgaagcacttccagaagcaggtgaagtacagagtgaaccagcagatcagactgagaaagaagcagcagctgcagaagagctacgagagagcccagaaggagggcagcatcgccatgcagagcagcgccacccacctgaccagcaagagaaccagcgtgttccccaacaacctgaacgtggccatcggcagcagcagactgccccccagcctgatgcccggcgacggcatcgaggacgaggagaaccagaacgagctgttccagcagcaggcccaggccctgagcgagaccatgaagcaggccagacacagactggccagcttcaagaccgtgatcaagaagaagggcagcgtgttccccgacgacggcagaaagagcttcctgaccagagaggaggtgctgagcagaaagcccgccagcaccggcatcaacaccggcatcagaggcgagctgcccatcaaggtgcaccagggcctgctggccgccgtgccctaccagaactacatggagaaccaggagctggactacgaggagcccgactacgaggagagcagcagcctggtgaccgacgagaagggcaaggaggacctgttcggcagaggccagcaggaccagcaggccatccacagcgaggacaagaacaagcccttcagcagagtgcagaaggtgaagttcaagaaccccctgttcgtgctgatggaggaggaggagcagaagcagctgcacttcgagggcctgcaggacatcctgcccgaggcccaggactacttcctggaggcccagggcgacctgctggagacccagggcgacctgaccggcatccagagcgtgaagcccgacacccaggccgtggagatgaaggtgcaggtgaccgagcccgagggccaggccatcgagcccgagggccagcccatcaagaccgagacccagggcatcatgctgaaggcccagagcatcgagctggaggagggcagcatcgtgctgaagacccaggacttcctgcccaccaaccaggccctgctgaccaagaaccaggacgtgctgctgaaggaccactgcgtgctgcccaaggaccagagcatcctgctgaagtaccaggaccaggacttcctgcccagagaccagcacgtgctgcacaaggaccaggacatcctgcccaagtaccaggaccagaacttcctgcccaaggaccagaacttcctgagcagagaccagcacgtgctgcccaaggaccaggacatcctgcccaagtaccaggaccagaacttcctgcccaaggaccagaacttcctgagcagagaccagcacgtgctgcccaaggaccagaacatcctgcccaagtaccagggccaggacttcctgcccaaggaccaggacttcctgagcagagaccagcacgtgctgcccaaggactggaacatcctgcccaagtgccaggaccaggacttcctgcccagagaccagggcgtgctgcccaaggaccagaacatcctgcccatctgccaggaccaggacttcctgcccagagaccagggctacctgcccaaggaccagaacatcctgcccatctgccaggacagagacttcctgcccagagacctgcacgtgctgagcaacgaccagaacatcctgcccaagtgccaggaccaggacttcctgcccaagtaccagaaggtgcacttcaaggagccctacagcgacatgaccgacgagaagggcagagaggacttcagcctggccgactaccagtgcctgccccccaagagccaggaccaggacgacatcaagaaccagcagcccgccagcttcatgagagaggagagagtgagagaggagctgcccctggactaccaccagtacgtggtgcccaagatccaggaccaggacagccccagagagcagaacaagcacatcaagctgcccagcagcttcgagaagtgggagatcgccagaggcaacacccccggcgtgcccctggcctacgacagataccagagcggcctgagcaccgagttccaggcccccctggccttccagagcgacgtggacaaggaggaggacaagaaggagagacagaagcagtacctgagacacagaagactgttcatggacatcgagagagagcaggtgaaggagcagcagagacagaaggagcagaagaagaagatcgagaagatcaagaagaagagagagcaggagtgctacgccgccgagcagagaatcctgagaatgaacttccacgaggacccctacagcggcgagaagctgagcgagatcctggcccagctgcagctgcaggagatcaagggcaccagagagaagcagcagagagagaaggagtacctgagatacgtggaggccctgagagcccagatccaggagaagatgcagctgtacaacatcaccctgccccccctgtgctgctgcggccccgacttctgggacgcccaccccgacacctgcgccaacaactgcatcttctacaagaaccacagagcctacaccagagccctgcacagcttcatcaacagctgcgacgtgcccggcggcaacagcaccctgagagtggccatccacaacttcgccagcgcccacagaagaaccctgaagaacctgtag

SEQ ID NO: 10293 - DNA, 1248 bp, synthetic construct
  source 1..1248: mol_type = other DNA; note = Synthetic coding sequence
atgagccccgaggtggccctgaacagaatcagccccatgctgagccccttcatcagcagcgtggtgagaaacggcaaggtgggcctggacgccaccaactgcctgagaatcaccgacctgaagagcggctgcaccagcctgacccccggccccaactgcgacagattcaagctgcacatcccctacgccggcgagaccctgaagtgggacatcatcttcaacgcccagtaccccgagctgccccccgacttcatcttcggcgaggacgccgagttcctgcccgaccccagcgccctgcagaacctggccagctggaaccccagcaaccccgagtgcctgctgctggtggtgaaggagctggtgcagcagtaccaccagttccagtgcagcagactgagagagagcagcagactgatgttcgagtaccagaccctgctggaggagccccagtacggcgagaacatggagatctacgccggcaagaagaacaactggaccggcgagttcagcgccagattcctgctgaagctgcccgtggacttcagcaacatccccacctacctgctgaaggacgtgaacgaggaccccggcgaggacgtggccctgctgagcgtgagcttcgaggacaccgaggccacccaggtgtaccccaagctgtacctgagccccagaatcgagcacgccctgggcggcagcagcgccctgcacatccccgccttccccggcggcggctgcctgatcgactacgtgccccaggtgtgccacctgctgaccaacaaggtgcagtacgtgatccagggctaccacaagagaagagagtacatcgccgccttcctgagccacttcggcaccggcgtggtggagtacgacgccgagggcttcaccaagctgaccctgctgctgatgtggaaggacttctgcttcctggtgcacatcgacctgcccctgttcttccccagagaccagcccaccctgaccttccagagcgtgtaccacttcaccaacagcggccagctgtacagccaggcccagaagaactacccctacagccccagatgggacggcaacgagatggccaagagagccaagggctgccagggcagcagagacgcctgcagcccctgggagcaggtgctggccttcgccgtggccaagaccggctgcaagctgctgcagccccagagaaactggcccagcagcagaggccccccctggagagccagcgagggcgagagaaccgcccagtag

SEQ ID NO: 10294 - DNA, 903 bp, synthetic construct
  source 1..903: mol_type = other DNA; note = Synthetic coding sequence
atgctgagcgccgtggccagaggctaccagggctggttccacccctgcgccagactgagcgtgagaatgagcagcaccggcatcgacagaaagggcgtgctggccaacagagtggccgtggtgaccggcagcaccagcggcatcggcttcgccatcgccagaagactggccagagacggcgcccacgtggtgatcagcagcagaaagcagcagaacgtggacagagccatggccaagctgcagggcgagggcctgagcgtggccggcatcgtgtgccacgtgggcaaggccgaggacagagagcagctggtggccaaggccctggagcactgcggcggcgtggacttcctggtgtgcagcgccggcgtgaaccccctggtgggcagcaccctgggcaccagcgagcagatctgggacaagatcctgagcgtgaacgtgaagagccccgccctgctgctgagccagctgctgccctacatggagaacagaagaggcgccgtgatcctggtgagcagcatcgccgcctacaaccccgtggtggccctgggcgtgtacaacgtgagcaagaccgccctgctgggcctgaccagaaccctggccctggagctggcccccaaggacatcagagtgaactgcgtggtgcccggcatcatcaagaccgacttcagcaaggtggtgagaatcggcttcatgggcatgagcctgagcggcagaaccagcagaaacatcatcagctgcagaggcctgggcagccagagaaccgtgcaggagagctgccccagctgcgccctgcagatgcccgccaccagcaccggcagaaccctgagatggcaggccacccccctgggcagcgagagaagcggcggcggctgcgtggccgtggtgcccggccccggcgcctag

SEQ ID NO: 10295 - DNA, 1014 bp, synthetic construct
  source 1..1014: mol_type = other DNA; note = Synthetic coding sequence
atgagattcgacaccctgtgggagaacaagctgatgcagagcagagccgtggacggcttccacagcgaggagcagcagctgctgctgcaggtgcagcagcagcaccagccccagcagcagcagcaccaccaccaccaccaccaccagcaggcccagccccagcagaccgtgccccagcaggcccagacccagcaggtgctgatccccgccagccagcaggccaccgccccccaggtgatcgtgcccgacagcaagctgatccagcacatgaacgccagcaacatgagcgccgccgccaccgccgccaccctggccctgcccgccggcgtgacccccgtgcagcagatcctgaccaacagcggccagctgctgcaggtggtgagagccgccaacggcgcccagtacatcttccagccccagcagagcgtggtgctgcagcagcaggtgatcccccagatgcagcccggcggcgtgcaggcccccgtgatccagcaggtgctggcccccctgcccggcggcatcagcccccagaccggcgtgatcatccagccccagcagatcctgttcaccggcaacaagacccaggtgatccccaccaccgtggccgcccccacccccgcccaggcccagatcaccgccaccggccagcagcagccccaggcccagcccgcccagacccaggcccccctggtgctgcaggtggacggcaccggcgacaccagcagcgaggaggacgaggacgaggaggaggactacgacgacgacgaggaggaggacaaggagaaggacggcgccgaggacggccaggtggaggaggagcccctgaacagcgaggacgacgtgagcgacgaggagggccaggagctgttcgacaccgagaacgtggtggtgtgccagtacgacaagatccacagaagcaagaacaagtggaagttccacctgaaggacggcatcatgaacctgaacggcagagactacatcttcagcaaggccatcggcgacgccgagtggtag

SEQ ID NO: 10296 - DNA, 282 bp, synthetic construct
  source 1..282: mol_type = other DNA; note = Synthetic coding sequence
atggcccagagcggcggcgaggccagacccggccccaagaccgccgtgcagatcagagtggccatccaggaggccgaggacgtggacgagctggaggacgaggaggagggcgccgagaccagaggcgccggcgaccccgccagatacctgagccccggctggggcagcgccagcgaggaggagcccagcagaggccacagaaacagaagcagcgtgaacagcagaaccatgctggccagcttcatcgtgagcagcgcccccagcaccgcccccagcacctag

SEQ ID NO: 10297 - DNA, 255 bp, synthetic construct
  source 1..255: mol_type = other DNA; note = Synthetic coding sequence
atgaaggtgaagatcaagtgctggaacggcgtggccacctggctgtgggtggccaacgacgagaactgcggcatctgcagaatggccttcaacggctgctgccccgactgcaaggtgcccggcgacgactgccccctggtgtggggccagtgcagccactgcttccacatgcactgcatcctgaagtggctgcacgcccagcaggtgcagcagcactgccccatgtgcagacaggagtggaagttcaaggagtag

SEQ ID NO: 10298 - DNA, 612 bp, synthetic construct; identical to SEQ ID NO: 9820
  source 1..612: mol_type = other DNA; note = Synthetic coding sequence

SEQ ID NO: 10299 - DNA, 1794 bp, synthetic construct
  source 1..1794: mol_type = other DNA; note = Synthetic coding sequence
atgcccagcccccagctgctggtgctgttcggcagccagaccggcaccgcccaggacgtgagcgagagactgggcagagaggccagaagaagaagactgggctgcagagtgcaggccctggacagctaccccgtggtgaacctgatcaacgagcccctggtgatcttcgtgtgcgccaccaccggccagggcgacccccccgacaacatgaagaacttctggagattcatcttcagaaagaacctgcccagcaccgccctgtgccagatggacttcgccgtgctgggcctgggcgacagcagctacgccaagttcaacttcgtggccaagaagctgcacagaagactgctgcagctgggcggcagcgccctgctgcccgtgtgcctgggcgacgaccagcacgagctgggccccgacgccgccgtggacccctggctgagagacctgtgggacagagtgctgggcctgtacccccccccccccggcctgaccgagatcccccccggcgtgcccctgcccagcaagttcaccctgctgttcctgcaggaggcccccagcaccggcagcgagggccagagagtggcccaccccggcagccaggagccccccagcgagagcaagcccttcctggcccccatgatcagcaaccagagagtgaccggccccagccacttccaggacgtgagactgatcgagttcgacatcctgggcagcggcatcagcttcgccgccggcgacgtggtgctgatccagcccagcaacagcgccgcccacgtgcagagattctgccaggtgctgggcctggaccccgaccagctgttcatgctgcagcccagagagcccgacgtgagcagccccaccagactgccccagccctgcagcatgagacacctggtgagccactacctggacatcgccagcgtgcccagaagaagcttcttcgagctgctggcctgcctgagcctgcacgagctggagagagagaagctgctggagttcagcagcgcccagggccaggaggagctgttcgagtactgcaacagacccagaagaaccatcctggaggtgctgtgcgacttcccccacaccgccgccgccatcccccccgactacctgctggacctgatccccgtgatcagacccagagccttcagcatcgccagcagcctgctgacccaccccagcagactgcagatcctggtggccgtggtgcagttccagaccagactgaaggagcccagaagaggcctgtgcagcagctggctggccagcctggaccccggccagggccccgtgagagtgcccctgtgggtgagacccggcagcctggccttccccgagacccccgacacccccgtgatcatggtgggccccggcaccggcgtggcccccttcagagccgccatccaggagagagtggcccagggccagaccggcaacttcctgttcttcggctgcagatggagagaccaggacttctactgggaggccgagtggcaggagctggagaagagagactgcctgaccctgatccccgccttcagcagagagcaggagcagaaggtgtacgtgcagcacagactgagagagctgggcagcctggtgtgggagctgctggacagacagggcgcctacttctacctggccggcaacgccaagagcatgcccgccgacgtgagcgaggccctgatgagcatcttccaggaggagggcggcctgtgcagccccgacgccgccgcctacctggccagactgcagcagaccagaagattccagaccgagacctgggcctag

SEQ ID NO: 10300 - DNA, 1860 bp, synthetic construct
  source 1..1860: mol_type = other DNA; note = Synthetic coding sequence
atggacgaccagcaggccctgaacagcatcatgcaggacctggccgtgctgcacaaggccagcagacccgccctgagcctgcaggagaccagaaaggccaagagcagcagccccaagaagcagaacgacgtgagagtgaagttcgagcacagaggcgagaagagaatcctgcagttccccagacccgtgaagctggaggacctgagaagcaaggccaagatcgccttcggccagagcatggacctgcactacaccaacaacgagctggtgatccccctgaccacccaggacgacctggacaaggccgtggagctgctggacagaagcatccacatgaagagcctgaagatcctgctggtgatcaacggcagcacccaggccaccaacctggagcccctgcccagcctggaggacctggacaacaccgtgttcggcgccgagagaaagaagagactgagcatcatcggccccaccagcagagacagaagcagccccccccccggctacatccccgacgagctgcaccaggtggccagaaacggcagcttcaccagcatcaacagcgagggcgagttcatccccgagagcatggaccagatgctggaccccctgagcctgagcagccccgagaacagcggcagcggcagctgccccagcctggacagccccctggacggcgagagctaccccaagagcagaatgcccagagcccagagctaccccgacaaccaccaggagttcagcgactacgacaaccccatcttcgagaagttcggcaagggcggcacctaccccagaagataccacgtgagctaccaccaccaggagtacaacgacggcagaaagaccttccccagagccagaagaacccagggcaccagcctgagaagccccgtgagcttcagccccaccgaccacagcctgagcaccagcagcggcagcagcatcttcacccccgagtacgacgacagcagaatcagaagaagaggcagcgacatcgacaaccccaccctgaccgtgatggacatcagcccccccagcagaagccccagagcccccaccaactggagactgggcaagctgctgggccagggcgccttcggcagagtgtacctgtgctacgacgtggacaccggcagagagctggccgtgaagcaggtgcagttcgaccccgacagccccgagaccagcaaggaggtgaacgccctggagtgcgagatccagctgctgaagaacctgctgcacgagagaatcgtgcagtactacggctgcctgagagacccccaggagaagaccctgagcatcttcatggagtacatgcccggcggcagcatcaaggaccagctgaaggcctacggcgccctgaccgagaacgtgaccagaaagtacaccagacagatcctggagggcgtgcactacctgcacagcaacatgatcgtgcacagagacatcaagggcgccaacatcctgagagacagcaccggcaacgtgaagctgggcgacttcggcgccagcaagagactgcagaccatctgcctgagcggcaccggcatgaagagcgtgaccggcaccccctactggatgagccccgaggtgatcagcggcgagggctacggcagaaaggccgacatctggagcgtggcctgcaccgtggtggagatgctgaccgagaagcccccctgggccgagttcgaggccatggccgccatcttcaagatcgccacccagcccaccaaccccaagctgcccccccacgtgagcgactacaccagagacttcctgaagagaatcttcgtggaggccaagctgagacccagcgccgacgagctgctgagacacatgttcgtgcactaccactag

SEQ ID NO: 10301 - DNA, 828 bp, synthetic construct
  source 1..828: mol_type = other DNA; note = Synthetic coding sequence
atgagcaccatcggcagcttcgagggcttccaggccgtgagcctgaagcaggagggcgacgaccagcccagcgagaccgaccacctgagcatggaggaggaggaccccatgcccagacagatcagcagacagagcagcgtgaccgagagcaccctgtaccccaacccctaccaccagccctacatcagcagaaagtacttcgccaccagacccggcgccatcgagaccgccatggaggacctgaagggccacgtggccgagaccagcggcgagaccatccagggcttctggctgctgaccaagatcgaccactggaacaacgagaaggagagaatcctgctggtgaccgacaagaccctgctgatctgcaagtacgacttcatcatgctgagctgcgtgcagctgcagagaatccccctgagcgccgtgtacagaatctgcctgggcaagttcaccttccccggcatgagcctggacaagagacagggcgagggcctgagaatctactggggcagccccgaggagcagagcctgctgagcagatggaacccctggagcaccgaggtgccctacgccaccttcaccgagcaccccatgaagtacaccagcgagaagttcctggagatctgcaagctgagcggcttcatgagcaagctggtgcccgccatccagaacgcccacaagaacagcaccggcagcggcagaggcaagaagctgatggtgctgaccgagcccatcctgatcgagacctacaccggcctgatgagcttcatcggcaacagaaacaagctgggctacagcctggccagaggcagcatcggcttctag

SEQ ID NO: 10302 - DNA, 1629 bp, synthetic construct
  source 1..1629: mol_type = other DNA; note = Synthetic coding sequence
atggccgccgccgccggcgccgccgccgcccccggcagcagagagccccaggacagacccgagtgcggcgccggccaccccggccccagatactacagacaccccgagagatggctgctgagacccgaggccttcctgggccccctgagaaccagagcccccagcgccgaggacagccagagagagagacccgccgccagaagcggccccgccatgagcagaagagtggtgagacagagcaagttcagacacgtgttcggccaggccgccaaggccgaccaggcctacgaggacatcagagtgagcaaggtgacctgggacagcagcttctgcgccgtgaaccccaagttcctggccatcatcgtggaggccggcggcggcggcgccttcatcgtgctgcccctggccaagaccggcagagtggacaagaactaccccctggtgaccggccacaccgcccccgtgctggacatcgactggtgcccccacaacgacaacgtgatcgccagcgccagcgacgacaccaccatcatggtgtggcagatccccgactacacccccatgagaaacatcaccgagcccatcatcaccctggagggccacagcaagagagtgggcatcctgagctggcaccccaccgccagaaacgtgctgctgagcgccggcggcgacaacgtgatcatcatctggaacgtgggcaccggcgaggtgctgctgagcctggacgacatgcaccccgacgtgatccacagcgtgtgctggaacagcaacggcagcctgctggccaccacctgcaaggacaagaccctgagaatcatcgaccccagaaagggccaggtggtggccgagagattcgccgcccacgagggcatgagacccatgagagccgtgttcaccagacagggccacatcttcaccaccggcttcaccagaatgagccagagagagctgggcctgtgggaccccaacaacttcgaggagcccgtggccctgcaggagatggacaccagcaacggcgtgctgctgcccttctacgaccccgacagcagcatcgtgtacctgtgcggcaagggcgacagcagcatcagatacttcgagatcaccgacgagccccccttcgtgcactacctgaacaccttcagcagcaaggagccccagagaggcatgggcttcatgcccaagagaggcctggacgtgagcaagtgcgagatcgccagattctacaagctgcacgagagaaagtgcgagcccatcatcatgaccgtgcccagaaagagcgacctgttccaggacgacctgtaccccgacacccccggccccgagcccgccctggaggccgacgagtggctgagcggccaggacgccgagcccgtgctgatcagcctgagagacggctacgtgccccccaagcacagagagctgagagtgaccaagagaaacatcctggacgtgagaccccccagcggccccagaagaagccagagcgccagcgacgcccccctgagccagcacaccctggagaccctgctggaggagatcaaggccctgagagagagagtgcaggcccaggagcagagaatcaccgccctggagaacatgctgtgcgagctggtggacggcaccgactag

SEQ ID NO: 10303 - DNA, 2550 bp, synthetic construct
  source 1..2550: mol_type = other DNA; note = Synthetic coding sequence
atgagcgacaccagaagaagagtgaaggtgtacaccctgaacgaggacagacagtgggacgacagaggcaccggccacgtgagcagcacctacgtggaggagctgaagggcatgagcctgctggtgagagccgagagcgacggcagcctgctgctggagagcaagatcaaccccaacaccgcctaccagaagcagcaggacaccctgatcgtgtggagcgaggccgagaactacgacctggccctgagcttccaggagaaggccggctgcgacgagatctgggagaagatctgccaggtgcagggcaaggaccccagcgtggaggtgacccaggacctgatcgacgagagcgaggaggagagattcgaggagatgcccgagaccagccacctgatcgacctgcccacctgcgagctgaacaagctggaggagatcgccgacctggtgaccagcgtgctgagcagccccatcagaagagagaagctggccctggccctggagaacgagggctacatcaagaagctgctgcagctgttccaggcctgcgagaacctggagaacaccgagggcctgcaccacctgtacgagatcatcagaggcatcctgttcctgaacaaggccaccctgttcgaggtgatgttcagcgacgagtgcatcatggacgtggtgggctgcctggagtacgaccccgccctggcccagcccaagagacacagagagttcctgaccaagaccgccaagttcaaggaggtgatccccatcaccgacagcgagctgagacagaagatccaccagacctacagagtgcagtacatccaggacatcatcctgcccacccccagcgtgttcgaggagaacttcctgagcaccctgaccagcttcatcttcttcaacaaggtggagatcgtgagcatgctgcaggaggacgagaagttcctgagcgaggtgttcgcccagctgaccgacgaggccaccgacgacgacaagagaagagagctggtgaacttcttcaaggagttctgcgccttcagccagaccctgcagccccagaacagagacgccttcttcaagaccctggccaagctgggcatcctgcccgccctggagatcgtgatgggcatggacgacctgcaggtgagaagcgccgccaccgacatcttcagctacctggtggagttcagccccagcatggtgagagagttcgtgatgcaggaggcccagcagagcgacgacgacatcctgctgatcaacgtggtgatcgagcagatgatctgcgacaccgaccccgagctgggcggcgccgtgcagctgatgggcctgctgagaaccctgatcgaccccgagaacatgctggccaccaccaacaagaccgagaagagcgagttcctgaacttcttctacaaccactgcatgcacgtgctgaccgcccccctgctgaccaacaccagcgaggacaagtgcgagaaggacttcttcctgaagcactacagatacagctggagcttcatctgcacccccagccacagccacagccacagcacccccagcagcagcatcagccaggacaacatcgtgggcagcaacaagaacaacaccatctgccccgacaactaccagaccgcccagctgctggccctgatcctggagctgctgaccttctgcgtggagcaccacacctaccacatcaagaactacatcatgaacaaggacctgctgagaagagtgctggtgctgatgaacagcaagcacaccttcctggccctgtgcgccctgagattcatgagaagaatcatcggcctgaaggacgagttctacaacagatacatcaccaagggcaacctgttcgagcccgtgatcaacgccctgctggacaacggcaccagatacaacctgctgaacagcgccgtgatcgagctgttcgagttcatcagagtggaggacatcaagagcctgaccgcccacatcgtggagaacttctacaaggccctggagagcatcgagtacgtgcagaccttcaagggcctgaagaccaagtacgagcaggagaaggacagacagaaccagaagctgaacagcgtgcccagcatcctgagaagcaacagattcagaagagacgccaaggccctggaggaggacgaggagatgtggttcaacgaggacgaggaggaggagggcaaggccgtggtggcccccgtggagaagcccaagcccgaggacgacttccccgacaactacgagaagttcatggagaccaagaaggccaaggagagcgaggacaaggagaacctgcccaagagaaccagccccggcggcttcaagttcaccttcagccacagcgccagcgccgccaacggcaccaacagcaagagcgtggtggcccagatcccccccgccaccagcaacggcagcagcagcaagaccaccaacctgcccaccagcgtgaccgccaccaagggcagcctggtgggcctggtggactaccccgacgacgaggaggaggacgaggaggaggagagcagccccagaaagagacccagactgggcagctag

SEQ ID NO: 10304 - DNA, 669 bp, synthetic construct
  source 1..669: mol_type = other DNA; note = Synthetic coding sequence
atgggcgacatccccgccgtgggcctgagcagctggaaggccagccccggcaaggtgaccgaggccgtgaaggaggccatcgacgccggctacagacacttcgactgcgcctacttctaccacaacgagagagaggtgggcgccggcatcagatgcaagatcaaggagggcgccgtgagaagagaggacctgttcatcgccaccaagctgtggtgcacctgccacaagaagagcctggtggagaccgcctgcagaaagagcctgaaggccctgaagctgaactacctggacctgtacctgatccactggcccatgggcttcaagcccccccaccccgagtggatcatgagctgcagcgagctgagcttctgcctgagccaccccagagtgcaggacctgcccctggacgagagcaacatggtgatccccagcgacaccgacttcctggacacctgggagatcctgatcagattccagatccagagaaacgtgatcgtgatccccggcagcatcacccccagccacatcaaggagaacatccaggtgttcgacttcgagctgacccagcacgacatggacaacatcctgagcctgaacagaaacctgagactggccatgttccccatcaccaagaaccacaaggactaccccttccacatcgagtactag

SEQ ID NO: 10305 - DNA, 1080 bp, synthetic construct
  source 1..1080: mol_type = other DNA; note = Synthetic coding sequence
atgcccaaccccagcagcaccagcagcccctaccccctgcccgaggagatcagaaacctgctggccgacgtggagaccttcgtggccgacatcctgaagggcgagaacctgagcaagaaggccaaggagaagagagagagcctgatcaagaagatcaaggacgtgaagagcatctacctgcaggagttccaggacaagggcgacgccgaggacggcgaggagtacgacgaccccttcgccggcccccccgacaccatcagcctggccagcgagagatacgacaaggacgacgaggcccccagcgacggcgcccagttcccccccatcgccgcccaggacctgcccttcgtgctgaaggccggctacctggagaagagaagaaaggaccacagcttcctgggcttcgagtggcagaagagatggtgcgccctgagcaagaccgtgttctactactacggcagcgacaaggacaagcagcagaagggcgagttcgccatcgacggctacagcgtgagaatgaacaacaccctgagaaaggacggcaagaaggactgctgcttcgagatcagcgcccccgacaagagaatctaccagttcaccgccgccagccccaaggacgccgaggagtgggtgcagcagctgaagttcgtgctgcaggacatggagagcgacatcatccccgaggactacgacgagagaggcgagctgtacgacgacgtggaccaccccctgcccatcagcaaccccctgaccagcagccagcccatcgacgacgagatctacgaggagctgcccgaggaggaggaggacagcgcccccgtgaaggtggaggagcagagaaagatgagccaggacagcgtgcaccacaccagcggcgacaagagcaccgactacgccaacttctaccagggcctgtgggactgcaccggcgccttcagcgacgagctgagcttcaagagaggcgacgtgatctacatcctgagcaaggagtacaacagatacggctggtgggtgggcgagatgaagggcgccatcggcctggtgcccaaggcctacatcatggagatgtacgacatctag

SEQ ID NO: 10306 - DNA, 1227 bp, synthetic construct
  source 1..1227: mol_type = other DNA; note = Synthetic coding sequence
atgaagtgcgagcactgcaccagaaaggagtgcagcaagaagaccaagaccgacgaccaggagaacgtgagcgccgacgcccccagccccgcccaggagaacggcgagaagtgcgacaccagcaagcacaaggtgctggtggtgagcgtgtgcccccagagcctgccctacttcgccgccaagttcaacctgagcgtgaccgacgccagcagaagactgtgcggcttcctgaagagcctgggcgtgcactacgtgttcgacaccaccatcgccgccgacttcagcatcctggagagccagaaggagttcgtgagaagatacagacagcacagcgaggaggagagaaccctgcccatgctgaccagcgcctgccccggctgggtgagatacgccgagagagtgctgggcagacccatcaccgcccacctgtgcaccgccaagagcccccagcaggtgatgggcagcctggtgaaggactacttcgccagacagcagaacctgagccccgagaagatcttccacgtgatcgtggccccctgctacgacaagaagctggaggccctgcaggagagcctgccccccgccctgcacggcagcagaggcgccgactgcgtgctgaccagcggcgagatcgcccagatcatggagcagggcgacctgagcgtgagagacgccgccgtggacaccctgttcggcgacctgaaggaggacaaggtgaccagacacgacggcgccagcagcgacggccacctggcccacatcttcagacacgccgccaaggagctgttcaacgaggacgtggaggaggtgacctacagagccctgagaaacaaggacttccaggaggtgaccctggagaagaacggcgaggtggtgctgagattcgccgccgcctacggcttcagaaacatccagaacatgatcctgaagctgaagaagggcaagttccccttccacttcgtggaggtgctggcctgcgccggcggctgcctgaacggcagaggccaggcccagacccccgacggccacgccgacaaggccctgctgagacagatggagggcatctacgccgacatccccgtgagaagacccgagagcagcgcccacgtgcaggagctgtaccaggagtggctggagggcatcaacagccccaaggccagagaggtgctgcacaccacctaccagagccaggagagaggcacccacagcctggacatcaagtggtag

SEQ ID NO: 10307 - DNA, 1104 bp, synthetic construct
  source 1..1104: mol_type = other DNA; note = Synthetic coding sequence
atggccctgaacgtggcccccgtgagagacaccaagtggctgaccctggaggtgtgcagacagttccagagaggcacctgcagcagaagcgacgaggagtgcaagttcgcccacccccccaagagctgccaggtggagaacggcagagtgatcgcctgcttcgacagcctgaagggcagatgcagcagagagaactgcaagtacctgcacccccccacccacctgaagacccagctggagatcaacggcagaaacaacctgatccagcagaagaccgccgccgccatgctggcccagcagatgcagttcatgttccccggcacccccctgcaccccgtgcccaccttccccgtgggccccgccatcggcaccaacaccgccatcagcttcgccccctacctggcccccgtgacccccggcgtgggcctggtgcccaccgagatcctgcccaccacccccgtgatcgtgcccggcagcccccccgtgaccgtgcccggcagcaccgccacccagaagctgctgagaaccgacaagctggaggtgtgcagagagttccagagaggcaactgcgccagaggcgagaccgactgcagattcgcccaccccgccgacagcaccatgatcgacaccagcgacaacaccgtgaccgtgtgcatggactacatcaagggcagatgcatgagagagaagtgcaagtacttccacccccccgcccacctgcaggccaagatcaaggccgcccagcaccaggccaaccaggccgccgtggccgcccaggccgccgccgccgccgccaccgtgatggccttcccccccggcgccctgcaccccctgcccaagagacaggccctggagaagagcaacggcaccagcgccgtgttcaaccccagcgtgctgcactaccagcaggccctgaccagcgcccagctgcagcagcacgccgccttcatccccaccggcagcgtgctgtgcatgacccccgccaccagcatcgtgcccatgatgcacagcgccaccagcgccaccgtgagcgccgccaccacccccgccaccagcgtgcccttcgccgccaccgccaccgccaaccagatcatcctgaagtag

SEQ ID NO: 10308 - DNA, 3909 bp, synthetic construct
  source 1..3909: mol_type = other DNA; note = Synthetic coding sequence
atggccctgagacccggcgccggcagcggcggcggcggcgccgccggcgccggcgccggcagcgccggcggcggcggcttcatgttccccgtggccggcggcatcagacccccccaggccggcctgatgcccatgcagcagcagggcttccccatggtgagcgtgatgcagcccaacatgcagggcatcatgggcatgaactacagcagccagatgagccagggccccatcgccatgcaggccggcatccccatgggccccatgcccgccgccggcatgccctacctgggccaggcccccttcctgggcatgagaccccccggcccccagtacacccccgacatgcagaagcagttcgccgaggagcagcagaagagattcgagcagcagcagaagctgctggaggaggagagaaagagaagacagttcgaggagcagaagcagaagctgagactgctgagcagcgtgaagcccaagaccggcgagaagagcagagacgacgccctggaggccatcaagggcaacctggacggcttcagcagagacgccaagatgcaccccacccccgccagccaccccaagaagcccggccccagcctggaggagaagttcctggtgagctgcgacatcagcaccagcggccaggagcagatcaagctgaacaccagcgaggtgggccacaaggccctgggccccggcagcagcaagaagtaccccagcctgatggccagcaacggcgtggccgtggacggctgcgtgagcggcaccaccaccgccgaggccgagaacaccagcgaccagaacctgagcatcgaggagagcggcgtgggcgtgttccccagccaggaccccgcccagcccagaatgcccccctggatctacaacgagagcctggtgcccgacgcctacaagaagatcctggagaccaccatgacccccaccggcatcgacaccgccaagctgtaccccatcctgatgagcagcggcctgcccagagagaccctgggccagatctgggccctggccaacagaaccacccccggcaagctgaccaaggaggagctgtacaccgtgctggccatgatcgccgtgacccagagaggcgtgcccgccatgagccccgacgccctgaaccagttccccgccgcccccatccccaccctgagcggcttcagcatgaccctgcccacccccgtgagccagcccaccgtgatccccagcggccccgccggcagcatgcccctgagcctgggccagcccgtgatgggcatcaacctggtgggccccgtgggcggcgccgccgcccaggccagcagcggcttcatccccacctaccccgccaaccaggtggtgaagcccgaggaggacgacttccaggacttccaggacgccagcaagagcggcagcctggacgacagcttcagcgacttccaggagctgcccgccagcagcaagaccagcaacagccagcacggcaacagcgcccccagcctgctgatgcccctgcccggcaccaaggccctgcccagcatggacaagtacgccgtgttcaagggcatcgccgccgacaagagcagcgagaacaccgtgccccccggcgaccccggcgacaagtacagcgccttcagagagctggagcagaccgccgagaacaagcccctgggcgagagcttcgccgagttcagaagcgccggcaccgacgacggcttcaccgacttcaagaccgccgacagcgtgagccccctggagccccccaccaaggacaagaccttcccccccagcttccccagcggcaccatccagcagaagcagcagacccaggtgaagaaccccctgaacctggccgacctggacatgttcagcagcgtgaactgcagcagcgagaagcccctgagcttcagcgccgtgttcagcaccagcaagagcgtgagcaccccccagagcaccggcagcgccgccaccatgaccgccctggccgccaccaagaccagcagcctggccgacgacttcggcgagttcagcctgttcggcgagtacagcggcctggcccccgtgggcgagcaggacgacttcgccgacttcatggccttcagcaacagcagcatcagcagcgagcagaagcccgacgacaagtacgacgccctgaaggaggaggccagccccgtgcccctgaccagcaacgtgggcagcaccgtgaagggcggccagaacagcaccgccgccagcaccaagtacgacgtgttcagacagctgagcctggagggcagcggcctgggcgtggaggacctgaaggacaacacccccagcggcaagagcgacgacgacttcgccgacttccacagcagcaagttcagcagcatcaacagcgacaagagcctgggcgagaaggccgtggccttcagacacaccaaggaggacagcgccagcgtgaagagcctggacctgcccagcatcggcggcagcagcgtgggcaaggaggacagcgaggacgccctgagcgtgcagttcgacatgaagctggccgacgtgggcggcgacctgaagcacgtgatgagcgacagcagcctggacctgcccaccgtgagcggccagcacccccccgccgccgacatcgaggacctgaagtacgccgccttcggcagctacagcagcaacttcgccgtgagcaccctgaccagctacgactggagcgacagagacgacgccacccagggcagaaagctgagccccttcgtgctgagcgccggcagcggcagccccagcgccaccagcatcctgcagaagaaggagaccagcttcggcagcagcgagaacatcaccatgaccagcctgagcaaggtgaccaccttcgtgagcgaggacgccctgcccgagaccaccttccccgccctggccagcttcaaggacaccatcccccagaccagcgagcagaaggagtacgagaacagagactacaaggacttcaccaagcaggacctgcccaccgccgagagaagccaggaggccacctgccccagccccgccagcagcggcgccagccaggagacccccaacgagtgcagcgacgacttcggcgagttccagagcgagaagcccaagatcagcaagttcgacttcctggtggccaccagccagagcaagatgaagagcagcgaggagatgatcaagagcgagctggccaccttcgacctgagcgtgcagggcagccacaagagaagcctgagcctgggcgacaaggagatcagcagaagcagccccagccccgccctggagcagcccttcagagacagaagcaacaccctgaacgagaagcccgccctgcccgtgatcagagacaagtacaaggacctgaccggcgaggtggaggagaacgagagatacgcctacgagtggcagagatgcctgggcagcgccctgaacgtgatcaagaaggccaacgacaccctgaacggcatcagcagcagcagcgtgtgcaccgaggtgatccagagcgcccagggcatggagtacctgctgggcgtggtggaggtgtacagagtgaccaagagagtggagctgggcatcaaggccaccgccgtgtgcagcgagaagctgcagcagctgctgaaggacatcgacaaggtgtggaacaacctgatcggcttcatgagcctggccaccctgacccccgacgagaacagcctggacttcagcagctgcatgctgagacccggcatcaagaacgcccaggagctggcctgcggcgtgtgcctgctgaacgtggacagcagaagcagagccttcaacagcgagaccgacagcttcaagctggcctacggcggccaccagtaccacgccagctgcgccaacttctggatcaactgcgtggagcccaagccccccggcctggtgctgcccgacctgctgtag

SEQ ID NO: 10309 - DNA, 1011 bp, synthetic construct
  source 1..1011: mol_type = other DNA; note = Synthetic coding sequence
atggagagcgtgctgagcaagtacgaggaccagatcaccatcttcaccgactacctggaggagtaccccgacaccgacgagctggtgtggatcctgggcaagcagcacctgctgaagaccgagaagagcaagctgctgagcgacatcagcgccagactgtggttcacctacagaagaaagttcagccccatcggcggcaccggccccagcagcgacgccggctggggctgcatgctgagatgcggccagatgatgctggcccaggccctgatctgcagacacctgggcagagactggagctgggagaagcagaaggagcagcccaaggagtaccagagaatcctgcagtgcttcctggacagaaaggactgctgctacagcatccaccagatggcccagatgggcgtgggcgagggcaagagcatcggcgagtggttcggccccaacaccgtggcccaggtgctgaagaagctggccctgttcgacgagtggaacagcctggccgtgtacgtgagcatggacaacaccgtggtgatcgaggacatcaagaagatgtgcagagtgctgcccctgagcgccgacaccgccggcgacagaccccccgacagcctgaccgccagcaaccagagcgacgagctgatcttcctggacccccacaccacccagaccttcgtggacaccgaggagaacggcaccgtgaacgaccagaccttccactgcctgcagagcccccagagaatgaacatcctgaacctggaccccagcgtggccctgggcttcttctgcaaggaggagaaggacttcgacaactggtgcagcctggtgcagaaggagatcctgaaggagaacctgagaatgttcgagctggtgcagaagcaccccagccactggccccccttcgtgccccccgccaagcccgaggtgaccaccaccggcgccgagttcatcgacagcaccgagcagctggaggagttcgacctggaggaggacttcgagatcctgagcgtgtag

SEQ ID NO: 10310 - DNA, 3018 bp, synthetic construct
  source 1..3018: mol_type = other DNA; note = Synthetic coding sequence
atgctgagaaccgccggcagagacggcctgtgcagactgagcacctacctggaggagctggaggccgtggagctgaagaagttcaagctgtacctgggcaccgccaccgagctgggcgagggcaagatcccctggggcagcatggagaaggccggccccctggagatggcccagctgctgatcacccacttcggccccgaggaggcctggagactggccctgagcaccttcgagagaatcaacagaaaggacctgtgggagagaggccagagagaggacctggtgagagacaccccccccggcggccccagcagcctgggcaaccagagcacctgcctgctggaggtgagcctggtgacccccagaaaggacccccaggagacctacagagactacgtgagaagaaagttcagactgatggaggacagaaacgccagactgggcgagtgcgtgaacctgagccacagatacaccagactgctgctggtgaaggagcacagcaaccccatgcaggtgcagcagcagctgctggacaccggcagaggccacgccagaaccgtgggccaccaggccagccccatcaagatcgagaccctgttcgagcccgacgaggagagacccgagccccccagaaccgtggtgatgcagggcgccgccggcatcggcaagagcatgctggcccacaaggtgatgctggactgggccgacggcaagctgttccagggcagattcgactacctgttctacatcaactgcagagagatgaaccagagcgccaccgagtgcagcatgcaggacctgatcttcagctgctggcccgagcccagcgcccccctgcaggagctgatcagagtgcccgagagactgctgttcatcatcgacggcttcgacgagctgaagcccagcttccacgacccccagggcccctggtgcctgtgctgggaggagaagagacccaccgagctgctgctgaacagcctgatcagaaagaagctgctgcccgagctgagcctgctgatcaccaccagacccaccgccctggagaagctgcacagactgctggagcaccccagacacgtggagatcctgggcttcagcgaggccgagagaaaggagtacttctacaagtacttccacaacgccgagcaggccggccaggtgttcaactacgtgagagacaacgagcccctgttcaccatgtgcttcgtgcccctggtgtgctgggtggtgtgcacctgcctgcagcagcagctggagggcggcggcctgctgagacagaccagcagaaccaccaccgccgtgtacatgctgtacctgctgagcctgatgcagcccaagcccggcgcccccagactgcagcccccccccaaccagagaggcctgtgcagcctggccgccgacggcctgtggaaccagaagatcctgttcgaggagcaggacctgagaaagcacggcctggacggcgaggacgtgagcgccttcctgaacatgaacatcttccagaaggacatcaactgcgagagatactacagcttcatccacctgagcttccaggagttcttcgccgccatgtactacatcctggacgagggcgagggcggcgccggccccgaccaggacgtgaccagactgctgaccgagtacgccttcagcgagagaagcttcctggccctgaccagcagattcctgttcggcctgctgaacgaggagaccagaagccacctggagaagagcctgtgctggaaggtgagcccccacatcaagatggacctgctgcagtggatccagagcaaggcccagagcgacggcagcaccctgcagcagggcagcctggagttcttcagctgcctgtacgagatccaggaggaggagttcatccagcaggccctgagccacttccaggtgatcgtggtgagcaacatcgccagcaagatggagcacatggtgagcagcttctgcctgaagagatgcagaagcgcccaggtgctgcacctgtacggcgccacctacagcgccgacggcgaggacagagccagatgcagcgccggcgcccacaccctgctggtgcagctgagacccgagagaaccgtgctgctggacgcctacagcgagcacctggccgccgccctgtgcaccaaccccaacctgatcgagctgagcctgtacagaaacgccctgggcagcagaggcgtgaagctgctgtgccagggcctgagacaccccaactgcaagctgcagaacctgagactgaagagatgcagaatcagcagcagcgcctgcgaggacctgagcgccgccctgatcgccaacaagaacctgaccagaatggacctgagcggcaacggcgtgggcttccccggcatgatgctgctgtgcgagggcctgagacacccccagtgcagactgcagatgatccagctgagaaagtgccagctggagagcggcgcctgccaggagatggccagcgtgctgggcaccaacccccacctggtggagctggacctgaccggcaacgccctggaggacctgggcctgagactgctgtgccagggcctgagacaccccgtgtgcagactgagaaccctgtggctgaagatctgcagactgaccgccgccgcctgcgacgagctggccagcaccctgagcgtgaaccagagcctgagagagctggacctgagcctgaacgagctgggcgacctgggcgtgctgctgctgtgcgagggcctgagacaccccacctgcaagctgcagaccctgagactgggcatctgcagactgggcagcgccgcctgcgagggcctgagcgtggtgctgcaggccaaccacaacctgagagagctggacctgagcttcaacgacctgggcgactggggcctgtggctgctggccgagggcctgcagcaccccgcctgcagactgcagaagctgtggctgttcggcatggacctgaacaagatgacccacagcagactggccgccctgagagtgaccaagccctacctggacatcggctgctag

SEQ ID NO: 10311 - DNA, 618 bp, synthetic construct
  source 1..618: mol_type = other DNA; note = Synthetic coding sequence
atggtgagcagctgctgcggcagcgtgtgcagcgaccagggctgcggcctggagacctgctgcagacccagctgctgccagaccacctgctgcagaaccacctgctgcagacccagctgctgcgtgagcagctgctgcagaccccagtgctgccagagcgtgtgctgccagcccacctgctgcagacccagctgctgccccagctgctgccagaccacctgctgcagaaccacctgctgcagacccagctgctgcgtgagcagctgctgcagaccccagtgctgccagagcgtgtgctgccagcccacctgctgcagacccagctgcagcatcagcagctgctgcagacccagctgctgcgtgagcagatgctgcagaagccagtgctgccagagcgtgtgctgccagcccacctgctgcagacccagctgctgcatcagcagctgctgcagacccagctgctgcgagagcagctgctgcagaccctgctgctgcagaccctgctgctgcctgagacccgtgtgcggcagagtgagctgccacaccacctgctacagacccacctgcgtgatcagcacctgccccagacccctgtgctgcgccagcagctgctgctag

SEQ ID NO: 10312 - DNA, 573 bp, synthetic construct
  source 1..573: mol_type = other DNA; note = Synthetic coding sequence
atgcagagctgcgagagcagcggcgacagcgccgacgaccccctgagcagaggcctgagaagaagaggccagcccagagtggtggtgatcggcgccggcctggccggcctggccgccgccaaggccctgctggagcagggcttcaccgacgtgaccgtgctggaggccagcagccacatcggcggcagagtgcagagcgtgaagctgggccacgccaccttcgagctgggcgccacctggatccacggcagccacggcaaccccatctaccacctggccgaggccaacggcctgctggaggagaccaccgacggcgagagaagcgtgggcagaatcagcctgtacagcaagaacggcgtggcctgctacctgaccaaccacggcagaagaatccccaaggacgtggtggaggagttcagcgacctgtacaacgagcccatgcaggtgctgttcagcggcgaggccacccacagaaagtactacagcaccacccacggcgccctgctgagcggccagagagaggccgccagactgatcgagatgtacagagacctgttccagcagggcacctag

SEQ ID NO: 10313 - DNA, 3945 bp, synthetic construct
  source 1..3945: mol_type = other DNA; note = Synthetic coding sequence
atggccctgagacccggcgccggcagcggcggcggcggcgccgccggcgccggcgccggcagcgccggcggcggcggcttcatgttccccgtggccggcggcatcagacccccccaggccggcctgatgcccatgcagcagcagggcttccccatggtgagcgtgatgcagcccaacatgcagggcatcatgggcatgaactacagcagccagatgagccagggccccatcgccatgcaggccggcatccccatgggccccatgcccgccgccggcatgccctacctgggccaggcccccttcctgggcatgagaccccccggcccccagtacacccccgacatgcagaagcagttcgccgaggagcagcagaagagattcgagcagcagcagaagctgctggaggaggagagaaagagaagacagttcgaggagcagaagcagaagctgagactgctgagcagcgtgaagcccaagaccggcgagaagagcagagacgacgccctggaggccatcaagggcaacctggacggcttcagcagagacgccaagatgcaccccacccccgccagccaccccaagaagcccggccccagcctggaggagaagttcctggtgagctgcgacatcagcaccagcggccaggagcagatcaagctgaacaccagcgaggtgggccacaaggccctgggccccggcagcagcaagaagtaccccagcctgatggccagcaacggcgtggccgtggacggctgcgtgagcggcaccaccaccgccgaggccgagaacaccagcgaccagaacctgagcatcgaggagagcggcgtgggcgtgttccccagccaggaccccgcccagcccagaatgcccccctggatctacaacgagagcctggtgcccgacgcctacaagaagatcctggagaccaccatgacccccaccggcatcgacaccgccaagctgtaccccatcctgatgagcagcggcctgcccagagagaccctgggccagatctgggccctggccaacagaaccacccccggcaagctgaccaaggaggagctgtacaccgtgctggccatgatcgccgtgacccagagaggcgtgcccgccatgagccccgacgccctgaaccagttccccgccgcccccatccccaccctgagcggcttcagcatgaccctgcccacccccgtgagccagcccaccgtgatccccagcggccccgccggcagcatgcccctgagcctgggccagcccgtgatgggcatcaacctggtgggccccgtgggcggcgccgccgcccaggccagcagcggcttcatccccacctaccccgccaaccaggtggtgaagcccgaggaggacgacttccaggacttccaggacgccagcaagagcggcagcctggacgacagcttcagcgacttccaggagctgcccgccagcagcaagaccagcaacagccagcacggcaacagcgcccccagcctgctgatgcccctgcccggcaccaaggccctgcccagcatggacaagtacgccgtgttcaagggcatcgccgccgacaagagcagcgagaacaccgtgccccccggcgaccccggcgacaagtacagcgccttcagagagctggagcagaccgccgagaacaagcccctgggcgagagcttcgccgagttcagaagcgccggcaccgacgacggcttcaccgacttcaagaccgccgacagcgtgagccccctggagccccccaccaaggacaagaccttcccccccagcttccccagcggcaccatccagcagaagcagcagacccaggtgaagaaccccctgaacctggccgacctggacatgttcagcagcgtgaactgcagcagcgagaagcccctgagcttcagcgccgtgttcagcaccagcaagagcgtgagcaccccccagagcaccggcagcgccgccaccatgaccgccctggccgccaccaagaccagcagcctggccgacgacttcggcgagttcagcctgttcggcgagtacagcggcctggcccccgtgggcgagcaggacgacttcgccgacttcatggccttcagcaacagcagcatcagcagcgagcagaagcccgacgacaagtacgacgccctgaaggaggaggccagccccgtgcccctgaccagcaacgtgggcagcaccgtgaagggcggccagaacagcaccgccgccagcaccaagtacgacgtgttcagacagctgagcctggagggcagcggcctgggcgtggaggacctgaaggacaacacccccagcggcaagagcgacgacgacttcgccgacttccacagcagcaagttcagcagcatcaacagcgacaagagcctgggcgagaaggccgtggccttcagacacaccaaggaggacagcgccagcgtgaagagcctggacctgcccagcatcggcggcagcagcgtgggcaaggaggacagcgaggacgccctgagcgtgcagttcgacatgaagctggccgacgtgggcggcgacctgaagcacgtgatgagcgacagcagcctggacctgcccaccgtgagcggccagcacccccccgccgccgacatcgaggacctgaagtacgccgccttcggcagctacagcagcaacttcgccgtgagcaccctgaccagctacgactggagcgacagagacgacgccacccagggcagaaagctgagccccttcgtgctgagcgccggcagcggcagccccagcgccaccagcatcctgcagaagaaggagaccagcttcggcagcagcgagaacatcaccatgaccagcctgagcaaggtgaccaccttcgtgagcgaggacgccctgcccgagaccaccttccccgccctggccagcttcaaggacaccatcccccagaccagcgagcagaaggagtacgagaacagagactacaaggacttcaccaagcaggacctgcccaccgccgagagaagccaggaggccacctgccccagccccgccagcagcggcgccagccaggagacccccaacgagtgcagcgacgacttcggcgagttccagagcgagaagcccaagatcagcaagttcgacttcctggtggccaccagccagagcaagatgaagagcagcgaggagatgatcaagagcgagctggccaccttcgacctgagcgtgcagggcagccacaagagaagcctgagcctgggcgacaaggagatcagcagaagcagccccagccccgccctggagcagcccttcagagacagaagcaacaccctgaacgagaagcccgccctgcccgtgatcagagacaagtacaaggacctgaccggcgaggtggaggagaacgagagatacgcctacgagtggcagagatgcctgggcagcgccctgaacgtgatcaagaaggccaacgacaccctgaacggcatcagcagcagcagcgtgtgcaccgaggtgatccagagcgcccagggcatggagtacctgctgggcgtggtggaggtgtacagagtgaccaagagagtggagctgggcatcaaggccaccgccgtgtgcagcgagaagctgcagcagctgctgaaggacatcgacaaggtgtggaacaacctgatcggcttcatgagcctggccaccctgacccccgacgagaacagcctggacttcagcagctgcatgctgagacccggcatcaagaacgcccaggagctggcctgcggcgtgtgcctgctgaacgtggacagcagaagcagaaaggaggagaagcccgccgaggagcaccccaagaaggccttcaacagcgagaccgacagcttcaagctggcctacggcggccaccagtaccacgccagctgcgccaacttctggatcaactgcgtggagcccaagccccccggcctggtgctgcccgacctgctgtag

SEQ ID NO: 10314 - DNA, 531 bp, synthetic construct
  source 1..531: mol_type = other DNA; note = Synthetic coding sequence
atgagcgacgacgacagcagagccagcaccagcagcagcagcagcagcagcagcaaccagcagaccgagaaggagaccaacacccccaagaagaaggagagcaaggtgagcatgagcaagaacagcaagctgctgagcaccagcgccaagagcgccggccccaagggcgacaacatctacgagtggagaagcaccatcctgggcccccccggcagcgtgtacgagggcggcgtgttcttcctggacatcaccttcacccccgagtaccccttcaagccccccaaggtgaccttcagaaccagaatctaccactgcaacatcaacagccagggcgtgatctgcctggacatcctgaaggacaactggagccccgccctgaccatcagcaaggtgctgctgagcatctgcagcctgctgaccgactgcaaccccgccgaccccctggtgggcagcatcgccacccagtacatgaccaacagagccgagcacgacagaatggccagacagtggaccaagagatacgccacctag

SEQ ID NO: 10315 - DNA, 7029 bp, synthetic construct
  source 1..7029: mol_type = other DNA; note = Synthetic coding sequence
atggacggcgtgagcagcgaggccaacgaggagaacgacaacatcgagagacccgtgagaagaagacacagcagcatcctgaagccccccagaagccccctgcaggacctgagaggcggcaacgagagagtgcaggagagcaacgccctgagaaacaagaagaacagcagaagagtgagcttcgccgacaccatcaaggtgttccagaccgagagccacatgaagatcgtgagaaagagcgagatggagggctgcagcgccatggtgcccagccagctgcagctgctgccccccggcttcaagagattcagctgcctgagcctgcccgagaccgagaccggcgagaacctgctgctgatccagaacaagaagctggaggacaactactgcgagatcaccggcatgaacaccctgctgagcgcccccatccacacccagatgcagcagaaggagttcagcatcatcgagcacaccagagagagaaagcacgccaacgaccagaccgtgatcttcagcgacgagaaccagatggacctgaccagcagccacaccgtgatgatcaccaagggcctgctggacaaccccatcagcgagaagagcaccaagatcgacaccaccagcttcctggccaacctgaagctgcacaccgaggacagcagaatgaagaaggaggtgaacttcagcgtggaccagaacaccagcagcgagaacaagatcgacttcaacgacttcatcaagagactgaagaccggcaagtgcagcgccttccccgacgtgcccgacaaggagaacttcgagatccccatctacagcaaggagcccaacagcgccagcagcacccaccagatgcacgtgagcctgaaggaggacgagaacaacagcaacatcaccagactgttcagagagaaggacgacggcatgaacttcacccagtgccacaccgccaacatccagaccctgatccccaccagcagcgagaccaacagcagagagagcaagggcaacgacatcaccatctacggcaacgacttcatggacctgaccttcaaccacaccctgcagatcctgcccgccaccggcaacttcagcgagatcgagaaccagacccagaacgccatggacgtgaccaccggctacggcaccaaggccagcggcaacaagaccgtgttcaagagcaagcagaacaccgccttccaggacctgagcatcaacagcgccgacaagatccacatcaccagaagccacatcatgggcgccgagacccacatcgtgagccagacctgcaaccaggacgccagaatcctggccatgacccccgagagcatctacagcaaccccagcatccagggctgcaagaccgtgttctacagcagctgcaacgacgccatggagatgaccaagtgcctgagcaacatgagagaggagaagaacctgctgaagcacgacagcaactacgccaagatgtactgcaaccccgacgccatgagcagcctgaccgagaagaccatctacagcggcgaggagaacatggacatcaccaagagccacaccgtggccatcgacaaccagatcttcaagcaggaccagagcaacgtgcagatcgccgccgcccccacccccgagaaggagatgatgctgcagaacctgatgaccaccagcgaggacggcaagatgaacgtgaactgcaacagcgtgccccacgtgagcaaggagagaatccagcagagcctgagcaaccccctgagcatcagcctgaccgacagaaagaccgagctgctgagcggcgagaacatggacctgaccgagagccacaccagcaacctgggcagccaggtgcccctggccgcctacaacctggcccccgagagcaccagcgagagccacagccagagcaagagcagcagcgacgagtgcgaggagatcaccaagagcagaaacgagcccttccagagaagcgacatcatcgccaagaacagcctgaccgacacctggaacaaggacaaggactgggtgctgaagatcctgccctacctggacaaggacagcccccagagcgccgactgcaaccaggagatcgccaccagccacaacatcgtgtactgcggcggcgtgctggacaagcagatcaccaacagaaacaccgtgagctgggagcagagcctgttcagcaccaccaagcccctgttcagcagcggccagttcagcatgaagaaccacgacaccgccatcagcagccacaccgtgaagagcgtgctgggccagaacagcaagctggccgagcccctgagaaagagcctgagcaaccccacccccgactactgccacgacaagatgatcatctgcagcgaggaggagcagaacatggacctgaccaagagccacaccgtggtgatcggcttcggccccagcgagctgcaggagctgggcaagaccaacctggagcacaccaccggccagctgaccaccatgaacagacagatcgccgtgaaggtggagaagtgcggcaagagccccatcgagaagagcggcgtgctgaagagcaactgcatcatggacgtgctggaggacgagagcgtgcagaagcccaagttccccaaggagaagcagaacgtgaagatctggggcagaaagagcgtgggcggccccaagatcgacaagaccatcgtgttcagcgaggacgacaagaacgacatggacatcaccaagagctacaccatcgagatcaaccacagacccctgctggagaagagagactgccacctggtgcccctggccggcaccagcgagaccatcctgtacacctgcagacaggacgacatggagatcaccagaagccacaccaccgccctggagtgcaagaccgtgagccccgacgagatcaccaccagacccatggacaagaccgtggtgttcgtggacaaccacgtggagctggagatgaccgagagccacaccgtgttcatcgactaccaggagaaggagagaaccgacagacccaacttcgagctgagccagagaaagagcctgggcacccccaccgtgatctgcacccccaccgaggagagcgtgttcttccccggcaacggcgagagcgacagactggtggccaacgacagccagctgacccccctggaggagtggagcaacaacagaggccccgtggaggtggccgacaacatggagctgagcaagagcgccacctgcaagaacatcaaggacgtgcagagccccggcttcctgaacgagcccctgagcagcaagagccagagaagaaagagcctgaagctgaagaacgacaagaccatcgtgttcagcgagaaccacaagaacgacatggacatcacccagagctgcatggtggagatcgacaacgagagcgccctggaggacaaggaggacttccacctggccggcgccagcaagaccatcctgtacagctgcggccaggacgacatggagatcaccagaagccacaccaccgccctggagtgcaagaccctgctgcccaacgagatcgccatcagacccatggacaagaccgtgctgttcaccgacaactacagcgacctggaggtgaccgacagccacaccgtgttcatcgactgccaggccaccgagaagatcctggaggagaaccccaagttcggcatcggcaagggcaagaacctgggcgtgagcttccccaaggacaacagctgcgtgcaggagatcgccgagaagcaggccctggccgtgggcaacaagatcgtgctgcacaccgagcagaagcagcagctgttcgccgccaccaacagaaccaccaacgagatcatcaagttccacagcgccgccatggacgagaaggtgatcggcaaggtggtggaccaggcctgcaccctggagaaggcccaggtggagagctgccagctgaacaacagagacagaagaaacgtggacttcaccagcagccacgccaccgccgtgtgcggcagcagcgacaactacagctgcctgcccaacgtgatcagctgcaccgacaacctggagggcagcgccatgctgctgtgcgacaaggacgaggagaaggccaactactgccccgtgcagaacgacctggcctacgccaacgacttcgccagcgagtactacctggagagcgagggccagcccctgagcgccccctgccccctgctggagaaggaggaggtgatccagaccagcaccaagggccagctggactgcgtgatcaccctgcacaaggaccaggacctgatcaaggaccccagaaacctgctggccaaccagaccctggtgtacagccaggacctgggcgagatgaccaagctgaacagcaagagagtgagcttcaagctgcccaaggaccagatgaaggtgtacgtggacgacatctacgtgatcccccagccccacttcagcaccgaccagccccccctgcccaagaagggccagagcagcatcaacaaggaggaggtgatcctgagcaaggccggcaacaagagcctgaacatcatcgagaacagcagcgcccccatctgcgagaacaagcccaagatcctgaacagcgaggagtggttcgccgccgcctgcaagaaggagctgaaggagaacatccagaccaccaactacaacaccgccctggacttccacagcaacagcgacgtgaccaagcaggtgatccagacccacgtgaacgccggcgaggcccccgaccccgtgatcaccagcaacgtgccctgcttccacagcatcaagcccaacctgaacaacctgaacggcaagaccggcgagttcctggccttccagaccgtgcacctgccccccctgcccgagcagctgctggagctgggcaacaaggcccacaacgacatgcacatcgtgcaggccaccgagatccacaacatcaacatcatcagcagcaacgccaaggacagcagagacgaggagaacaagaagagccacaacggcgccgagaccaccagcctgccccccaagaccgtgttcaaggacaaggtgagaagatgcagcctgggcatcttcctgcccagactgcccaacaagagaaactgcagcgtgaccggcatcgacgacctggagcagatccccgccgacaccaccgacatcaaccacctggagacccagcccgtgagcagcaaggacagcggcatcggcagcgtggccggcaagctgaacctgagccccagccagtacatcaacgaggagaacctgcccgtgtaccccgacgagatcaacagcagcgacagcatcaacatcgagaccgaggagaaggccctgatcgagacctaccagaaggagatcagcccctacgagaacaagatgggcaagacctgcaacagccagaagagaacctgggtgcaggaggaggaggacatccacaaggagaagaagatcagaaagaacgagatcaagttcagcgacaccacccaggacagagagatcttcgaccaccacaccgaggaggacatcgacaagagcgccaacagcgtgctgatcaagaacctgagcagaacccccagcagctgcagcagcagcctggacagcatcaaggccgacggcaccagcctggacttcagcacctacagaagcagccagatggagagccagttcctgagagacaccatctgcgaggagagcctgagagagaagctgcaggacggcagaatcaccatcagagagttcttcatcctgctgcaggtgcacatcctgatccagaagcccagacagagcaacctgcccggcaacttcaccgtgaacaccccccccacccccgaggacctgatgctgagccagtacgtgtacagacccaagatccagatctacagagaggactgcgaggccagaagacagaagatcgaggagctgaagctgagcgccagcaaccaggacaagctgctggtggacatcaacaagaacctgtgggagaagatgagacactgcagcgacaaggagctgaaggccttcggcatctacctgaacaagatcaagagctgcttcaccaagatgaccaaggtgttcacccaccagggcaaggtggccctgtacggcaagctggtgcagagcgcccagaacgagagagagaagctgcagatcaagatcgacgagatggacaagatcctgaagaagatcgacaactgcctgaccgagatggagaccgagaccaagaacctggaggacgaggagaagaacaaccccgtggaggagtgggacagcgagatgagagccgccgagaaggagctggagcagctgaagaccgaggaggaggagctgcagagaaacctgctggagctggaggtgcagaaggagcagaccctggcccagatcgacttcatgcagaagcagagaaacagaaccgaggagctgctggaccagctgagcctgagcgagtgggacgtggtggagtggagcgacgaccaggccgtgttcaccttcgtgtacgacaccatccagctgaccatcaccttcgaggagagcgtggtgggcttccccttcctggacaagagatacagaaagatcgtggacgtgaacttccagagcctgctggacgaggaccaggccccccccagcagcctgctggtgcacaagctgatcttccagtacgtggaggagaaggagagctggaagaagacctgcaccacccagcaccagctgcccaagatgctggaggagttcagcctggtggtgcaccactgcagactgctgggcgaggagatcgagtacctgaagagatggggccccaactacaacctgatgaacatcgacatcaacaacaacgagctgagactgctgttcagcagcagcgccgccttcgccaagttcgagatcaccctgttcctgagcgcctactaccccagcgtgcccctgcccagcaccatccagaaccacgtgggcaacaccagccaggacgacatcgccaccatcctgagcaaggtgcccctggagaacaactacctgaagaacgtggtgaagcagatctaccaggacctgttccaggactgccacttctaccactag

SEQ ID NO: 10316 - DNA, 1638 bp, synthetic construct
  source 1..1638: mol_type = other DNA; note = Synthetic coding sequence
atgagcagctgcgtgagcagccagcccagcagcaacagagccgccccccaggacgagctgggcggcagaggcagcagcagcagcgagagccagaagccctgcgaggccctgagaggcctgagcagcctgagcatccacctgggcatggagagcttcatcgtggtgaccgagtgcgagcccggctgcgccgtggacctgggcctggccagagacagacccctggaggccgacggccaggaggtgcccctggacaccagcggcagccaggccagaccccacctgagcggcagaaagctgagcctgcaggagagaagccagggcggcctggccgccggcggcagcctggacatgaacggcagatgcatctgccccagcctgccctacagccccgtgagcagcccccagagcagccccagactgcccagaagacccaccgtggagagccaccacgtgagcatcaccggcatgcaggactgcgtgcagctgaaccagtacaccctgaaggacgagatcggcaagggcagctacggcgtggtgaagctggcctacaacgagaacgacaacacctactacgccatgaaggtgctgagcaagaagaagctgatcagacaggccggcttccccagaagacccccccccagaggcaccagacccgcccccggcggctgcatccagcccagaggccccatcgagcaggtgtaccaggagatcgccatcctgaagaagctggaccaccccaacgtggtgaagctggtggaggtgctggacgaccccaacgaggaccacctgtacatggtgttcgagctggtgaaccagggccccgtgatggaggtgcccaccctgaagcccctgagcgaggaccaggccagattctacttccaggacctgatcaagggcatcgagtacctgcactaccagaagatcatccacagagacatcaagcccagcaacctgctggtgggcgaggacggccacatcaagatcgccgacttcggcgtgagcaacgagttcaagggcagcgacgccctgctgagcaacaccgtgggcacccccgccttcatggcccccgagagcctgagcgagaccagaaagatcttcagcggcaaggccctggacgtgtgggccatgggcgtgaccctgtactgcttcgtgttcggccagtgccccttcatggacgagagaatcatgtgcctgcacagcaagatcaagagccaggccctggagttccccgaccagcccgacatcgccgaggacctgaaggacctgatcaccagaatgctggacaagaaccccgagagcagaatcgtggtgcccgagatcaagatcctggtgaagaccatgatcagaaagagaagcttcggcaaccccttcgagggcagcagaagagaggagagaagcctgagcgcccccggcaacctgctgaccaagaagcccaccagagagtgcgagagcctgagcgagctgaaggaggccagacagagaagacagccccccggccacagacccgcccccagaggcggcggcggcagcgccctggtgagaggcagcccctgcgtggagagctgctgggcccccgcccccggcagccccgccagaatgcaccccctgagacccgaggaggccatggagcccgagtag

SEQ ID NO: 10317 - DNA, 333 bp, synthetic construct
  source 1..333: mol_type = other DNA; note = Synthetic coding sequence
atgcccaagagaagctgccccttcgccgacgtggcccccctgcagctgaaggtgagagtgagccagagagagctgagcagaggcgtgtgcgccgagagatacagccaggaggtgttcgaccccagcggcgtggccagcatcgcctgcagcagctgcgtgagagccgtggacggcaaggccgtgtgcggccagtgcgagagagccctgtgcggccagtgcgtgagaacctgctggggctgcggcagcgtggcctgcaccctgtgcggcctggtggactgcagcgacatgtacgagaaggtgctgtgcaccagctgcgccatgttcgagacctag

SEQ ID NO: 10318 - DNA, 2253 bp, synthetic construct
  source 1..2253: mol_type = other DNA; note = Synthetic coding sequence
atggaggacctgttcgagaccttccaggacgagatgggcttcagcaacatggaggacgacggccccgaggaggaggagagagtggccgagccccaggccaacttcaacaccccccaggccctgagattcgaggagctgctggccaacctgctgaacgagcagcaccagatcgccaaggagctgttcgagcagctgaagatgaagaagcccagcgccaagcagcagaaggaggtggagaaggtgaagccccagtgcaaggaggtgcaccagaccctgatcctggaccccgcccagagaaagagactgcagcagcagatgcagcagcacgtgcagctgctgacccagatccacctgctggccacctgcaaccccaacctgaaccccgaggccagcagcaccagaatctgcctgaaggagctgggcaccttcgcccagagcagcatcgccctgcaccaccagtacaaccccaagttccagaccctgttccagccctgcaacctgatgggcgccatgcagctgatcgaggacttcagcacccacgtgagcatcgactgcagcccccacaagaccgtgaagaagaccgccaacgagttcccctgcctgcccaagcaggtggcctggatcctggccaccagcaaggtgttcatgtaccccgagctgctgcccgtgtgcagcctgaaggccaagaacccccaggacaagatcctgttcaccaaggccgaggacaacctgctggccctgggcctgaagcacttcgagggcaccgagttcctgaaccccctgatcagcaagtacctgctgacctgcaagaccgccagacagctgaccgtgagaatcaagaacctgaacatgaacagagcccccgacaacatcatcaagttctacaagaagaccaagcagctgcccgtgctgggcaagtgctgcgaggagatccagccccaccagtggaagccccccatcgagagagaggagcacagactgcccttctggctgaaggccagcctgcccagcatccaggaggagctgagacacatggccgacggcgccagagaggtgggcaacatgaccggcaccaccgagatcaacagcgaccagggcctggagaaggacaacagcgagctgggcagcgagaccagataccccctgctgctgcccaagggcgtggtgctgaagctgaagcccgtggccgacagattccccaagaaggcctggagacagaagagaagcagcgtgctgaagcccctgctgatccagcccagccccagcctgcagcccagcttcaaccccggcaagacccccgcccagagcacccacagcgaggccccccccagcaagatggtgctgagaatcccccaccccatccagcccgccaccgtgctgcagaccgtgcccggcgtgccccccctgggcgtgagcggcggcgagagcttcgagagccccgccgccctgcccgccatgccccccgaggccagaaccagcttccccctgagcgagagccagaccctgctgagcagcgcccccgtgcccaaggtgatgatgcccagccccgccagcagcatgttcagaaagccctacgtgagaagaagacccagcaagagaagaggcgccagagccttcagatgcatcaagcccgcccccgtgatccaccccgccagcgtgatcttcaccgtgcccgccaccaccgtgaagatcgtgagcctgggcggcggctgcaacatgatccagcccgtgaacgccgccgtggcccagagcccccagaccatccccatcgccaccctgctggtgaaccccaccagcttcccctgccccctgaaccagcccctggtggccagcagcgtgagccccctgatcgtgagcggcaacagcgtgaacctgcccatccccagcacccccgaggacaaggcccacatgaacgtggacatcgcctgcgccgtggccgacggcgagaacgccttccagggcctggagcccaagctggagccccaggagctgagccccctgagcgccaccgtgttccccaaggtggagcacagccccggccccccccccgtggacaagcagtgccaggagggcctgagcgagaacagcgcctacagatggaccgtggtgaagaccgaggagggcagacaggccctggagcccctgccccagggcatccaggagagcctgaacaacagcagccccggcgacctggaggaggtggtgaagatggagcccgaggacgccaccgaggagatcagcggcttcctgtag

SEQ ID NO: 10319 - DNA, 2604 bp, synthetic construct
  source 1..2604: mol_type = other DNA; note = Synthetic coding sequence
atgcaggccgaggccgccgactggttcagcagcatgcccttccagaagcacgtgtactaccccctggccagcggccccgagggccccgacgtggccgtggccgccgccgccgccggcgccgccagcatggcctgcgccccccccagcgccgccagcggccccctgcccttcttccagttcagacccagactggagagcgtggactggagaagactgagcgccatcgacgtggacaaggtggccggcgccgtggacgtgctgaccctgcaggagaacatcatgaacatcaccttctgcaagctggaggacgagaagtgcccccactgccagagcggcgtggaccccgtgctgctgaagctgatcagactggcccagttcaccatcgagtacctgctgcacagccaggagttcctgaccagccagctgcacaccctggaggagagactgagactgagccactgcgacggcgagcagagcaagaagctgctgaccaagcaggccggcgagatcaagaccctgaaggaggagtgcaagagaagaaagaagatgatcagcacccagcagctgatgatcgaggccaaggccaactactaccagtgccacttctgcgacaaggccttcatgaaccaggccttcctgcagagccacatccagagaagacacaccgaggagaacagccacttcgagtaccagaagaacgcccagatcgagaagctgagaagcgagatcgtggtgctgaaggaggagctgcagctgaccagaagcgagctggaggccgcccaccacgccagcgccgtgagattcagcaaggagtacgagatgcagaagaccaaggaggaggacttcctgaagctgttcgacagatggaaggaggaggagaaggagaagctggtggacgagatggagaaggtgaaggagatgttcatgaaggagttcaaggagctgaccagcaagaacagcgccctggagtaccagctgagcgagatccagaagagcaacatgcagatcaagagcaacatcggcaccctgaaggacgcccacgagttcaaggaggacagaagcccctacccccaggacttccacaacgtgatgcagctgctggacagccaggagagcaagtggaccgccagagtgcaggccatccaccaggagcacaagaaggagaagggcagactgctgagccacatcgagaagctgagaaccagcatgatcgacgacctgaacgccagcaacgtgttctacaagaagagaatcgaggagctgggccagagactgcaggagcagaacgagctgatcatcacccagagacagcagatcaaggacttcacctgcaaccccctgaacagcatcagcgagcccaagggcaaccccctggcctggcaggccttcgagagccagcccgccgcccccgccgtgcccatgaacgcccccgccctgcacaccctggagaccaagagcagcctgcccatggtgcacgagcaggccttcagcagccacatcctggagcccatcgaggagctgagcgaggaggagaagggcagagagaacgagcagaagctgaacaacaacaagatgcacctgagaaaggccctgaagagcaacagcagcctgaccaagggcctgagaaccatggtggagcagaacctgatggagaagctggagaccctgggcatcaacgccgacatcagaggcatcagcagcgaccagctgcacagagtgctgaagagcgtggagagcgagagacacaagcaggagagagagatccccaacttccaccagatcagagagttcctggagcaccaggtgagctgcaagatcgaggagaaggccctgctgagcagcgaccagtgcagcgtgagccagatggacaccctgagcaccggcgaggtgcccaagatgatccagctgcccagcaagaacagacagctgatcagacagaaggccgtgagcaccgacagaaccagcgtgcccaagatcaagaagaacgtgatggaggaccccttccccagaaagagcagcaccatcaccaccccccccttcagcagcgaggaggagcaggaggacgacgacctgatcagagcctacgccagccccggccccctgcccgtgccccccccccagaacaagggcagcttcggcaagaacaccgtgaagagcgacgccgacggcaccgagggcagcgagatcgaggacaccgacgacagccccaagcccgccggcgtggccgtgaagacccccaccgagaaggtggagaagatgttcccccacagaaagaacgtgaacaagcccgtgggcggcaccaacgtgcccgagatgttcatcaagaaggaggagctgcaggagctgaagtgcgccgacgtggaggacgaggactgggacatcagcagcctggaggaggagatcagcctgggcaagaagagcggcaaggagcagaaggagcccccccccgccaagaacgagccccacttcgcccacgtgctgaacgcctggggcgccttcaaccccaagggccccaagggcgagggcctgcaggagaacgagagcagcaccctgaagagcagcctggtgaccgtgaccgactggagcgacaccagcgacgtgtag

SEQ ID NO: 10320 - DNA, 1860 bp, synthetic construct
  source 1..1860: mol_type = other DNA; note = Synthetic coding sequence
atgagcggcctggtgctgggccagagagacgagcccgccggccacagactgagccaggaggagatcctgggcagcaccagactggtgagccagggcctggaggccctgagaagcgagcaccaggccgtgctgcagagcctgagccagaccatcgagtgcctgcagcagggcggccacgaggagggcctggtgcacgagaaggccagacagctgagaagaagcatggagaacatcgagctgggcctgagcgaggcccaggtgatgctggccctggccagccacctgagcaccgtggagagcgagaagcagaagctgagagcccaggtgagaagactgtgccaggagaaccagtggctgagagacgagctggccggcacccagcagagactgcagagaagcgagcaggccgtggcccagctggaggaggagaagaagcacctggagttcctgggccagctgagacagtacgacgaggacggccacaccagcgaggagaaggagggcgacgccaccaaggacagcctggacgacctgttccccaacgaggaggaggaggaccccagcaacggcctgagcagaggccagggcgccaccgccgcccagcagggcggctacgagatccccgccagactgagaaccctgcacaacctggtgatccagtacgccgcccagggcagatacgaggtggccgtgcccctgtgcaagcaggccctggaggacctggagagaaccagcggcagaggccaccccgacgtggccaccatgctgaacatcctggccctggtgtacagagaccagaacaagtacaaggaggccgcccacctgctgaacgacgccctgagcatcagagagagcaccctgggccccgaccaccccgccgtggccgccaccctgaacaacctggccgtgctgtacggcaagagaggcaagtacaaggaggccgagcccctgtgccagagagccctggagatcagagagaaggtgctgggcaccaaccaccccgacgtggccaagcagctgaacaacctggccctgctgtgccagaaccagggcaagtacgaggccgtggagagatactaccagagagccctggccatctacgagggccagctgggccccgacaaccccaacgtggccagaaccaagaacaacctggccagctgctacctgaagcagggcaagtacgccgaggccgagaccctgtacaaggagatcctgaccagagcccacgtgcaggagttcggcagcgtggacgacgaccacaagcccatctggatgcacgccgaggagagagaggagatgagcaagagcagacaccacgagggcggcaccccctacgccgagtacggcggctggtacaaggcctgcaaggtgagcagccccaccgtgaacaccaccctgagaaacctgggcgccctgtacagaagacagggcaagctggaggccgccgagaccctggaggagtgcgccctgagaagcagaagacagggcaccgaccccatcagccagaccaaggtggccgagctgctgggcgagagcgacggcagaagaaccagccaggagggccccggcgacagcgtgaagttcgagggcggcgaggacgccagcgtggccgtggagtggagcggcgacggcagcggcaccctgcagagaagcggcagcctgggcaagatcagagacgtgctgagaagaagcagcgagctgctggtgagaaagctgcagggcaccgagcccagacccagcagcagcaacatgaagagagccgccagcctgaactacctgaaccagcccagcgccgcccccctgcaggtgagcagaggcctgagcgccagcaccatggacctgagcagcagcagctag

SEQ ID NO: 10321 - DNA, 1137 bp, synthetic construct
  source 1..1137: mol_type = other DNA; note = Synthetic coding sequence
atgaaggagcagctgcccgacctgcacagccacttcagcgacctgaacctggaggcccacatgtacgccagccagtggttcctgaccctgttcaccgccaagttccccctgtgcatggtgttccacatcatcgacctgctgctgtgcgagggcctgaacatcatcttccacgtggccctggccctgctgaagaccagcaaggaggacctgctgcaggccgacttcgagggcgccctgaagttcttcagagtgcagctgcccaagagatacagagccgaggagaacgccagaagactgatggagcaggcctgcaacatcaaggtgcccaccaagaagctgaagaagtacgagaaggagtaccagaccatgagagagagccagctgcagcaggaggaccccatggacagatacaagagagagaacagaagactgcaggaggccagcatgagactggagcaggagaacgacgacctggcccacgagctggtgaccagcaagatcgccctgagaaacgacctggaccaggccgaggacaaggccgacgtgctgaacaaggagctgctgctgaccaagcagagactggtggagaccgaggaggagaagagaaagcaggaggaggagaccgcccagctgaaggaggtgttcagaaagcagctggagaaggccgagtacgagatcaagaagaccaccgccatcatcgccgagtacaagcagatctgcagccagctgagcaccagactggagaagcagcaggccgccagcaaggaggagctggaggtggtgaagggcaagatgatggcctgcaagcactgcagcgacatcttcagcaaggagggcgccctgaagctggccgccaccggcagagaggaccagggcatcgagaccgacgacgagaaggacagcctgaagaagcagctgagagagatggagctggagctggcccagaccaagctgcagctggtggaggccaagtgcaagatccaggagctggagcaccagagaggcgccctgatgaacgagatccaggccgccaagaacagctggttcagcaagaccctgaacagcatcaagaccgccaccggcacccagcccctgcagcccgcccccgtgacccagccccccaaggagagcacctag

SEQ ID NO: 10322 - DNA, 2631 bp, synthetic construct
  source 1..2631: mol_type = other DNA; note = Synthetic coding sequence
atgggcgacagcgacgacgagtacgacagaagaagaagagacaagttcagaagagagagaagcgactacgacagaagcagagagagagacgagagaagaagaggcgacgactggaacgacagagagtgggacagaggcagagagagaagaagcagaggcgagtacagagactacgacagaaacagaagagagagattcagcccccccagacacgagctgagccccccccagaagagaatgagaagagactgggacgagcacagcagcgacccctaccacagcggctacgagatgccctacgccggcggcggcggcggccccacctacggccccccccagccctggggccaccccgacgtgcacatcatgcagcaccacgtgctgcccatccaggccagactgggcagcatcgccgagatcgacctgggcgtgcccccccccgtgatgaagaccttcaaggagttcctgctgagcctggacgacagcgtggacgagaccgaggccgtgaagagatacaacgactacaagctggacttcagaagacagcagatgcaggacttcttcctggcccacaaggacgaggagtggttcagaagcaagtaccaccccgacgaggtgggcaagagaagacaggaggccagaggcgccctgcagaacagactgagagtgttcctgagcctgatggagaccggctggttcgacaacctgctgctggacatcgacaaggccgacgccatcgtgaagatgctggacgccgccgtgatcaagatggagggcggcaccgagaacgacctgagaatcctggagcaggaggaggaggaggagcaggccggcaagcccggcgagcccagcaagaaggaggagggcagagccggcgccggcctgggcgacggcgagagaaagaccaacgacaaggacgagaagaaggaggacggcaagcaggccgagaacgacagcagcaacgacgacaagaccaagaagagcgagggcgacggcgacaaggaggagaagaaggaggacagcgagaaggaggccaagaagagcagcaagaagagaaacagaaagcacagcggcgacgacagcttcgacgagggcagcgtgagcgagagcgagagcgagagcgagagcggccaggccgaggaggagaaggaggaggccgaggaggccctgaaggagaaggagaagcccaaggaggaggagtgggagaagcccaaggacgccgccggcctggagtgcaagcccagacccctgcacaagacctgcagcctgttcatgagaaacatcgcccccaacatcagcagagccgagatcatcagcctgtgcaagagataccccggcttcatgagagtggccctgagcgagccccagcccgagagaagattcttcagaagaggctgggtgaccttcgacagaagcgtgaacatcaaggagatctgctggaacctgcagaacatcagactgagagagtgcgagctgagccccggcgtgaacagagacctgaccagaagagtgagaaacatcaacggcatcacccagcacaagcagatcgtgagaaacgacatcaagctggccgccaagctgatccacaccctggacgacagaacccagctgtgggccagcgagcccggcaccccccccctgcccaccagcctgcccagccagaaccccatcctgaagaacatcaccgactacctgatcgaggaggtgagcgccgaggaggaggagctgctgggcagcagcggcggcgccccccccgaggagccccccaaggagggcaaccccgccgagatcaacgtggagagagacgagaagctgatcaaggtgctggacaagctgctgctgtacctgagaatcgtgcacagcctggactactacaacacctgcgagtaccccaacgaggacgagatgcccaacagatgcggcatcatccacgtgagaggccccatgccccccaacagaatcagccacggcgaggtgctggagtggcagaagaccttcgaggagaagctgacccccctgctgagcgtgagagagagcctgagcgaggaggaggcccagaagatgggcagaaaggaccccgagcaggaggtggagaagttcgtgaccagcaacacccaggagctgggcaaggacaagtggctgtgccccctgagcggcaagaagttcaagggccccgagttcgtgagaaagcacatcttcaacaagcacgccgagaagatcgaggaggtgaagaaggaggtggccttcttcaacaacttcctgaccgacgccaagagacccgccctgcccgagatcaagcccgcccagccccccggccccgcccagatcctgccccccggcctgacccccggcctgccctacccccaccagaccccccagggcctgatgccctacggccagcccagaccccccatcctgggctacggcgccggcgccgtgagacccgccgtgcccaccggcggccccccctacccccacgccccctacggcgccggcagaggcaactacgacgccttcagaggccagggcggctaccccggcaagcccagaaacagaatggtgagaggcgaccccagagccatcgtggagtacagagacctggacgcccccgacgacgtggacttcttctag

SEQ ID NO: 10323 - DNA, 1491 bp, synthetic construct; identical to SEQ ID NO: 10231
  source 1..1491: mol_type = other DNA; note = Synthetic coding sequence

SEQ ID NO: 10324 - DNA, 318 bp, synthetic construct
  source 1..318: mol_type = other DNA; note = Synthetic coding sequence
atggccctgagataccccatggccgtgggcctgaacaagggccacaaggtgaccaagaacgtgagcaagcccagacacagcagaagaagaggcagactgaccaagcacaccaagttcgtgagagacatgatcagagaggtgtgcggcttcgccccctacgagagaagagccatggagctgctgaaggtgagcaaggacaagagagccctgaagttcatcaagaagagagtgggcacccacatcagagccaagagaaagagagaggagctgagcaacgtgctggccgccatgagaaaggccgccgccaagaaggactag

SEQ ID NO: 10325 - DNA, 3720 bp, synthetic construct
  source 1..3720: mol_type = other DNA; note = Synthetic coding sequence
atggccaacgacagccccgccaagagcctggtggacatcgacctgagcagcctgagagaccccgccggcatcttcgagctggtggaggtggtgggcaacggcacctacggccaggtgtacaagggcagacacgtgaagaccggccagctggccgccatcaaggtgatggacgtgaccgaggacgaggaggaggagatcaagctggagatcaacatgctgaagaagtacagccaccacagaaacatcgccacctactacggcgccttcatcaagaagagcccccccggccacgacgaccagctgtggctggtgatggagttctgcggcgccggcagcatcaccgacctggtgaagaacaccaagggcaacaccctgaaggaggactggatcgcctacatcagcagagagatcctgagaggcctggcccacctgcacatccaccacgtgatccacagagacatcaagggccagaacgtgctgctgaccgagaacgccgaggtgaagctggtggacttcggcgtgagcgcccagctggacagaaccgtgggcagaagaaacaccttcatcggcaccccctactggatggcccccgaggtgatcgcctgcgacgagaaccccgacgccacctacgactacagaagcgacctgtggagctgcggcatcaccgccatcgagatggccgagggcgccccccccctgtgcgacatgcaccccatgagagccctgttcctgatccccagaaaccccccccccagactgaagagcaagaagtggagcaagaagttcttcagcttcatcgagggctgcctggtgaagaactacatgcagagacccagcaccgagcagctgctgaagcaccccttcatcagagaccagcccaacgagagacaggtgagaatccagctgaaggaccacatcgacagaaccagaaagaagagaggcgagaaggacgagaccgagtacgagtacagcggcagcgaggaggaggaggaggaggtgcccgagcaggagggcgagcccagcagcatcgtgaacgtgcccggcgagagcaccctgagaagagacttcctgagactgcagcaggagaacaaggagagaagcgaggccctgagaagacagcagctgctgcaggagcagcagctgagagagcaggaggagtacaagagacagctgctggccgagagacagaagagaatcgagcagcagaaggagcagagaagaagactggaggagcagcagagaagagagagagaggccagaagacagcaggagagagagcagagaagaagagagcaggaggagaagagaagactggaggagctggagagaagaagaaaggaggaggaggagagaagaagagccgaggaggagaagagaagagtggagagagagcaggagtacatcagaagacagctggaggaggagcagagacacctggaggtgctgcagcagcagctgctgcaggagcaggccatgctgctggagtgcagatggagagagatggaggagcacagacaggccgagagactgcagagacagctgcagcaggagcaggcctacctgctgagcctgcagcacgaccacagaagaccccacccccagcacagccagcagcccccccccccccagcaggagagaagcaagcccagcttccacgcccccgagcccaaggcccactacgagcccgccgacagagccagagaggtggaggacagattcagaaagaccaaccacagcagccccgaggcccagagcaagcagaccggcagagtgctggagccccccgtgcccagcagaagcgagagcttcagcaacggcaacagcgagagcgtgcaccccgccctgcagagacccgccgagccccaggtgcccgtgagaaccaccagcagaagccccgtgctgagcagaagagacagccccctgcagggcagcggccagcagaacagccaggccggccagagaaacagcaccagcatcgagcccagactgctgtgggagagagtggagaagctggtgcccagacccggcagcggcagcagcagcggcagcagcaacagcggcagccagcccggcagccaccccggcagccagagcggcagcggcgagagattcagagtgagaagcagcagcaagagcgagggcagccccagccagagactggagaacgccgtgaagaagcccgaggacaagaaggaggtgttcagacccctgaagcccgccgacctgaccgccctggccaaggagctgagagccgtggaggacgtgagacccccccacaaggtgaccgactacagcagcagcagcgaggagagcggcaccaccgacgaggaggacgacgacgtggagcaggagggcgccgacgagagcaccagcggccccgaggacaccagagccgccagcagcctgaacctgagcaacggcgagaccgagagcgtgaagaccatgatcgtgcacgacgacgtggagagcgagcccgccatgacccccagcaaggagggcaccctgatcgtgagacagacccagagcgccagcagcaccctgcagaagcacaagagcagcagcagcttcacccccttcatcgaccccagactgctgcagatcagccccagcagcggcaccaccgtgaccagcgtggtgggcttcagctgcgacggcatgagacccgaggccatcagacaggaccccaccagaaagggcagcgtggtgaacgtgaaccccaccaacaccagaccccagagcgacacccccgagatcagaaagtacaagaagagattcaacagcgagatcctgtgcgccgccctgtggggcgtgaacctgctggtgggcaccgagagcggcctgatgctgctggacagaagcggccagggcaaggtgtaccccctgatcaacagaagaagattccagcagatggacgtgctggagggcctgaacgtgctggtgaccatcagcggcaagaaggacaagctgagagtgtactacctgagctggctgagaaacaagatcctgcacaacgaccccgaggtggagaagaagcagggctggaccaccgtgggcgacctggagggctgcgtgcactacaaggtggtgaagtacgagagaatcaagttcctggtgatcgccctgaagagcagcgtggaggtgtacgcctgggcccccaagccctaccacaagttcatggccttcaagagcttcggcgagctggtgcacaagcccctgctggtggacctgaccgtggaggagggccagagactgaaggtgatctacggcagctgcgccggcttccacgccgtggacgtggacagcggcagcgtgtacgacatctacctgcccacccacatccagtgcagcatcaagccccacgccatcatcatcctgcccaacaccgacggcatggagctgctggtgtgctacgaggacgagggcgtgtacgtgaacacctacggcagaatcaccaaggacgtggtgctgcagtggggcgagatgcccaccagcgtggcctacatcagaagcaaccagaccatgggctggggcgagaaggccatcgagatcagaagcgtggagaccggccacctggacggcgtgttcatgcacaagagagcccagagactgaagttcctgtgcgagagaaacgacaaggtgttcttcgccagcgtgagaagcggcggcagcagccaggtgtacttcatgaccctgggcagaaccagcctgctgagctggtag

SEQ ID NO: 10326 - DNA, 2847 bp, synthetic construct
  source 1..2847: mol_type = other DNA; note = Synthetic coding sequence
atgtacggcagcgccagaagcgtgggcaaggtggagcccagcagccagagccccggcagaagccccagactgcccagaagccccagactgggccacagaagaaccaacagcaccggcggcagcagcggcagcagcgtgggcggcggcagcggcaagaccctgagcatggagaacatccagagcctgaacgccgcctacgccaccagcggccccatgtacctgagcgaccacgagaacgtgggcagcgagacccccaagagcaccatgaccctgggcagaagcggcggcagactgccctacggcgtgagaatgaccgccatgggcagcagccccaacatcgccagcagcggcgtggccagcgacaccatcgccttcggcgagcaccacctgccccccgtgagcatggccagcaccgtgccccacagcctgagacaggccagagacaacaccatcatggacctgcagacccagctgaaggaggtgctgagagagaacgacctgctgagaaaggacgtggaggtgaaggagagcaagctgagcagcagcatgaacagcatcaagaccttctggagccccgagctgaagaaggagagagccctgagaaaggacgaggccagcaagatcaccatctggaaggagcagtacagagtggtgcaggaggagaaccagcacatgcagatgaccatccaggccctgcaggacgagctgagaatccagagagacctgaaccagctgttccagcaggacagcagcagcagaaccggcgagccctgcgtggccgagctgaccgaggagaacttccagagactgcacgccgagcacgagagacaggccaaggagctgttcctgctgagaaagaccctggaggagatggagctgagaatcgagacccagaagcagaccctgaacgccagagacgagagcatcaagaagctgctggagatgctgcagagcaagggcctgagcgccaaggccaccgaggaggaccacgagagaaccagaagactggccgaggccgagatgcacgtgcaccacctggagagcctgctggagcagaaggagaaggagaacagcatgctgagagaggagatgcacagaagattcgagaacgcccccgacagcgccaagaccaaggccctgcagaccgtgatcgagatgaaggacagcaagatcagcagcatggagagaggcctgagagacctggaggaggagatccagatgctgaagagcaacggcgccctgagcaccgaggagagagaggaggagatgaagcagatggaggtgtacagaagccacagcaagttcatgaagaacaagatcggccaggtgaagcaggagctgagcagaaaggacaccgagctgctggccctgcagaccaagctggagaccctgaccaaccagttcagcgacagcaagcagcacatcgaggtgctgaaggagagcctgaccgccaaggagcagagagccgccatcctgcagaccgaggtggacgccctgagactgagactggaggagaaggagaccatgctgaacaagaagaccaagcagatccaggacatggccgaggagaagggcacccaggccggcgagatccacgacctgaaggacatgctggacgtgaaggagagaaaggtgaacgtgctgcagaagaagatcgagaacctgcaggagcagctgagagacaaggagaagcagatgagcagcctgaaggagagagtgaagagcctgcaggccgacaccaccaacaccgacaccgccctgaccaccctggaggaggccctggccgagaaggagagaaccatcgagagactgaaggagcagagagacagagacgagagagagaagcaggaggagatcgacaactacaagaaggacctgaaggacctgaaggagaaggtgagcctgctgcagggcgacctgagcgagaaggaggccagcctgctggacctgaaggagcacgccagcagcctggccagcagcggcctgaagaaggacagcagactgaagaccctggagatcgccctggagcagaagaaggaggagtgcctgaagatggagagccagctgaagaaggcccacgaggccgccctggaggccagagccagccccgagatgagcgacagaatccagcacctggagagagagatcaccagatacaaggacgagagcagcaaggcccaggccgaggtggacagactgctggagatcctgaaggaggtggagaacgagaagaacgacaaggacaagaagatcgccgagctggagagcctgaccagcagacaggtgaaggaccagaacaagaaggtggccaacctgaagcacaaggagcaggtggagaagaagaagagcgcccagatgctggaggaggccagaagaagagaggacaacctgaacgacagcagccagcagctgcaggtggaggagctgctgatggccatggagaaggtgaagcaggagctggagagcatgaaggccaagctgagcagcacccagcagagcctggccgagaaggagacccacctgaccaacctgagagccgagagaagaaagcacctggaggaggtgctggagatgaagcaggaggccctgctggccgccatcagcgagaaggacgccaacatcgccctgctggagctgagcagcagcaagaagaagacccaggaggaggtggccgccctgaagagagagaaggacagactggtgcagcagctgaagcagcagacccagaacagaatgaagctgatggccgacaactacgaggacgaccacttcaagagcagccacagcaaccagaccaaccacaagcccagccccgaccaggacgaggaggagggcatctgggcctag

SEQ ID NO: 10327 - DNA, 2733 bp, synthetic construct
  source 1..2733: mol_type = other DNA; note = Synthetic coding sequence
atggccgccaccgtggagggccccgagctggaggccgccgccgccgccggcgacgccagcgaggacagcgacgccggcagcagagccctgcccttcctgggcggcaacagactgagcctggacctgtaccccggcggctgccagcagctgctgcacctgtgcgtgcagcagcccctgcagctgctgcaggtggagttcctgagactgagcacccacgaggacccccagctgctggaggccaccctggcccagctgccccagagcctgagctgcctgagaagcctggtgctgaagggcggccagagaagagacaccctgggcgcctgcctgagaggcgccctgaccaacctgcccgccggcctgagcggcctggcccacctggcccacctggacctgagcttcaacagcctggagaccctgcccgcctgcgtgctgcagatgagaggcctgggcgccctgctgctgagccacaactgcctgagcgagctgcccgaggccctgggcgccctgcccgccctgaccttcctgaccgtgacccacaacagactgcagaccctgccccccgccctgggcgccctgagcaccctgcagagactggacctgagccagaacctgctggacaccctgccccccgagatcggcggcctgggcagcctgctggagctgaacctggccagcaacagactgcagagcctgcccgccagcctggccggcctgagaagcctgagactgctggtgctgcacagcaacctgctggccagcgtgcccgccgacctggccagactgcccctgctgaccagactggacctgagagacaaccagctgagagacctgccccccgagctgctggacgcccccttcgtgagactgcagggcaaccccctgggcgaggccagccccgacgcccccagcagccccgtggccgccctgatccccgagatgcccagactgttcctgaccagcgacctggacagcttccccgtgaccccccagggctgcagcgtgaccctggcctgcggcgtgagactgcagttccccgccggcgccaccgccacccccatcaccatcagatacagactgctgctgcccgagcccggcctggtgcccctgggcccccacgacgccctgctgagccacgtgctggagctgcagccccacggcgtggccttccagcaggacgtgggcctgtggctgctgttcacccccccccaggccagaagatgcagagaggtggtggtgagaaccagaaacgacaacagctggggcgacctggagacctacctggaggaggaggccccccagagactgtgggcccactgccaggtgccccacttcagctggttcctggtggtgagcagacccgtgagcaacgcctgcctggtgccccccgagggcaccctgctgtgcagcagcggccaccccggcgtgaaggtgatcttcccccccggcgccaccgaggagcccagaagagtgagcatgcaggtggtgagaatggccggcagagagctgcaggccctgctgggcgagcccgaggccgccgtgagccccctgctgtgcctgagccagagcggcccccccagcttcctgcagcccgtgaccgtgcagctgcccctgcccagcggcatcaccggcctgagcctggacagaagcagactgcacctgctgtactgggccccccccgccgccacctgggacgacatcaccgcccaggtggtgctggagctgacccacctgtacgccagattccaggtgacccacttcagctggtactggctgtggtacaccaccaagaactgcgtgggcggcctggccagaaaggcctgggagagactgagactgcacagagtgaacctgatcgccctgcagagaagaagagaccccgagcaggtgctgctgcagtgcctgcccagaaacaaggtggacgccaccctgagaagactgctggagagatacagaggccccgagcccagcgacaccgtggagatgttcgagggcgaggagttcttcgccgccttcgagagaggcatcgacgtggacgccgacagacccgactgcgtggagggcagaatctgcttcgtgttctacagccacctgaagaacgtgaaggaggtgtacgtgaccaccaccctggacagagaggcccaggccgtgagaggccaggtgagcttctacagaggcgccgtgcccgtgagagtgcccgaggaggccgaggccgccagacagagaaagggcgccgacgccctgtggatggccaccctgcccatcaagctgcccagactgagaggcagcgagggccccagaagaggcgccggcctgagcctggcccccctgaacctgggcgacgccgagaccggcttcctgacccagagcaacctgctgagcgtggccggcagactgggcctggactggcccgccgtggccctgcacctgggcgtgagctacagagaggtgcagagaatcagacacgagttcagagacgacctggacgagcagatcagacacatgctgttcagctgggccgagagacaggccggccagcccggcgccgtgggcctgctggtgcaggccctggagcagagcgacagacaggacgtggccgaggaggtgagagccgtgctggagctgggcagaagaaagtaccaggacagcatcagaagaatgggcctggcccccaaggaccccgccctgcccggcagcagcgccccccagccccccgagcccgcccaggcctag

SEQ ID NO: 10328 - DNA, 2961 bp, synthetic construct
  source 1..2961: mol_type = other DNA; note = Synthetic coding sequence
atgagccagtggacccccgagtacaacgagctgtacaccctgaaggtggacatgaagagcgagatccccagcgacgcccccaagacccaggagagcctgaagggcatcctgctgcaccccgagcccatcggcgccgccaagagcttccccgccggcgtggagatgatcaacagcaaggtgggcaacgagttcagccacctgtgcgacgacagccagaagcaggagaaggagatgaacggcaaccagcaggagcaggagaagagcctggtggtgagaaagaagagaaagagccagcaggccggccccagctacgtgcagaactgcgtgaaggagaaccagggcatcctgggcctgagacagcacctgggcacccccagcgacgaggacaacgacagcagcttcagcgactgcctgagcagccccagcagcagcctgcacttcggcgacagcgacaccgtgaccagcgacgaggacaaggaggtgagcgtgagacacagccagaccatcctgaacgccaagagcagaagccacagcgccagaagccacaagtggcccagaaccgagaccgagagcgtgagcggcctgctgatgaagagaccctgcctgcacggcagcagcctgagaagactgccctgcagaaagagattcgtgaagaacaacagcagccagagaacccagaagcagaaggagagaatcctgatgcagagaaagaagagagaggtgctggccagaagaaagtacgccctgctgcccagcagcagcagcagcagcgagaacgacctgagcagcgagagcagcagcagcagcagcaccgagggcgaggaggacctgttcgtgagcgccagcgagaaccaccagaacaaccccgccgtgcccagcggcagcatcgacgaggacgtggtggtgatcgaggccagcagcaccccccaggtgaccgccaacgaggagatcaacgtgaccagcaccgacagcgaggtggagatcgtgaccgtgggcgagagctacagaagcagaagcaccctgggccacagcagaagccactggagccagggcagcagcagccacgccagcagaccccaggagcccagaaacagaagcagaatcagcaccgtgatccagcccctgagacagaacgccgccgaggtggtggacctgaccgtggacgaggacgagcccaccgtggtgcccaccaccagcgccagaatggagagccaggccaccagcgccagcatcaacaacagcaaccccagcaccagcgagcaggccagcgacaccgccagcgccgtgaccagcagccagcccagcaccgtgagcgagaccagcgccaccctgaccagcaacagcaccaccggcaccagcatcggcgacgacagcagaagaaccaccagcagcgccgtgaccgagaccggcccccccgccatgcccagactgcccagctgctgcccccagcacagcccctgcggcggcagcagccagaaccaccacgccctgggccacccccacaccagctgcttccagcagcacggccaccacttccagcaccaccaccaccaccaccacaccccccaccccgccgtgcccgtgagccccagcttcagcgaccccgcctgccccgtggagagacccccccaggtgcaggccccctgcggcgccaacagcagcagcggcaccagctaccacgagcagcaggccctgcccgtggacctgagcaacagcggcatcagaagccacggcagcggcagcttccacggcgccagcgccttcgacccctgctgccccgtgagcagcagcagagccgccatcttcggccaccaggccgccgccgccgcccccagccagcccctgagcagcatcgacggctacggcagcagcatggtggcccagccccagccccagccccccccccagcccagcctgagcagctgcagacactacatgccccccccctacgccagcctgaccagacccctgcaccaccaggccagcgcctgcccccacagccacggcaacccccccccccagacccagccccccccccaggtggactacgtgatcccccaccccgtgcacgccttccacagccagatcagcagccacgccaccagccaccccgtggccccccccccccccacccacctggccagcaccgccgcccccatcccccagcacctgccccccacccaccagcccatcagccaccacatccccgccaccgccccccccgcccagagactgcacccccacgaggtgatgcagagaatggaggtgcagagaagaagaatgatgcagcaccccaccagagcccacgagagaccccccccccacccccacagaatgcaccccaactacggccacggccaccacatccacgtgccccagaccatgagcagccaccccagacaggcccccgagagaagcgcctgggagctgggcatcgaggccggcgtgaccgccgccacctacacccccggcgccctgcacccccacctggcccactaccacgccccccccagactgcaccacctgcagctgggcgccctgcccctgatggtgcccgacatggccggctacccccacatcagatacatcagcagcggcctggacggcaccagcttcagaggccccttcagaggcaacttcgaggagctgatccacctggaggagagactgggcaacgtgaacagaggcgccagccagggcaccatcgagagatgcacctacccccacaagtacaagaagagaaagctgcactgcaagcaggacggcgaggagggcaccgaggaggacaccgaggagaagtgcaccatctgcctgagcatcctggaggagggcgaggacgtgagaagactgccctgcatgcacctgttccaccaggtgtgcgtggaccagtggctgatcaccaacaagaagtgccccatctgcagagtggacatcgaggcccagctgcccagcgagagctag

SEQ ID NO: 10329 - DNA, 372 bp, synthetic construct
  source 1..372: mol_type = other DNA; note = Synthetic coding sequence
atggccaagatcaaggccagagacctgagaggcaagaagaaggaggagctgctgaagcagctggacgacctgaaggtggagctgagccagctgagagtggccaaggtgaccggcggcgccgccagcaagctgagcaagatcagagtggtgagaaagagcatcgccagagtgctgaccgtgatcaaccagacccagaaggagaacctgagaaagttctacaagggcaagaagtacaagcccctggacctgagacccaagaagaccagagccatgagaagaagactgaacaagcacgaggagaacctgaagaccaagaagcagcagagaaaggagagactgtaccccctgagaaagtacgccgtgaaggcctag

SEQ ID NO: 10330 - DNA, 1635 bp, synthetic construct
  source 1..1635: mol_type = other DNA; note = Synthetic coding sequence
atgaagatcttctgcagcagagccaaccccaccaccggcagcgtggagtggctggaggaggacgagcactacgactaccaccaggagatcgccagaagcagctacgccgacatgctgcacgacaaggacagaaacgtgaagtactaccagggcatcagagccgccgtgagcagagtgaaggacagaggccagaaggccctggtgctggacatcggcaccggcaccggcctgctgagcatgatggccgtgaccgccggcgccgacttctgctacgccatcgaggagaactgcgaggccgtgccccacagagccaccgtgtacgcccagctggtggagagcggcagaatgtggagctggaacaagctgttccccatccacgtgcagaccagcctgggcgagcaggtgatcgtgccccccgtggacgtggagagctgccccggcgcccccagcgtgtgcgacatccagctgaaccaggtgagccccgccgacttcaccgtgctgagcgacgtgctgcccatgttcagcatcgacttcagcaagcaggtgagcagcagcgccgcctgccacagcagaagattcgagcccctgaccagcggcagagcccaggtggtgctgagctggtgggacatcgagatggaccccgagggcaagatcaagtgcaccatggcccccttctgggcccacagcgaccccgaggagatgcagtggagagaccactggatgcagtgcgtgtacttcctgccccaggaggagcccgtggtgcagggcagcgccctgtacctggtggcccaccacgacgactactgcgtgtggtacagcctgcagagaaccagccccgagaagaacgagagagtgagacagatgagacccgtgtgcgactgccaggcccacctgctgtggaacagacccagattcggcgagatcaacgaccaggacagaaccgacagatacgtgcaggccctgagaaccgtgagcctgctgctgggcgagcccttcttcaccaccagcctgctgccctggcacaacctgtacttctggtacgtgagaaccgccgtggaccagcacctgggccccggcgccatggtgatgccccaggccgccagcctgcacgccgtggtggtggagttcagagacctgtggagaatcagaagcccctgcggcgactgcgagggcttcgacgtgcacatcatggacgacatgatcaagagagccctggacttcagagagagcagagaggccgagccccaccccctgtgggagtacccctgcagaagcctgagcgagccctggcagatcctgaccttcgacttccagcagcccgtgcccctgcagcccctgtgcgccgagggcaccgtggagctgagaagacccggccagagccacgccgccgtgctgtggatggagtaccacctgacccccgagtgcaccctgagcaccggcctgctggagcccgccgaccccgagggcggctgctgctggaacccccactgcaagcaggccgtgtacttcttcagccccgcccccgaccccagagccctgctgggcggccccagaaccgtgagctacgccgtggagttccaccccgacaccggcgacatcatcatggagttcagacacgccgacacccccgactag

SEQ ID NO: 10331 - DNA, 1131 bp, synthetic construct
  source 1..1131: mol_type = other DNA; note = Synthetic coding sequence
atgcccctgcaggtgagcgactacagctggcagcagaccaagaccgccgtgttcctgagcctgcccctgaagggcgtgtgcgtgagagacaccgacgtgttctgcaccgagaactacctgaaggtgaacttcccccccttcctgttcgaggccttcctgtacgcccccatcgacgacgagagcagcaaggccaagatcggcaacgacaccatcgtgttcaccctgtacaagaaggaggccgccatgtgggagaccctgagcgtgaccggcgtggacaaggagatgatgcagagaatcagagagaagagcatcctgcaggcccaggagagagccaaggaggccaccgaggccaaggccgccgccaagagagaggaccagaagtacgccctgagcgtgatgatgaagatcgaggaggaggagagaaagaagatcgaggacatgaaggagaacgagagaatcaaggccaccaaggccctggaggcctggaaggagtaccagagaaaggccgaggagcagaagaagatccagagagaggagaagctgtgccagaaggagaagcagatcaaggaggagagaaagaagatcaagtacaagagcctgaccagaaacctggccagcagaaacctggcccccaagggcagaaacagcgagaacatcttcaccgagaagctgaaggaggacagcatccccgcccccagaagcgtgggcagcatcaagatcaacttcacccccagagtgttccccaccgccctgagagagagccaggtggccgaggaggaggagtggctgcacaagcaggccgaggccagaagagccatgaacaccgacatcgccgagctgtgcgacctgaaggaggaggagaagaaccccgagtggctgaaggacaagggcaacaagctgttcgccaccgagaactacctggccgccatcaacgcctacaacctggccatcagactgaacaacaagatgcccctgctgtacctgaacagagccgcctgccacctgaagctgaagaacctgcacaaggccatcgaggacagcagcaaggcctacagaatcatgaagagacacctgagactgatccaccccaccaagctgtacaagctgatgctgagaagattcggcatgtag

SEQ ID NO: 10332 - DNA, 4221 bp, synthetic construct
  source 1..4221: mol_type = other DNA; note = Synthetic coding sequence
atgtggagcctgaccgccagcgagggcgagagcaccaccgcccacttcttcctgggcgccggcgacgagggcctgggcaccagaggcatcggcatgagacccgaggagagcgacagcgagctgctggaggacgaggaggacgaggtgccccccgagccccagatcatcgtgggcatctgcgccatgaccaagaagagcaagagcaagcccatgacccagatcctggagagactgtgcagattcgactacctgaccgtggtgatcctgggcgaggacgtgatcctgaacgagcccgtggagaactggcccagctgccactgcctgatcagcttccacagcaagggcttccccctggacaaggccgtggcctacagcaagctgagaaaccccttcctgatcaacgacctggccatgcagtactacatccaggacagaagagaggtgtacagaatcctgcaggaggagggcatcgacctgcccagatacgccgtgctgaacagagaccccgccagacccgaggagtgcaacctgatcgagggcgaggaccaggtggaggtgaacggcgccgtgttccccaagcccttcgtggagaagcccgtgagcgccgaggaccacaacgtgtacatctactaccccagcagcgccggcggcggcagccagagactgttcagaaagatcggcagcagaagcagcgtgtacagccccgagagcagcgtgagaaagaccggcagctacatctacgaggagttcatgcccaccgacggcaccgacgtgaaggtgtacaccgtgggccccgactacgcccacgccgaggccagaaagagccccgccctggacggcaaggtggagagagacagcgagggcaaggagatcagataccccgtgatgctgaccgccatggagaagctggtggccagaaaggtgtgcgtggccttcaagcagaccgtgtgcggcttcgacctgctgagagccaacggccacagcttcgtgtgcgacgtgaacggcttcagcttcgtgaagaacagcatgaagtactacgacgactgcgccaagatcctgggcaacaccatcatgagagagctggccccccagttccagatcccctggagcatccccaccgaggccgaggacatccccatcgtgcccaccaccagcggcaccatgatggagctgagatgcgtgatcgccatcatcagacacggcgacagaacccccaagcagaagatgaagatggaggtgaagcaccccagattcttcgccctgttcgagaagcacggcggctacaagaccggcaagctgaagctgaagagacccgagcagctgcaggaggtgctggacatcaccagactgctgctggccgagctggagaaggagcccggcggcgagatcgaggagaagaccggcaagctggagcagctgaagagcgtgctggagatgtacggccacttcagcggcatcaacagaaaggtgcagctgacctactacccccacggcgtgaaggccagcaacgagggccaggacccccagagagagaccctggcccccagcctgctgctggtgctgaagtggggcggcgagctgacccccgccggcagagtgcaggccgaggagctgggcagagccttcagatgcatgtaccccggcggccagggcgactacgccggcttccccggctgcggcctgctgagactgcacagcaccttcagacacgacctgaagatctacgccagcgacgagggcagagtgcagatgaccgccgccgccttcgccaagggcctgctggccctggagggcgagctgacccccatcctggtgcagatggtgaagagcgccaacatgaacggcctgctggacagcgacggcgacagcctgagcagctgccagcacagagtgaaggccagactgcaccacatcctgcagcaggacgcccccttcggccccgaggactacgaccagctggcccccaccagaagcaccagcctgctgaacagcatgaccatcatccagaaccccgtgaaggtgtgcgaccaggtgttcgccctgatcgagaacctgacccaccagatcagagagagaatgcaggaccccagaagcgtggacctgcagctgtaccacagcgagaccctggagctgatgctgcagagatggagcaagctggagagagacttcagacagaagagcggcagatacgacatcagcaagatccccgacatctacgactgcgtgaagtacgacgtgcagcacaacggcagcctgggcctgcagggcaccgccgagctgctgagactgagcaaggccctggccgacgtggtgatcccccaggagtacggcatcagcagagaggagaagctggagatcgccgtgggcttctgcctgcccctgctgagaaagatcctgctggacctgcagagaacccacgaggacgagagcgtgaacaagctgcaccccctgtacagcagaggcgtgctgagccccggcagacacgtgagaaccagactgtacttcaccagcgagagccacgtgcacagcctgctgagcgtgttcagatacggcggcctgctggacgagacccaggacgcccagtggcagagagccctggactacctgagcgccatcagcgagctgaactacatgacccagatcgtgatcatgctgtacgaggacaacacccaggaccccctgagcgaggagagattccacgtggagctgcacttcagccccggcgtgaagggcgtggaggaggagggcagcgcccccgccggctgcggcttcagacccgccagcagcgagaacgaggagatgaagaccaaccagggcagcatggagaacctgtgccccggcaaggccagcgacgagcccgacagagccctgcagaccagcccccagccccccgagggccccggcctgcccagaagaagccccctgatcagaaacagaaaggccggcagcatggaggtgctgagcgagaccagcagcagcagacccggcggctacagactgttcagcagcagcagaccccccaccgagatgaagcagagcggcctgggcttcgagggctgcagcatggtgcccaccatctaccccctggagaccctgcacaacgccctgagcctgagacaggtgagcgagttcctgagcagagtgtgccagagacacaccgacgcccaggcccaggccagcgccgccctgttcgacagcatgcacagcagccaggccagcgacaaccccttcagcccccccagaaccctgcacagcccccccctgcagctgcagcagagaagcgagaagcccccctggctggagaccagattctgccacgtgggccaggccggcctggagctgctgaccagcagcgacctgcccgccagcgccagccagagcgccggcatcaccggcgtgagccacagaacccagcccgacagcagcggccccagcagcaccgtgagcagcgccggccccagcagccccaccaccgtggacggcaacagccagttcggcttcagcgaccagcccagcctgaacagccacgtggccgaggagcaccagggcctgggcctgctgcaggagacccccggcagcggcgcccaggagctgagcatcgagggcgagcaggagctgttcgagcccaaccagagcccccaggtgccccccatggagaccagccagccctacgaggaggtgagccagccctgccaggaggtgcccgacatcagccagccctgccaggacatcagcgaggccctgagccagccctgccagaaggtgcccgacatcagccagcagtgccaggagaaccacgacaacggcaaccacacctgccaggaggtgccccacatcagccagccctgccagaagagcagccagctgtgccagaaggtgagcgaggaggtgtgccagctgtgcctggagaacagcgaggaggtgagccagccctgccagggcgtgagcgtggaggtgggcaagctggtgcacaagttccacgtgggcgtgggcagcctggtgcaggagaccctggtggaggtgggcagccccgccgaggagatccccgaggaggtgatccagccctaccaggagttcagcgtggaggtgggcagactggcccaggagaccagcgccatcaacctgctgagccagggcatccccgagatcgacaagcccagccaggagttccccgaggagatcgacctgcaggcccaggaggtgcccgaggagatcaactag

SEQ ID NO: 10333 - DNA, 1338 bp, synthetic construct
  source 1..1338: mol_type = other DNA; note = Synthetic coding sequence
atggtgctggagggcaaccccgaggtgggcagccccagaaccagcgacctgcagcacagaggcaacaagggcagctgcgtgctgagcagccccggcgaggacgcccagcccggcgaggagcccatcaagtacggcgagctgatcgtgctgggctacaacggctgcctggccagcggcgacaagggcagaagaagaagcagactggccctgagcagaagaagccacgccaacggcgtgaagcccgacgtgatgcaccacatcagcacccccctggtgagcaaggccctgagcaacagaggccagcacagcatcagctacaccctgagcagaagccacagcgtgatcgtggagtacacccacgacagcgacaccgacatgttccagatcggcagaagcaccgagaacatgatcgacttcgtggtgaccgacaccagccccggcggcggcgccgccgagggccccagcgcccagagcaccatcagcagatacgcctgcagaatcctgtgcgacagaagacccccctacaccgccagaatctacgccgccggcttcgacgccagcagcaacatcttcctgggcgagagagccgccaagtggagaacccccgacggcctgatggacggcctgaccaccaacggcgtgctggtgatgcaccccgccggcggcttcagcgaggacagcgcccccggcgtgtggagagagatcagcgtgtgcggcaacgtgtacaccctgagagacagcagaagcgcccagcagagaggcaagctggtggagaacgagagcaacgtgctgcaggacggcagcctgatcgacctgtgcggcgccaccctgctgtggagaacccccgccggcctgctgagagcccccaccctgaagcagctggaggcccagagacaggaggccaacgccgccagaccccagtgccccgtgggcctgagcaccctggccttccccagccccgccagaggcagaaccgcccccgacaagcagcagccctgggtgtacgtgagatgcggccacgtgcacggctaccacggctggggctgcagaagagagagaggcccccaggagagagagtgccccctgtgcagactggtgggcccctacgtgcccctgtggctgggccaggaggccggcctgtgcctggaccccggcccccccagccacgccttcgccccctgcggccacgtgtgcagcgagaagaccgccagatactgggcccagacccccctgccccacggcacccacgccttccacgccgcctgccccttctgcggcgcctggctgaccggcgagcacggctgcgtgagactgatcttccagggccccctggactag

SEQ ID NO: 10334 - DNA, 1950 bp, synthetic construct
  source 1..1950: mol_type = other DNA; note = Synthetic coding sequence
atgggcaccgccctggtgtaccacgaggacatgaccgccaccagactgctgtgggacgaccccgagtgcgagatcgagagacccgagagactgaccgccgccctggacagactgagacagagaggcctggagcagagatgcctgagactgagcgccagagaggccagcgaggaggagctgggcctggtgcacagccccgagtacgtgagcctggtgagagagacccaggtgctgggcaaggaggagctgcaggccctgagcggccagttcgacgccatctacttccaccccagcaccttccactgcgccagactggccgccggcgccggcctgcagctggtggacgccgtgctgaccggcgccgtgcagaacggcctggccctggtgagaccccccggccaccacggccagagagccgccgccaacggcttctgcgtgttcaacaacgtggccatcgccgccgcccacgccaagcagaagcacggcctgcacagaatcctggtggtggactgggacgtgcaccacggccagggcatccagtacctgttcgaggacgaccccagcgtgctgtacttcagctggcacagatacgagcacggcagattctggcccttcctgagagagagcgacgccgacgccgtgggcagaggccagggcctgggcttcaccgtgaacctgccctggaaccaggtgggcatgggcaacgccgactacgtggccgccttcctgcacctgctgctgcccctggccttcgagggccagatgcaggccacccccgagtgcttcgcccacctgacccagctgctgcaggtgctggccggcggcagagtgtgcgccgtgctggagggcggctaccacctggagagcctggccgagagcgtgtgcatgaccgtgcagaccctgctgggcgaccccgccccccccctgagcggccccatggccccctgccagagcgccctggagagcatccagagcgccagagccgcccaggccccccactggaagagcctgcagcagcaggacgtgaccgccgtgcccatgagccccagcagccacagccccgagggcagacccccccccctgctgcccggcggccccgtgtgcaaggccgccgccagcgcccccagcagcctgctggaccagccctgcctgtgccccgcccccagcgtgagaaccgccgtggccctgaccacccccgacatcaccctggtgctgccccccgacgtgatccagcaggaggccagcgccctgagagaggagaccgaggcctgggccagaccccacgagagcctggccagagaggaggccctgaccgccctgggcaagctgctgtacctgctggacggcatgctggacggccaggtgaacagcggcatcgccgccacccccgccagcgccgccgccgccaccctggacgtggccgtgagaagaggcctgagccacggcgcccagagactgctgtgcgtggccctgggccagctggacagaccccccgacctggcccacgacggcagaagcctgtggctgaacatcagaggcaaggaggccgccgccctgagcatgttccacgtgagcacccccctgcccgtgatgaccggcggcttcctgagctgcatcctgggcctggtgctgcccctggcctacggcttccagcccgacctggtgctggtggccctgggccccggccacggcctgcagggcccccacgccgccctgctggccgccatgctgagaggcctggccggcggcagagtgctggccctgctggaggagaacagcaccccccagctggccggcatcctggccagagtgctgaacggcgaggccccccccagcctgggccccagcagcgtggccagccccgaggacgtgcaggccctgatgtacctgagaggccagctggagccccagtggaagatgctgcagtgccacccccacctggtggcctag

SEQ ID NO: 10335 - DNA, 795 bp, synthetic construct
  source 1..795: mol_type = other DNA; note = Synthetic coding sequence
atggccggcgagcagaagcccagcagcaacctgctggagcagttcatcctgctggccaagggcaccagcggcagcgccctgaccgccctgatcagccaggtgctggaggcccccggcgtgtacgtgttcggcgagctgctggagctggccaacgtgcaggagctggccgagggcgccaacgccgcctacctgcagctgctgaacctgttcgcctacggcacctaccccgactacatcgccaacaaggagagcctgcccgagctgagcaccgcccagcagaacaagctgaagcacctgaccatcgtgagcctggccagcagaatgaagtgcatcccctacagcgtgctgctgaaggacctggagatgagaaacctgagagagctggaggacctgatcatcgaggccgtgtacaccgacatcatccagggcaagctggaccagagaaaccagctgctggaggtggacttctgcatcggcagagacatcagaaagaaggacatcaacaacatcgtgaagaccctgcacgagtggtgcgacggctgcgaggccgtgctgctgggcatcgagcagcaggtgctgagagccaaccagtacaaggagaaccacaacagaacccagcagcaggtggaggccgaggtgaccaacatcaagaagaccctgaaggccaccgccagcagcagcgcccaggagatggagcagcagctggccgagagagagtgccccccccacgccgagcagagacagcccaccaagaagatgagcaaggtgaagggcctggtgagcagcagacactag

SEQ ID NO: 10336 - DNA, 726 bp, synthetic construct
  source 1..726: mol_type = other DNA; note = Synthetic coding sequence
atgagcgccagcctgaactacaagagcttcagcaaggagcagcagaccatggacaacctggagaagcagctgatctgccccatctgcctggagatgttcaccaagcccgtggtgatcctgccctgccagcacaacctgtgcagaaagtgcgccagcgacatcttccaggccagcaacccctacctgcccaccagaggcggcaccaccatggccagcggcggcagattcagatgccccagctgcagacacgaggtggtgctggacagacacggcgtgtacggcctgcagagaaacctgctggtggagaacatcatcgacatctacaagcaggagagcaccagacccgagaagaagagcgaccagcccatgtgcgaggagcacgaggaggagagaatcaacatctactgcctgaactgcgaggtgcccacctgcagcctgtgcaaggtgttcggcgcccacaaggactgccaggtggcccccctgacccacgtgttccagagacagaagagcgagctgagcgacggcatcgccatcctggtgggcagcaacgacagagtgcagggcgtgatcagccagctggaggacacctgcaagaccatcgagatcggcttcgaggccccccccctgcagggccaggccgccgcccccgccagcggcagcggcgccgacagcgagcccgccagacacatcttcagcttcagctggctgaacagcctgaacgagtag

SEQ ID NO: 10337 - DNA, 3501 bp, synthetic construct
  source 1..3501: mol_type = other DNA; note = Synthetic coding sequence
atggccaacgacagccccgccaagagcctggtggacatcgacctgagcagcctgagagaccccgccggcatcttcgagctggtggaggtggtgggcaacggcacctacggccaggtgtacaagggcagacacgtgaagaccggccagctggccgccatcaaggtgatggacgtgaccgaggacgaggaggaggagatcaagctggagatcaacatgctgaagaagtacagccaccacagaaacatcgccacctactacggcgccttcatcaagaagagcccccccggccacgacgaccagctgtggctggtgatggagttctgcggcgccggcagcatcaccgacctggtgaagaacaccaagggcaacaccctgaaggaggactggatcgcctacatcagcagagagatcctgagaggcctggcccacctgcacatccaccacgtgatccacagagacatcaagggccagaacgtgctgctgaccgagaacgccgaggtgaagctggtggacttcggcgtgagcgcccagctggacagaaccgtgggcagaagaaacaccttcatcggcaccccctactggatggcccccgaggtgatcgcctgcgacgagaaccccgacgccacctacgactacagaagcgacctgtggagctgcggcatcaccgccatcgagatggccgagggcgccccccccctgtgcgacatgcaccccatgagagccctgttcctgatccccagaaaccccccccccagactgaagagcaagaagtggagcaagaagttcttcagcttcatcgagggctgcctggtgaagaactacatgcagagacccagcaccgagcagctgctgaagcaccccttcatcagagaccagcccaacgagagacaggtgagaatccagctgaaggaccacatcgacagaaccagaaagaagagaggcgagaaggacgagaccgagtacgagtacagcggcagcgaggaggaggaggaggaggtgcccgagcaggagggcgagcccagcagcatcgtgaacgtgcccggcgagagcaccctgagaagagacttcctgagactgcagcaggagaacaaggagagaagcgaggccctgagaagacagcagctgctgcaggagcagcagctgagagagcaggaggagtacaagagacagctgctggccgagagacagaagagaatcgagcagcagaaggagcagagaagaagactggaggagcagcagagaagagagagagaggccagaagacagcaggagagagagcagagaagaagagagcaggaggagaagagaagactggaggagctggagagaagaagaaaggaggaggaggagagaagaagagccgaggaggagaagagaagagtggagagagagcaggagtacatcagaagacagctggaggaggagcagagacacctggaggtgctgcagcagcagctgctgcaggagcaggccatgctgctgcacgaccacagaagaccccacccccagcacagccagcagcccccccccccccagcaggagagaagcaagcccagcttccacgcccccgagcccaaggcccactacgagcccgccgacagagccagagaggtgcccgtgagaaccaccagcagaagccccgtgctgagcagaagagacagccccctgcagggcagcggccagcagaacagccaggccggccagagaaacagcaccagcagcatcgagcccagactgctgtgggagagagtggagaagctggtgcccagacccggcagcggcagcagcagcggcagcagcaacagcggcagccagcccggcagccaccccggcagccagagcggcagcggcgagagattcagagtgagaagcagcagcaagagcgagggcagccccagccagagactggagaacgccgtgaagaagcccgaggacaagaaggaggtgttcagacccctgaagcccgccgtgagaatcgacctgaccgccctggccaaggagctgagagccgtggaggacgtgagacccccccacaaggtgaccgactacagcagcagcagcgaggagagcggcaccaccgacgaggaggacgacgacgtggagcaggagggcgccgacgagagcaccagcggccccgaggacaccagagccgccagcagcctgaacctgagcaacggcgagaccgagagcgtgaagaccatgatcgtgcacgacgacgtggagagcgagcccgccatgacccccagcaaggagggcaccctgatcgtgagacagacccagagcgccagcagcaccctgcagaagcacaagagcagcagcagcttcacccccttcatcgaccccagactgctgcagatcagccccagcagcggcaccaccgtgaccagcgtggtgggcttcagctgcgacggcatgagacccgaggccatcagacaggaccccaccagaaagggcagcgtggtgaacgtgaaccccaccaacaccagaccccagagcgacacccccgagatcagaaagtacaagaagagattcaacagcgagatcctgtgcgccgccctgtggggcgtgaacctgctggtgggcaccgagagcggcctgatgctgctggacagaagcggccagggcaaggtgtaccccctgatcaacagaagaagattccagcagatggacgtgctggagggcctgaacgtgctggtgaccatcagcggcaagaaggacaagctgagagtgtactacctgagctggctgagaaacaagatcctgcacaacgaccccgaggtggagaagaagcagggctggaccaccgtgggcgacctggagggctgcgtgcactacaaggtggtgaagtacgagagaatcaagttcctggtgatcgccctgaagagcagcgtggaggtgtacgcctgggcccccaagccctaccacaagttcatggccttcaagagcttcggcgagctggtgcacaagcccctgctggtggacctgaccgtggaggagggccagagactgaaggtgatctacggcagctgcgccggcttccacgccgtggacgtggacagcggcagcgtgtacgacatctacctgcccacccacgtgagaaagaacccccacagcatgatccagtgcagcatcaagccccacgccatcatcatcctgcccaacaccgacggcatggagctgctggtgtgctacgaggacgagggcgtgtacgtgaacacctacggcagaatcaccaaggacgtggtgctgcagtggggcgagatgcccaccagcgtggcctacatcagaagcaaccagaccatgggctggggcgagaaggccatcgagatcagaagcgtggagaccggccacctggacggcgtgttcatgcacaagagagcccagagactgaagttcctgtgcgagagaaacgacaaggtgttcttcgccagcgtgagaagcggcggcagcagccaggtgtacttcatgaccctgggcagaaccagcctgctgagctggtag

SEQ ID NO: 10338 - DNA, 2466 bp, synthetic construct
  source 1..2466: mol_type = other DNA; note = Synthetic coding sequence
atggtggcccccgtgctggagaccagccacgtgttctgctgccccaacagagtgagaggcgtgctgaactggagcagcggccccagaggcctgctggccttcggcaccagctgcagcgtggtgctgtacgaccccctgaagagagtggtggtgaccaacctgaacggccacaccgccagagtgaactgcatccagtggatctgcaagcaggacggcagccccagcaccgagctggtgagcggcggcagcgacaaccaggtgatccactgggagatcgaggacaaccagctgctgaaggccgtgcacctgcagggccacgagggccccgtgtacgccgtgcacgccgtgtaccagagaagaaccagcgaccccgccctgtgcaccctgatcgtgagcgccgccgccgacagcgccgtgagactgtggagcaagaagggccccgaggtgacctggaagaccggccaggtggagagaggcagagcctggaagccccccgccagcctggccctgtgcagcagaagctgcgacagcatggtgagctgctacgccagcatcctgtgcaaggccctgtggaaggagaagctgcacaccttctggcaccacaacagaatcagcttcctgcccagcgccttcagacccatccccatcctggcctgcggcaacgacgactgcagaatccacatcttcgcccagcagaacgaccagttccagaaggtgctgagcctgtgcggccacgaggactggatcagaggcgtggagtgggccgccttcggcagagacctgttcctggccagctgcagccaggactgcctgatcagaatctggaagctgtacatcaagagcaccagcctggagacccaggacgacgacaacatcagactgaaggagaacaccttcaccatcgagaacgagagcgtgaagatcgccttcgccgtgaccctggagaccgtgctggccggccacgagaactgggtgaacgccgtgcactggcagcccgtgttctacaaggacggcgtgctgcagcagcccgtgagactgctgagcgccagcatggacaagaccatgatcctgtgggcccccgacgaggagagcggcgtgtggctggagcagagagagtggacccccgagatcgtgatcagcggccacttcgacggcgtgcaggacctggtgtgggaccccgagggcgagttcatcatcaccgtgggcaccgaccagaccaccagactgttcgccccctggaagagaaaggaccagagccaggtgacctggcacgagatcgccagaccccagatccacggctacgacctgaagtgcctggccatgatcaacagattccagttcgtgagcggcgccgacgagaaggtgctgagagtgttcagcgcccccagaaacttcgtggagaacttctgcgccatcaccggccagagcctgaaccacgtgctgtgcaaccaggacagcgacctgcccgagggcgccaccgtgcccgccctgggcctgagcaacaaggccgtgttccagggcgacatcgccagccagcccagcgacgaggaggagctgctgaccagcaccggcttcgagtaccagcaggtggccttccagcccagcatcctgaccgagccccccaccgaggaccacctgctgcagaacaccctgtggcccgaggtgcagaagctgtacggccacggctacgagatcttctgcgtgacctgcaacagcagcaagaccctgctggccagcgcctgcaaggccgccaagaaggagcacgccgccatcatcctgtggaacaccaccagctggaagcaggtgcagaacctggtgttccacagcctgaccgtgacccagatggccttcagccccaacgagaagttcctgctggccgtgagcagagacagaacctggagcctgtggaagaagcaggacaccatcagccccgagttcgagcccgtgttcagcctgttcgccttcaccaacaagatcaccagcgtgcacagcagaatcatctggagctgcgactggagccccgacagcaagtacttcttcaccggcagcagagacaagaaggtggtggtgtggggcgagtgcgacagcaccgacgactgcatcgagcacaacatcggcccctgcagcagcgtgctggacgtgggcggcgccgtgaccgccgtgagcgtgtgccccgtgctgcaccccagccagagatacgtggtggccgtgggcctggagtgcggcaagatctgcctgtacacctggaagaagaccgaccaggtgcccgagatcaacgactggacccactgcgtggagaccagccagagccagagccacaccctggccatcagaaagctgtgctggaagaactgcagcggcaagaccgagcagaaggaggccgagggcgccgagtggctgcacttcgccagctgcggcgaggaccacaccgtgaagatccacagagtgaacaagtgcgccctgtag

SEQ ID NO: 10339 - DNA, 969 bp, synthetic construct
  source 1..969: mol_type = other DNA; note = Synthetic coding sequence
atggtgagcgtgatcaacaccgtggacaccagccacgaggacatgatccacgacgcccagatggactactacggcaccagactggccacctgcagcagcgacagaagcgtgaagatcttcgacgtgagaaacggcggccagatcctgatcgccgacctgagaggccacgagggccccgtgtggcaggtggcctgggcccaccccatgtacggcaacatcctggccagctgcagctacgacagaaaggtgatcatctggagagaggagaacggcacctgggagaagagccacgagcacgccggccacgacagcagcgtgaacagcgtgtgctgggccccccacgactacggcctgatcctggcctgcggcagcagcgacggcgccatcagcctgctgacctacaccggcgagggccagtgggaggtgaagaagatcaacaacgcccacaccatcggctgcaacgccgtgagctgggcccccgccgtggtgcccggcagcctgatcgaccaccccagcggccagaagcccaactacatcaagagattcgccagcggcggctgcgacaacctgatcaagctgtggaaggaggaggaggacggccagtggaaggaggagcagaagctggaggcccacagcgactgggtgagagacgtggcctgggcccccagcatcggcctgcccaccagcaccatcgccagctgcagccaggacggcagagtgttcatctggacctgcgacgacgccagcagcaacacctggagccccaagctgctgcacaagttcaacgacgtggtgtggcacgtgagctggagcatcaccgccaacatcctggccgtgagcggcggcgacaacaaggtgaccctgtggaaggagagcgtggacggccagtgggtgtgcatcagcgacgtgaacaagggccagggcagcgtgagcgccagcgtgaccgagggccagcagaacgagcagtag

SEQ ID NO: 10340 - DNA, 1347 bp, synthetic construct
  source 1..1347: mol_type = other DNA; note = Synthetic coding sequence
atgagcagcagaaagctgagcggccccaagggcagaagactgagcatccacgtggtgacctggaacgtggccagcgccgccccccccctggacctgagcgacctgctgcagctgaacaacagaaacctgaacctggacatctacgtgatcggcctgcaggagctgaacagcggcatcatcagcctgctgagcgacgccgccttcaacgacagctggagcagcttcctgatggacgtgctgagccccctgagcttcatcaaggtgagccacgtgagaatgcagggcatcctgctgctggtgttcgccaagtaccagcacctgccctacatccagatcctgagcaccaagagcacccccaccggcctgttcggctactggggcaacaagggcggcgtgaacatctgcctgaagctgtacggctactacgtgagcatcatcaactgccacctgcccccccacatcagcaacaactaccagagactggagcacttcgacagaatcctggagatgcagaactgcgagggcagagacatccccaacatcctggaccacgacctgatcatctggttcggcgacatgaacttcagaatcgaggacttcggcctgcacttcgtgagagagagcatcaagaacagatgctacggcggcctgtgggagaaggaccagctgagcatcgccaagaagcacgaccccctgctgagagagttccaggagggcagactgctgttcccccccacctacaagttcgacagaaacagcaacgactacgacaccagcgagaagaagagaaagcccgcctggaccgacagaatcctgtggagactgaagagacagccctgcgccggccccgacacccccatcccccccgccagccacttcagcctgagcctgagaggctacagcagccacatgacctacggcatcagcgaccacaagcccgtgagcggcaccttcgacctggagctgaagcccctggtgagcgcccccctgatcgtgctgatgcccgaggacctgtggaccgtggagaacgacatgatggtgagctacagcagcaccagcgacttccccagcagcccctgggactggatcggcctgtacaaggtgggcctgagagacgtgaacgactacgtgagctacgcctgggtgggcgacagcaaggtgagctgcagcgacaacctgaaccaggtgtacatcgacatcagcaacatccccaccaccgaggacgagttcctgctgtgctactacagcaacagcctgagaagcgtggtgggcatcagcagacccttccagatcccccccggcagcctgagagaggaccccctgggcgaggcccagccccagatctag

SEQ ID NO: 10341 - DNA, 1641 bp, synthetic construct; identical to SEQ ID NO: 10279
  source 1..1641: mol_type = other DNA; note = Synthetic coding sequence

SEQ ID NO: 10342 - DNA, 3840 bp, synthetic construct
  source 1..3840: mol_type = other DNA; note = Synthetic coding sequence
atgctgcaggccctgcagctgagaaccggcttcttctgcttcagagtgctggtggccctgagcccctgcgccctgcacgacagcggcagactgaccaccggcagcttcaacgtggtgagagacgaggaggaggagatcaagctggagatcaacatgctgaagaagtacagccaccacagaaacatcgccacctactacggcgccttcatcaagaagagcccccccggccacgacgaccagctgtggctggtgatggagttctgcggcgccggcagcatcaccgacctggtgaagaacaccaagggcaacaccctgaaggaggactggatcgcctacatcagcagagagatcctgagaggcctggcccacctgcacatccaccacgtgatccacagagacatcaagggccagaacgtgctgctgaccgagaacgccgaggtgaagctggtggacttcggcgtgagcgcccagctggacagaaccgtgggcagaagaaacaccttcatcggcaccccctactggatggcccccgaggtgatcgcctgcgacgagaaccccgacgccacctacgactacagaagcgacctgtggagctgcggcatcaccgccatcgagatggccgagggcgccccccccctgtgcgacatgcaccccatgagagccctgttcctgatccccagaaaccccccccccagactgaagagcaagaagtggagcaagaagttcttcagcttcatcgagggctgcctggtgaagaactacatgcagagacccagcaccgagcagctgctgaagcaccccttcatcagagaccagcccaacgagagacaggtgagaatccagctgaaggaccacatcgacagaaccagaaagaagagaggcgagaaggacgagaccgagtacgagtacagcggcagcgaggaggaggaggaggaggtgcccgagcaggagggcgagcccagcagcatcgtgaacgtgcccggcgagagcaccctgagaagagacttcctgagactgcagcaggagaacaaggagagaagcgaggccctgagaagacagcagctgctgcaggagcagcagctgagagagcaggaggagtacaagagacagctgctggccgagagacagaagagaatcgagcagcagaaggagcagagaagaagactggaggagcagcagagaagagagagagaggccagaagacagcaggagagagagcagagaagaagagagcaggaggagaagagaagactggaggagctggagagaagaagaaaggaggaggaggagagaagaagagccgaggaggagaagagaagagtggagagagagcaggagtacatcagaagacagctggaggaggagcagagacacctggaggtgctgcagcagcagctgctgcaggagcaggccatgctgctgcacgaccacagaagaccccacccccagcacagccagcagcccccccccccccagcaggagagaagcaagcccagcttccacgcccccgagcccaaggcccactacgagcccgccgacagagccagagaggtgcagtggagccacctggccagcctgaagaacaacgtgagccccgtgagcagaagccacagcttcagcgaccccagccccaagttcgcccaccaccacctgagaagccaggacccctgcccccccagcagaagcgaggtgctgagccagagcagcgacagcaagagcgaggcccccgaccccacccagaaggcctggagcagaagcgacagcgacgaggtgccccccagagtgcccgtgagaaccaccagcagaagccccgtgctgagcagaagagacagccccctgcagggcagcggccagcagaacagccaggccggccagagaaacagcaccagcagcatcgagcccagactgctgtgggagagagtggagaagctggtgcccagacccggcagcggcagcagcagcggcagcagcaacagcggcagccagcccggcagccaccccggcagccagagcggcagcggcgagagattcagagtgagaagcagcagcaagagcgagggcagccccagccagagactggagaacgccgtgaagaagcccgaggacaagaaggaggtgttcagacccctgaagcccgccgtgagaatcgacctgaccgccctggccaaggagctgagagccgtggaggacgtgagacccccccacaaggtgaccgactacagcagcagcagcgaggagagcggcaccaccgacgaggaggacgacgacgtggagcaggagggcgccgacgagagcaccagcggccccgaggacaccagagccgccagcagcctgaacctgagcaacggcgagaccgagagcgtgaagaccatgatcgtgcacgacgacgtggagagcgagcccgccatgacccccagcaaggagggcaccctgatcgtgagacagagcaccgtggaccagaagagagccagccaccacgagagcaacggcttcgccggcagaatccacctgctgcccgacctgctgcagcagagccacagcagcagcaccagcagcaccagcagcagccccagcagcagccagcccacccccaccatgagcccccagaccccccaggacaagctgaccgccaacgagacccagagcgccagcagcaccctgcagaagcacaagagcagcagcagcttcacccccttcatcgaccccagactgctgcagatcagccccagcagcggcaccaccgtgaccagcgtggtgggcttcagctgcgacggcatgagacccgaggccatcagacaggaccccaccagaaagggcagcgtggtgaacgtgaaccccaccaacaccagaccccagagcgacacccccgagatcagaaagtacaagaagagattcaacagcgagatcctgtgcgccgccctgtggggcgtgaacctgctggtgggcaccgagagcggcctgatgctgctggacagaagcggccagggcaaggtgtaccccctgatcaacagaagaagattccagcagatggacgtgctggagggcctgaacgtgctggtgaccatcagcggcaagaaggacaagctgagagtgtactacctgagctggctgagaaacaagatcctgcacaacgaccccgaggtggagaagaagcagggctggaccaccgtgggcgacctggagggctgcgtgcactacaaggtggtgaagtacgagagaatcaagttcctggtgatcgccctgaagagcagcgtggaggtgtacgcctgggcccccaagccctaccacaagttcatggccttcaagagcttcggcgagctggtgcacaagcccctgctggtggacctgaccgtggaggagggccagagactgaaggtgatctacggcagctgcgccggcttccacgccgtggacgtggacagcggcagcgtgtacgacatctacctgcccacccacatccagtgcagcatcaagccccacgccatcatcatcctgcccaacaccgacggcatggagctgctggtgtgctacgaggacgagggcgtgtacgtgaacacctacggcagaatcaccaaggacgtggtgctgcagtggggcgagatgcccaccagcgtggcctacatcagaagcaaccagaccatgggctggggcgagaaggccatcgagatcagaagcgtggagaccggccacctggacggcgtgttcatgcacaagagagcccagagactgaagttcctgtgcgagagaaacgacaaggtgttcttcgccagcgtgagaagcggcggcagcagccaggtgtacttcatgaccctgggcagaaccagcctgctgagctggtag

SEQ ID NO: 10343 - DNA, 1989 bp, synthetic construct
  source 1..1989: mol_type = other DNA; note = Synthetic coding sequence
atggccagctgccccgacagcgacaacagctgggtgctggccggcagcgagagcctgcccgtggagaccctgggccccgccagcagaatggaccccgagagcgagagagccctgcaggccccccacagccccagcaagaccgacggcaaggagctggccggcaccatggacggcgagggcaccctgttccagaccgagagcccccagagcggcagcatcctgaccgaggagaccgaggtgaagggcaccctggagggcgacgtgtgcggcgtggagccccccggccccggcgacaccgtggtgcagggcgacctgcaggagaccaccgtggtgaccggcctgggccccgacacccaggacctggagggccagagccccccccagagcctgcccagcacccccaaggccgcctggatcagagaggagggcagatgcagcagcagcgacgacgacaccgacgtggacatggagggcctgagaagaagaagaggcagagaggccggccccccccagcccatggtgcccctggccgtggagaaccaggccggcggcgagggcgccggcggcgagctgggcatcagcctgaacatgtgcctgctgggcgccctggtgctgctgggcctgggcgtgctgctgttcagcggcggcctgagcgagagcgagaccggccccatggaggaggtggagagacaggtgctgcccgaccccgaggtgctggaggccgtgggcgacagacaggacggcctgagagagcagctgcaggcccccgtgccccccgacagcgtgcccagcctgcagaacatgggcctgctgctggacaagctggccaaggagaaccaggacatcagactgctgcaggcccagctgcaggcccagaaggaggagctgcagagcctgatgcaccagcccaagggcctggaggaggagaacgcccagctgagaggcgccctgcagcagggcgaggccttccagagagccctggagagcgagctgcagcagctgagagccagactgcagggcctggaggccgactgcgtgagaggccccgacggcgtgtgcctgagcggcggcagaggcccccagggcgacaaggccatcagagagcagggccccagagagcaggagcccgagctgagcttcctgaagcagaaggagcagctggaggccgaggcccaggccctgagacaggagctggagagacagagaagactgctgggcagcgtgcagcaggacctggagagaagcctgcaggacgccagcagaggcgaccccgcccacgccggcctggccgagctgggccacagactggcccagaagctgcagggcctggagaactggggccaggaccccggcgtgagcgccaacgccagcaaggcctggcaccagaagagccacttccagaacagcagagagtggagcggcaaggagaagtggtgggacggccagagagacagaaaggccgagcactggaagcacaagaaggaggagagcggcagagagagaaagaagaactggggcggccaggaggacagagagcccgccggcagatggaaggagggcagacccagagtggaggagagcggcagcaagaaggagggcaagagacagggccccaaggagccccccagaaagagcggcagcttccacagcagcggcgagaagcagaagcagcccagatggagagagggcaccaaggagctgcccctgagccccgccttcttcggcgaggacggcatcttcagacacgacagactgagattcagagacttcgtggacgccctggaggacagcctggaggaggtggccgtgcagcagaccggcgacgacgacgaggtggacgacttcgaggacttcatcttcagccacttcttcggcgacaaggccctgaagaagagaagcggcaagaaggacaagcacagccagagccccagagccgccggccccagagagggccacagccacagccaccaccaccaccacagaggctag

SEQ ID NO: 10344 - DNA, 2403 bp, synthetic construct
  source 1..2403: mol_type = other DNA; note = Synthetic coding sequence
atggtggcccccgtgctggagaccagccacgtgttctgctgccccaacagagtgagaggcgtgctgaactggagcagcggccccagaggcctgctggccttcggcaccagctgcagcgtggtgctgtacgaccccctgaagagagtggtggtgaccaacctgaacggccacaccgccagagtgaactgcatccagtggatctgcaagcaggacggcagccccagcaccgagctggtgagcggcggcagcgacaaccaggtgatccactgggagatcgaggacaaccagctgctgaaggccgtgcacctgcagggccacgagggccccgtgtacgccgtgcacgccgtgtaccagagaagaaccagcgaccccgccctgtgcaccctgatcgtgagcgccgccgccgacagcgccgtgagactgtggagcaagaagggccccgaggtgcccatcctggcctgcggcaacgacgactgcagaatccacatcttcgcccagcagaacgaccagttccagaaggtgctgagcctgtgcggccacgaggactggatcagaggcgtggagtgggccgccttcggcagagacctgttcctggccagctgcagccaggactgcctgatcagaatctggaagctgtacatcaagagcaccagcctggagacccaggacgacgacaacatcagactgaaggagaacaccttcaccatcgagaacgagagcgtgaagatcgccttcgccgtgaccctggagaccgtgctggccggccacgagaactgggtgaacgccgtgcactggcagcccgtgttctacaaggacggcgtgctgcagcagcccgtgagactgctgagcgccagcatggacaagaccatgatcctgtgggcccccgacgaggagagcggcgtgtggctggagcaggtgagagtgggcgaggtgggcggcaacaccctgggcttctacgactgccagttcaacgaggacggcagcatgatcatcgcccacgccttccacggcgccctgcacctgtggaagcagaacaccgtgaaccccagagagtggacccccgagatcgtgatcagcggccacttcgacggcgtgcaggacctggtgtgggaccccgagggcgagttcatcatcaccgtgggcaccgaccagaccaccagactgttcgccccctggaagagaaaggaccagagccaggtgacctggcacgagatcgccagaccccagatccacggctacgacctgaagtgcctggccatgatcaacagattccagttcgtgagcggcgccgacgagaaggtgctgagagtgttcagcgcccccagaaacttcgtggagaacttctgcgccatcaccggccagagcctgaaccacgtgctgtgcaaccaggacagcgacctgcccgagggcgccaccgtgcccgccctgggcctgagcaacaaggccgtgttccagggcgacatcgccagccagcccagcgacgaggaggagctgctgaccagcaccggcttcgagtaccagcaggtggccttccagcccagcatcctgaccgagccccccaccgaggaccacctgctgcagaacaccctgtggcccgaggtgcagaagctgtacggccacggctacgagatcttctgcgtgacctgcaacagcagcaagaccctgctggccagcgcctgcaaggccgccaagaaggagcacgccgccatcatcctgtggaacaccaccagctggaagcaggtgcagaacctggtgttccacagcctgaccgtgacccagatggccttcagccccaacgagaagttcctgctggccgtgagcagagacagaacctggagcctgtggaagaagcaggacaccatcagccccgagttcgagcccgtgttcagcctgttcgccttcaccaacaagatcaccagcgtgcacagcagaatcatctggagctgcgactggagccccgacagcaagtacttcttcaccggcagcagagacaagaaggtggtggtgtggggcgagtgcgacagcaccgacgactgcatcgagcacaacatcggcccctgcagcagcgtgctggacgtgggcggcgccgtgaccgccgtgagcgtgtgccccgtgctgcaccccagccagagatacgtggtggccgtgggcctggagtgcggcaagatctgcctgtacacctggaagaagaccgaccaggtgcccgagatcaacgactggacccactgcgtggagaccagccagagccagagccacaccctggccatcagaaagctgtgctggaagaactgcagcggcaagaccgagcagaaggaggccgagggcgccgagtggctgcacttcgccagctgcggcgaggaccacaccgtgaagatccacagagtgaacaagtgcgccctgtag

SEQ ID NO: 10345 - DNA, 561 bp, synthetic construct
  source 1..561: mol_type = other DNA; note = Synthetic coding sequence
atggccggcgagaacttcgccacccccttccacggccacgtgggcagaggcgccttcagcgacgtgtacgagcccgccgaggacaccttcctgctgctgaacgccctggaggccgccgccgccgagctggccggcgtggagatctgcctggaggtgggcagcggcagcggcgtggtgagcgccttcctggccagcatgatcggcccccaggccctgtacatgtgcaccgacatcaaccccgaggccgccgcctgcaccctggagaccgccagatgcaacaaggtgcacatccagcccgtgatcaccgacctggtgggcagccacggcatcgaggccgcctgggccggcggcaagaacggcagagaggtgatggacagattcttccccctggtgcccgacctgctgagccccaagggcctgttctacctggtgaccatcaaggagaacaaccccgaggagatcctgaagatcatgaagaccaagggcctgcagggcaccaccgccctgagcagacaggccggccaggagaccctgagcgtgctgaagttcaccaagagctag

SEQ ID NO: 10346 - DNA, 2352 bp, synthetic construct
  source 1..2352: mol_type = other DNA; note = Synthetic coding sequence
atggccaagtacaacaccggcggcaaccccaccgaggacgtgagcgtgaacagcagacccttcagagtgaccggccccaacagcagcagcggcatccaggccagaaagaacctgttcaacaaccagggcaacgccagcccccccgccggccccagcaacgtgcccaagttcggcagccccaagccccccgtggccgtgaagcccagcagcgaggagaagcccgacaaggagcccaagccccccttcctgaagcccaccggcgccggccagagattcggcacccccgccagcctgaccaccagagaccccgaggccaaggtgggcttcctgaagcccgtgggccccaagcccatcaacctgcccaaggaggacagcaagcccaccttcccctggccccccggcaacaagcccagcctgcacagcgtgaaccaggaccacgacctgaagcccctgggccccaagagcggccccaccccccccaccagcgagaacgagcagaagcaggccttccccaagctgaccggcgtgaagggcaagttcatgagcgccagccaggacctggagcccaagcccctgttccccaagcccgccttcggccagaagccccccctgagcaccgagaacagccacgaggacgagagccccatgaagaacgtgagcagcagcaagggcagccccgcccccctgggcgtgagaagcaagagcggccccctgaagcccgccagagaggacagcgagaacaaggaccacgccggcgagatcagcagcctgcccttccccggcgtggtgctgaagcccgccgccagcagaggcggccccggcctgagcaagaacggcgaggagaagaaggaggacagaaagatcgacgccgccaagaacaccttccagagcaagatcaaccaggaggagctggccagcggcaccccccccgccagattccccaaggcccccagcaagctgaccgtgggcggcccctggggccagagccaggagaaggagaagggcgacaagaacagcgccacccccaagcagaagcccctgccccccctgttcaccctgggcccccccccccccaagcccaacagaccccccaacgtggacctgaccaagttccacaagaccagcagcggcaacagcaccagcaagggccagaccagctacagcaccaccagcctgcccccccccccccccagccaccccgccagccagccccccctgcccgccagccaccccagccagccccccgtgcccagcctgccccccagaaacatcaagccccccttcgacctgaagagccccgtgaacgaggacaaccaggacggcgtgacccacagcgacggcgccggcaacctggacgaggagcaggacagcgagggcgagacctacgaggacatcgaggccagcaaggagagagagaagaagagagagaaggaggagaagaagagactggagctggagaagaaggagcagaaggagaaggagaagaaggagcaggagatcaagaagaagttcaagctgaccggccccatccaggtgatccacctggccaaggcctgctgcgacgtgaagggcggcaagaacgagctgagcttcaagcagggcgagcagatcgagatcatcagaatcaccgacaaccccgagggcaagtggctgggcagaaccgccagaggcagctacggctacatcaagaccaccgccgtggagatcgactacgacagcctgaagctgaagaaggacagcctgggcgcccccagcagacccatcgaggacgaccaggaggtgtacgacgacgtggccgagcaggacgacatcagcagccacagccagagcggcagcggcggcatcttcccccccccccccgacgacgacatctacgacggcatcgaggaggaggacgccgacgacggcttccccgccccccccaagcagctggacatgggcgacgaggtgtacgacgacgtggacaccagcgacttccccgtgagcagcgccgagatgagccagggcaccaacgtgggcaaggccaagaccgaggagaaggacctgaagaagctgaagaagcaggagaaggaggagaaggacttcagaaagaagttcaagtacgacggcgagatcagagtgctgtacagcaccaaggtgaccaccagcatcaccagcaagaagtggggcaccagagacctgcaggtgaagcccggcgagagcctggaggtgatccagaccaccgacgacaccaaggtgctgtgcagaaacgaggagggcaagtacggctacgtgctgagaagctacctggccgacaacgacggcgagatctacgacgacatcgccgacggctgcatctacgacaacgactag

SEQ ID NO: 10347 - DNA, 1722 bp, synthetic construct
  source 1..1722: mol_type = other DNA; note = Synthetic coding sequence
atgatccccccccaggaggccagcgccagaagaagagagatcgaggacaagctgaagcaggaggaggagaccctgagcttcatcagagacagcctggagaagagcgaccagctgaccaagaacatggtgagcatcctgagcagcttcgagagcagactgatgaagctggagaacagcatcatccccgtgcacaagcagaccgagaacctgcagagactgcaggagaacgtggagaagaccctgagctgcctggaccacgtgatcagctactaccacgtgatcagcggcgacgacgacctggaggcccaggaggacgtgaccctggagcacctgcccgagagcgtgctgcaggacgtgatcagaatcagcagatggctggtggagtacggcagaaaccaggacttcatgaacgtgtactaccagatcagaagcagccagctggacagaagcatcaagggcctgaaggagcacttccacaagagcagcagcagcagcggcgtgccctacagccccgccatccccaacaagagaaaggacacccccaccaagaagcccgtgaagagacccggcagagacgacatgctggacgtggagaccgacgcctacatccactgcgtgagcgccttcgtgaagctggcccagagcgagtaccagctgctggccgacatcatccccgagcaccaccagaagaagaccttcgacagcctgatccaggacgccctggacggcctgatgctggagggcgagaacatcgtgagcgccgccagaaaggccatcgtgagacacgacttcagcaccgtgctgaccgtgttccccatcctgagacacctgaagcagaccaagcccgagttcgaccaggtgctgcagggcaccgccgccagcaccaagaacaagctgcccggcctgatcaccagcatggagaccatcggcgccaaggccctggaggacttcgccgacaacatcaagaacgaccccgacaaggagtacaacatgcccaaggacggcaccgtgcacgagctgaccagcaacgccatcctgttcctgcagcagctgctggacttccaggagaccgccggcgccatgctggccagccaggagaccagcagcagcgccaccagctacagcagcgagttcagcaagagactgctgagcacctacatctgcaaggtgctgggcaacctgcagctgaacctgctgagcaagagcaaggtgtacgaggaccccgccctgagcgccatcttcctgcacaacaactacaactacatcctgaagagcctggagaagagcgagctgatccagctggtggccgtgacccagaagaccgccgagagaagctacagagagcacatcgagcagcagatccagacctaccagagaagctggctgaaggtgaccgactacatcgccgagaagaacctgcccgtgttccagcccggcgtgaagctgagagacaaggagagacagatcatcaaggagagattcaagggcttcaacgacggcctggaggagctgtgcaagatccagaaggcctgggccatccccgacaccgagcagagagacagaatcagacaggcccagaagaccatcgtgaaggagacctacggcgccttcctgcagaagttcggcagcgtgcccttcaccaagaaccccgagaagtacatcaagtacggcgtggagcaggtgggcgacatgatcgacagactgttcgacaccagcgcctag

SEQ ID NO: 10348 - DNA, 2475 bp, synthetic construct
  source 1..2475: mol_type = other DNA; note = Synthetic coding sequence
atgatgcagaacgtgcacctggcccccgagaccgacgaggacgacctgtacagcggctacaacgactacaaccccatctacgacatcgaggagctggagaacgacgccgccttccagcaggccgtgagaaccagccacggcagaagaccccccatcaccgccaagatcagcagcaccgccgtgaccagacccatcgccaccggctacggcagcaagaccagcctggccagcagcatcggcagacccatgaccggcgccatccaggacggcgtgaccagacccatgaccgccgtgagagccgccggcttcaccaaggccgccctgagaggcagcgccttcgaccccctgagccagagcagaggccccgccagccccctggaggccaagaagaaggacagccccgaggagaagatcaagcagctggagaaggaggtgaacgagctggtggaggagagctgcatcgccaacagctgcggcgacctgaagctggccctggagaaggccaaggacgccggcagaaaggagagagtgctggtgagacagagagagcaggtgaccacccccgagaacatcaacctggacctgacctacagcgtgctgttcaacctggccagccagtacagcgtgaacgagatgtacgccgaggccctgaacacctaccaggtgatcgtgaagaacaagatgttcagcaacgccggcatcctgaagatgaacatgggcaacatctacctgaagcagagaaactacagcaaggccatcaagttctacagaatggccctggaccaggtgcccagcgtgaacaagcagatgagaatcaagatcatgcagaacatcggcgtgaccttcatccaggccggccagtacagcgacgccatcaacagctacgagcacatcatgagcatggcccccaacctgaaggccggctacaacctgaccatctgctacttcgccatcggcgacagagagaagatgaagaaggccttccagaagctgatcaccgtgcccctggagatcgacgaggacaagtacatcagccccagcgacgacccccacaccaacctggtgaccgaggccatcaagaacgaccacctgagacagatggagagagagagaaaggccatggccgagaagtacatcatgaccagcgccaagctgatcgcccccgtgatcgagaccagcttcgccgccggctacgactggtgcgtggaggtggtgaaggccagccagtacgtggagctggccaacgacctggagatcaacaaggccgtgacctacctgagacagaaggactacaaccaggccgtggagatcctgaaggtgctggagaagaaggacagcagagtgaagagcgccgccgccaccaacctgagcgccctgtactacatgggcaaggacttcgcccaggccagcagctacgccgacatcgccgtgaacagcgacagatacaaccccgccgccctgaccaacaagggcaacaccgtgttcgccaacggcgactacgagaaggccgccgagttctacaaggaggccctgagaaacgacagcagctgcaccgaggccctgtacaacatcggcctgacctacgagaagctgaacagactggacgaggccctggactgcttcctgaagctgcacgccatcctgagaaacagcgccgaggtgctgtaccagatcgccaacatctacgagctgatggagaaccccagccaggccatcgagtggctgatgcaggtggtgagcgtgatccccaccgacccccaggtgctgagcaagctgggcgagctgtacgacagagagggcgacaagagccaggccttccagtactactacgagagctacagatacttcccctgcaacatcgaggtgatcgagtggctgggcgcctactacatcgacacccagttctgggagaaggccatccagtacttcgagagagccagcctgatccagcccacccaggtgaagtggcagctgatggtggccagctgcttcagaagaagcggcaactaccagaaggccctggacacctacaaggacacccacagaaagttccccgagaacgtggagtgcctgagattcctggtgagactgtgcaccgacctgggcctgaaggacgcccaggagtacgccagaaagctgaagagactggagaagatgaaggagatcagagagcagagaatcaagagcggcagagacggcagcggcggcagcagaggcaagagagagggcagcgccagcggcgacagcggccagaactacagcgccagcagcaagggcgagagactgagcgccagactgagagccctgcccggcaccaacgagccctacgagagcagcagcaacaaggagatcgacgccagctacgtggaccccctgggcccccagatcgagagacccaagaccgccgccaagaagagaatcgacgaggacgacttcgccgacgaggagctgggcgacgacctgctgcccgagtag

SEQ ID NO: 10349 - DNA, 2850 bp, synthetic construct
  source 1..2850: mol_type = other DNA; note = Synthetic coding sequence
atgctgagaaccgccggcagagacggcctgtgcagactgagcacctacctggaggagctggaggccgtggagctgaagaagttcaagctgtacctgggcaccgccaccgagctgggcgagggcaagatcccctggggcagcatggagaaggccggccccctggagatggcccagctgctgatcacccacttcggccccgaggaggcctggagactggccctgagcaccttcgagagaatcaacagaaaggacctgtgggagagaggccagagagaggacctggtgagagacaccccccccggcggccccagcagcctgggcaaccagagcacctgcctgctggaggtgagcctggtgacccccagaaaggacccccaggagacctacagagactacgtgagaagaaagttcagactgatggaggacagaaacgccagactgggcgagtgcgtgaacctgagccacagatacaccagactgctgctggtgaaggagcacagcaaccccatgcaggtgcagcagcagctgctggacaccggcagaggccacgccagaaccgtgggccaccaggccagccccatcaagatcgagaccctgttcgagcccgacgaggagagacccgagccccccagaaccgtggtgatgcagggcgccgccggcatcggcaagagcatgctggcccacaaggtgatgctggactgggccgacggcaagctgttccagggcagattcgactacctgttctacatcaactgcagagagatgaaccagagcgccaccgagtgcagcatgcaggacctgatcttcagctgctggcccgagcccagcgcccccctgcaggagctgatcagagtgcccgagagactgctgttcatcatcgacggcttcgacgagctgaagcccagcttccacgacccccagggcccctggtgcctgtgctgggaggagaagagacccaccgagctgctgctgaacagcctgatcagaaagaagctgctgcccgagctgagcctgctgatcaccaccagacccaccgccctggagaagctgcacagactgctggagcaccccagacacgtggagatcctgggcttcagcgaggccgagagaaaggagtacttctacaagtacttccacaacgccgagcaggccggccaggtgttcaactacgtgagagacaacgagcccctgttcaccatgtgcttcgtgcccctggtgtgctgggtggtgtgcacctgcctgcagcagcagctggagggcggcggcctgctgagacagaccagcagaaccaccaccgccgtgtacatgctgtacctgctgagcctgatgcagcccaagcccggcgcccccagactgcagcccccccccaaccagagaggcctgtgcagcctggccgccgacggcctgtggaaccagaagatcctgttcgaggagcaggacctgagaaagcacggcctggacggcgaggacgtgagcgccttcctgaacatgaacatcttccagaaggacatcaactgcgagagatactacagcttcatccacctgagcttccaggagttcttcgccgccatgtactacatcctggacgagggcgagggcggcgccggccccgaccaggacgtgaccagactgctgaccgagtacgccttcagcgagagaagcttcctggccctgaccagcagattcctgttcggcctgctgaacgaggagaccagaagccacctggagaagagcctgtgctggaaggtgagcccccacatcaagatggacctgctgcagtggatccagagcaaggcccagagcgacggcagcaccctgcagcagggcagcctggagttcttcagctgcctgtacgagatccaggaggaggagttcatccagcaggccctgagccacttccaggtgatcgtggtgagcaacatcgccagcaagatggagcacatggtgagcagcttctgcctgaagagatgcagaagcgcccaggtgctgcacctgtacggcgccacctacagcgccgacggcgaggacagagccagatgcagcgccggcgcccacaccctgctggtgcagctgcccgagagaaccgtgctgctggacgcctacagcgagcacctggccgccgccctgtgcaccaaccccaacctgatcgagctgagcctgtacagaaacgccctgggcagcagaggcgtgaagctgctgtgccagggcctgagacaccccaactgcaagctgcagaacctgagactgaagagatgcagaatcagcagcagcgcctgcgaggacctgagcgccgccctgatcgccaacaagaacctgaccagaatggacctgagcggcaacggcgtgggcttccccggcatgatgctgctgtgcgagggcctgagacacccccagtgcagactgcagatgatccagctgagaaagtgccagctggagagcggcgcctgccaggagatggccagcgtgctgggcaccaacccccacctggtggagctggacctgaccggcaacgccctggaggacctgggcctgagactgctgtgccagggcctgagacaccccgtgtgcagactgagaaccctgtggctgcagctggacagctgcggcctgaccgccaaggcctgcgagaacctgtacttcaccctgggcatcaaccagaccctgaccgacctgtacctgaccaacaacgccctgggcgacaccggcgtgagactgctgtgcaagagactgagccaccccggctgcaagctgagagtgctgtggctgttcggcatggacctgaacaagatgacccacagcagactggccgccctgagagtgaccaagccctacctggacatcggctgctag

SEQ ID NO: 10350 - DNA, 5796 bp, synthetic construct
  source 1..5796: mol_type = other DNA; note = Synthetic coding sequence
atggccgccagaagcgcccccagctgccacctgagactggagtgggtgtacggctacagaggccaccagtgcagaaacaacctgtactacaccgccgccaaggagatcgtgtacttcgtggccggcgtgggcgtggtgtacagccccagagagcacagacagaagttctacagaggccacagcgacgacatcatcagcctggccctgcaccccgagagagtgctggtggccaccggccaggtgggcaaggagccctacatctgcatctgggacagctacaccgtgcagaccatcagcgtgctgaaggacgtgcacacccacggcatcgcctgcctggccttcgacctggacggccagagactggtgagcgtgggcctggacagcaagaacgccgtgtgcgtgtgggactggaagagaggcaagatgctgagcatggcccccggccacaccgacagaatcttcgacatcagctgggacctgtaccagcccaacaagctggtgagctgcggcgtgaagcacatcaagttctggagcctgtgcggcaacgccctgacccccaagagaggcgtgttcggcaagaccggcgacctgcagaccatcctgtgcctggcctgcgccagagacgagctgacctacagcggcgccctgaacggcgacatctacgtgtggaagggcatcaacctgatcagaaccatccagggcgcccacgccgccggcatcttcagcatgaacgcctgcgaggagggcttcgccaccggcggcagagacggctgcatcagactgtgggacctgaccttcaagcccatcaccgtgatcgacctgagagagaccgaccagggctacaagggcctgagcgtgagaagcgtgtgctggagaggcgaccacatcctggtgggcacccaggacagcgagatcttcgagatcgtggtgcaggagagaaacaagcccttcctgatcatgcagggccactgcgagggcgagctgtgggccctggccgtgcaccccaccaagcccctggccgtgaccggcagcgacgacagaagcgtgagaatctggagcctggtggaccacgccctgatcgccagatgcaacatggaggagcccatcagatgcgccgccgtgaacgccgacggcatccacctggccctgggcatgaaggacggcagcttcaccgtgctgagagtgagagacatgaccgaggtggtgcacatcaaggacagaaaggaggccatccacgagctgaagtacagccccgacggcacctacctggccgtgggctgcaacgacagcagcgtggacatctacggcgtggcccagagatacaagaaggtgggcgagtgcctgggcagcctgagcttcatcacccacctggactggagcagcgacagcagatacctgcagaccaacgacggcaacggcaagagactgttctacagaatgcccggcggcaaggaggtgaccagcaccgaggagatcaagggcgtgcactgggccagctggacctgcgtgagcggcctggaggtgaacggcatctggcccaagtacagcgacatcaacgacatcaacagcgtggacggcaactacatcggccaggtgctggtgaccgccgacgactacggcatcatcaagctgttcagatacccctgcctgagaaagggcgccaagttcagaaagtacatcggccacagcgcccacgtgaccaacgtgagatggagccacgactaccagtgggtgatcagcatcggcggcgccgaccacagcgtgttccagtggaagttcatccccgagagaaagctgaaggacgccgtgcacatcgccccccaggagagcctggccgacagccacagcgacgagagcgacagcgacctgagcgacgtgcccgagctggacagcgagatcgagcaggagacccagctgacctacagaagacaggtgtacaaggaggacctgccccagctgaaggagcagtgcaaggagaagcagaagagcgccaccagcaagagaagagagagagcccccggcaacagcatcagactgcacttcgtgcacggctacagaggctacgactgcagaagcaacctgttctacacccagatcggcgagatcgtgtaccacgtggccgccgtgggcgtgatctacaacagacagcagaacacccagagattctacctgggccacgacgacgacatcctgtgcctgaccatccaccccctgaaggactacgtggccaccggccaggtgggcagagaccccagcatccacatctgggacaccgagaccatcaagcccctgagcatcctgaagggccaccaccagtacggcgtgagcgccgtggacttcagcgccgacggcaagagactggccagcgtgggcatcgacgacagccacaccgtggtgctgtgggactggaagaagggcgagaagctgagcatcgccagaggcagcaaggacaagatcttcgtggtgaagatgaacccctacgtgcccgacaagctgatcaccgccggcatcaagcacatgaagttctggagaaaggccggcgacgtgtgcatctggagagacatcttcctggtgaagaccgtgaaggcccacgacggccccgtgttcagcatgcacgccctggagaagggcttcgtgaccggcggcaaggacggcatcgtggccctgtgggacgacagcttcgagagatgcctgaagacctacgccatcaagagagccgccctggcccccggcagcaagggcctgctgctggaggacaaccccagcatcagagccatcagcctgggccacggccacatcctggtgggcaccaagaacggcgagatcctggaggtggacaagagcggccccatcaccctgctggtgcagggccacatggagggcgaggtgtggggcctggccacccacccctacctgcccatctgcgccaccgtgagcgacgacaagaccctgagaatctgggacctgagccccagccactgcatgctggccgtgagaaagctgaagaagggcggcagatgctgctgcttcagccccgacggcaaggccctggccgtgggcctgaacgacggcagcttcctgatggccaacgccgacaccctggaggacctggtgagcttccaccacagaaaggacatgatcagcgacatcagattcagccccggcagcggcaagtacctggccgtggccagccacgacagcttcatcgacatctacaacgtgatgagcagcaagagagtgggcatctgcaagggcgccaccagctacatcacccacatcgactgggacatcagaggcaagctgctgcaggtgaacaccggcgccaaggagcagctgttcttcgaggcccccagaggcaagaagcagaccatccccagcgtggaggtggagaagatcgcctgggccagctggaccagcgtgctgggcctgtgctgcgagggcatctggcccgtgatcggcgaggtgaccgacgtgaccgccagctgcctgaccagcgacaagatggtgctggccaccggcgacgacctgggcttcgtgaagctgttcagataccccaccaagggcaagttcggcaagttcaagagatacgtggcccacagcacccacgtgaccaacgtgagatggacctacgacgacagcatgctggtgaccctgggcggcaccgacatgagcctgatggtgtggaccaacgagatggagggctacagagagaagagaccctgcgacagcgaggagagcgacatcgacagcgaggaggacggcggctacgacagcgacgtgaccagagagaacgagatcagctacaccatcagagccctgagcaccaacatcagacccatgctgggcatcaagccccacctgcagcagaaggagcccagcatcgacgagagaccccccgtgagcagagcccccccccagcccgagaagctgcagaccaacaacgtgggcaagaagaagagacccatcgaggacctggtgctggagctgatcttcggctacagaggcagagactgcagaaacaacgtgcactacctgaacgacggcgacgacatcatctaccacaccgccagcgtgggcatcctgcacaacgtggccaccggcagccagagcttctaccaggagcacaacgacgacatcctgtgcctgaccgtgaaccagcaccccaagttcatcaacatcgtggccaccggccaggtggtgctgagctgcagcctgctgaccaccgcccccagcatccacatctgggacgccatgaacaagcagaccctgagcatcctgagatgctaccacagcaagggcgtgtgcagcgtgagcttcagcgccaccggcaagctgctgctgagcgtgggcctggaccccgagcacaccatcaccatctggagatggcaggagggcgccaagatcgccagcagagccggccacaaccagagaatcttcgtggccgagttcagacccgacagcgacacccagttcgtgagcgtgggcgtgaagcacgtgaagttctggaccctggccggcagagccctgctgagcaagaagggcctgctgagcaccctggaggacgccagaatgcagaccatgctggccatcgccttcggcgccaacaacctgaccttcaccggcaccatcagcggcgacgtgtgcgtgtggaaggaccacatcctgtgcagaatcgtggccagagcccacaacggccccgtgttcgccatgtacaccaccctgagagacggcctgatcgtgaccggcggcaaggagagacccagcaaggagggcggcgccgtgaagctgtgggaccaggagctgagaagatgcagagccttcagactggagaccggccaggccaccgactgcgtgagaagcgtgtgcagaggcaagggcaagatcctggtgggcaccagaaacgccgagatcatcgaggtgggcgagaagaacgccgcctgcaacatcctggtgaacggccacgtggacggccccatctggggcctggccacccaccccagcagagacttcttcctgagcgccgccgaggacggcaccgtgagactgtgggacatcgccgacaagaagatgctgaacaaggtgaacctgggccacgccgccagaaccgtgtgctacagccccgagggcgacatggtggccatcggcatgaagaacggcgagttcatcatcctgctggtgagcagcctgaagatctggggcaagaagagagacagaagatgcgccatccacgacatcagattcagccccgacagcagatacctggccgtgggcagcagcgagaacagcgtggacttctacgacctgaccctgggccccaccctgaacagaatcagctactgcaaggacatccccagcttcgtgatccagatggacttcagcgccgacagcagctacctgcaggtgagcagcggctgctacaagagacacgtgtacgaggtgcccagcggcaagcacctgatggaccacgccgccatcgacagaatcacctgggccacctggaccagcatcctgggcgacgaggtgctgggcatctggagcagacacgccgagaaggccgacgtgaactgcgcctgcgtgagccacagcggcatcagcctggtgaccggcgacgacttcggcatggtgaagctgttcgacttcccctgccccgagaagttcgccaagcacaagagattcctgggccacagcccccacgtgaccaacatcagattcaccagcggcgacagacacgtggtgagcgccggcggcgacgactgcagcctgttcgtgtggaagtgcgtgcacaccccccactag

SEQ ID NO: 10351 - DNA, 429 bp, synthetic construct
  source 1..429: mol_type = other DNA; note = Synthetic coding sequence
atgagcatcagcagcgacgaggtgaacttcctggtgtacagatacctgcaggagagcggcttcagccacagcgccttcaccttcggcatcgagagccacatcagccagagcaacatcaacggcgccctggtgccccccgccgccctgatcagcatcatccagaagggcctgcagtacgtggaggccgaggtgagcatcaacgaggacggcaccctgttcgacggcagacccatcgagagcctgagcctgatcgacgccgtgatgcccgacgtggtgcagaccagacagcaggcctacagagacaagctggcccagcagcaggccgccgccgccgccgccgccgccgccgccgccagccagcagggcagcgccaagaacggcgagaacaccgccaacggcgaggagaacggcgcccacaccatcgcctag

SEQ ID NO: 10352 - DNA, 1704 bp, synthetic construct
  source 1..1704: mol_type = other DNA; note = Synthetic coding sequence
atggagttcttcaccatgccccccagaacctggttcatgagacagctgcagagaatgtggttcctgagacccagcatggccatcatggtgttcagaatgatcgaggagagacccacccacgccatcaccgtgagagtgagctacctggagatctacaacgagagcctgttcgacctgctgagcaccctgccctacgtgggccccagcgtgacccccatgaccatcgtggagaacccccagggcgtgttcatcaagggcctgagcgtgcacctgaccagccaggaggaggacgccttcagcctgctgttcgagggcgagaccaacagaatcatcgccagccacaccatgaacaagaacagcagcagaagccactgcatcttcaccatctacctggaggcccacagcagaaccctgagcgaggagaagtacatcaccagcaagatcaacctggtggacctggccggcagcgagagactgggcaagagcggcagcgagggccaggtgctgaaggaggccacctacatcaacaagagcctgagcttcctggagcaggccatcatcgccctgggcgaccagaagagagaccacatccccttcagacagtgcaagctgacccacgccctgaaggacagcctgggcggcaactgcaacatggtgctggtgaccaacatctacggcgaggccgcccagctggaggagaccctgagcagcctgagattcgccagcagaatgaagctggtgaccaccgagcccgccatcaacgagaagtacgacgccgagagaatggtgaagaacctggagaaggagctggccctgctgaagcaggagctggccatccacgacagcctgaccaacagaaccttcgtgacctacgaccccatggacgagatccagatcgccgagatcaacagccaggtgagaagatacctggagggcaccctggacgagatcgacatcatcagcctgagacagatcaaggaggtgttcaaccagttcagagtggtgctgagccagcaggagcaggaggtggagagcaccctgagaagaaagtacaccctgatcgacagaaacgacttcgccgccatcagcgccatccagaaggccggcctggtggacgtggacggccacctggtgggcgagcccgagggccagaacttcggcctgggcgtggcccccttcagcaccaagcccggcaagaaggccaagagcaagaagaccttcaaggagcccctgagacccgacaccccccccagcaagcccgtggccttcgaggagttcaagaacgagcagggcagcgagatcaacagaatcttcaaggagaacaagagcatcctgaacgagagaagaaagagagccagcgagaccacccagcacatcaacgccatcaagagagagatcgacgtgaccaaggaggccctgaacttccagaagagcctgagagagaagcagggcaagtacgagaacaagggcctgatgatcatcgacgaggaggagttcctgctgatcctgaagctgaaggacctgaagaagcagtacagaagcgagtaccaggacctgagagacctgagagccgagatccagtactgccagcacctggtggaccagtgcagacacagactgctgatgggcgccaccgtgggcaagaacctgaccagcggcaccatgagccccctgagcagcctgagaacctgcagatggcactag

SEQ ID NO: 10353 - DNA, 1428 bp, synthetic construct
  source 1..1428: mol_type = other DNA; note = Synthetic coding sequence
atggccgagggcagcgtgatgttcagcgacgtgagcatcgacttcagccaggaggagtgggactgcctggaccccgtgcagagagacctgtacagagacgtgatgctggagaactacggcaacctggtgagcatgggcctgtacacccccaagccccaggtgatcagcctgctggagcagggcaaggagccctggatggtgggcagagagctgaccagaggcctgtgcagcgacctggagagcatgtgcgagaccaagctgctgagcctgaagaaggaggtgtacgagatcgagctgtgccagagagagatcatgggcctgaccaagcacggcctggagtacagcagcttcggcgacgtgctggagtacagaagccacctggccaagcagctgggctaccccaacggccacttcagccaggagatcttcacccccgagtacatgcccaccttcatccagcagaccttcctgaccctgcaccagatcatcaacaacgaggacagaccctacgagtgcaagaagtgcggcaaggccttcagccagaacagccagttcatccagcaccagagaatccacatcggcgagaagagctacgagtgcaaggagtgcggcaagttcttcagctgcggcagccacgtgaccagacacctgaagatccacaccggcgagaagcccttcgagtgcaaggagtgcggcaaggccttcagctgcagcagctacctgagccagcaccagagaatccacaccggcaagaagccctacgagtgcaaggagtgcggcaaggccttcagctactgcagcaacctgatcgaccaccagagaatccacaccggcgagaagccctacgagtgcaaggtgtgcggcaaggccttcaccaagagcagccagctgttccagcacgccagaatccacaccggcgagaagccctacgagtgcaaggagtgcggcaaggccttcacccagagcagcaagctggtgcagcaccagagaatccacaccggcgagaagccctacgagtgcaaggagtgcggcaaggccttcagcagcggcagcgccctgaccaaccaccagagaatccacaccggcgagaagccctacgactgcaaggagtgcggcaaggccttcacccagagcagccagctgagacagcaccagagaatccacgccggcgagaagcccttcgagtgcctggagtgcggcaaggccttcacccagaacagccagctgttccagcaccagagaatccacaccgacgagaagccctacgagtgcaacgagtgcggcaaggccttcaacaagtgcagcaacctgaccagacacctgagaatccacaccggcgagaagccctacaactgcaaggagtgcggcaaggccttcagcagcggcagcgacctgatcagacaccagggcatccacaccaacaagtag

SEQ ID NO: 10354 - DNA, 462 bp, synthetic construct; identical to SEQ ID NO: 9388
  source 1..462: mol_type = other DNA; note = Synthetic coding sequence

SEQ ID NO: 10355 - DNA, 2616 bp, synthetic construct
  source 1..2616: mol_type = other DNA; note = Synthetic coding sequence
atgggcgagggcggcctgccccccgccttccagctgctgctgagagcctgcgaccagggcgacaccgagaccgccagaagactgctggagcccggcgccgccgagcccgccgagagaggcgccgagcccgaggccggcgccgagcccgccggcgccgaggtggccggccccggcgccgccgccgccggcgccgtgggcgcccccgtgcccgtggactgcagcgacgaggccggcaacaccgccctgcagttcgccgccgccggcggccacgagcccctggtgagattcctgctgagaagaggcgccagcgtgaacagcagaaaccactacggctggagcgccctgatgcaggccgccagattcggccacgtgagcgtggcccacctgctgctggaccacggcgccgacgtgaacgcccagaacagactgggcgccagcgtgctgaccgtggccagcagaggcggccacctgggcgtggtgaagctgctgctggaggccggcgccttcgtggaccaccaccaccccagcggcgagcagctgggcctgggcggcagcagagacgagcccctggacatcaccgccctgatggccgccatccagcacggccacgaggccgtggtgagactgctgatggagtggggcgccgaccccaaccacgccgccagaaccgtgggctggagccccctgatgctggccgccctgaccggcagactgggcgtggcccagcagctggtggagaagggcgccaaccccgaccacctgagcgtgctggagaagaccgccttcgaggtggccctggactgcaagcacagagacctggtggactacctggaccccctgaccaccgtgagacccaagaccgacgaggagaagagaagacccgacatcttccacgccctgaagatgggcaacttccagctggtgaaggagatcgccgacgaggaccccagccacgtgaacctggtgaacggcgacggcgccacccccctgatgctggccgccgtgaccggccagctggccctggtgcagctgctggtggagagacacgccgacgtggacaagcaggacagcgtgcacggctggaccgccctgatgcaggccacctaccacggcaacaaggagatcgtgaagtacctgctgaaccagggcgccgacgtgaccctgagagccaagaacggctacaccgccttcgacctggtgatgctgctgaacgaccccgacaccgagctggtgagactgctggccagcgtgtgcatgcaggtgaacaaggacaagggcagacccagccaccagccccccctgccccacagcaaggtgagacagccctggagcatccccgtgctgcccgacgacaagggcggcctgaagagctggtggaacagaatgagcaacagattcagaaagctgaagctgatgcagaccctgcccagaggcctgagcagcaaccagcccctgcccttcagcgacgagcccgagcccgccctggacagcaccatgagagccgccccccaggacaagaccagcagaagcgccctgcccgacgccgcccccgtgaccaaggacaacggccccggcagcaccagaggcgagaaggaggacaccctgctgaccaccatgctgagaaacggcgcccccctgaccagactgcccagcgacaagctgaaggccgtgatcccccccttcctgccccccagcagcttcgagctgtggagcagcgacagaagcagaaccagacacaacggcaaggccgaccccatgaagaccgccctgccccagagagccagcagaggccaccccgtgggcggcggcggcaccgacaccacccccgtgagacccgtgaagttccccagcctgcccagaagccccgccagcagcgccaacagcggcaacttcaaccacagcccccacagcagcggcggcagcagcggcgtgggcgtgagcagacacggcggcgagctgctgaacagaagcggcggcagcatcgacaacgtgctgagccagatcgccgcccagagaaagaaggccgccggcctgctggagcagaagcccagccacagaagcagccccgtgggccccgcccccggcagcagccccagcgagctgcccgccagccccgccggcggcagcgcccccgtgggcaagaagctggagaccagcaagagaccccccagcggcaccagcaccaccagcaagagcaccagccccaccctgacccccagccccagccccaagggccacaccgccgagagcagcgtgagcagcagcagcagccacagacagagcaagagcagcggcggcagcagcagcggcaccatcaccgacgaggacgagctgaccggcatcctgaagaagctgagcctggagaagtaccagcccatcttcgaggagcaggaggtggacatggaggccttcctgaccctgaccgacggcgacctgaaggagctgggcatcaagaccgacggcagcagacagcagatcctggccgccatcagcgagctgaacgccggcaagggcagagagagacagatcctgcaggagaccatccacaacttccacagcagcttcgagagcagcgccagcaacaccagagcccccggcaacagcccctgcgcctag

SEQ ID NO: 10356 - DNA, 1359 bp, synthetic construct
  source 1..1359: mol_type = other DNA; note = Synthetic coding sequence
atgagcgccagcctgaactacaagagcttcagcaaggagcagcagaccatggacaacctggagaagcagctgatctgccccatctgcctggagatgttcaccaagcccgtggtgatcctgccctgccagcacaacctgtgcagaaagtgcgccagcgacatcttccaggccagcaacccctacctgcccaccagaggcggcaccaccatggccagcggcggcagattcagatgccccagctgcagacacgaggtggtgctggacagacacggcgtgtacggcctgcagagaaacctgctggtggagaacatcatcgacatctacaagcaggagagcaccagacccgagaagaagagcgaccagcccatgtgcgaggagcacgaggaggagagaatcaacatctactgcctgaactgcgaggtgcccacctgcagcctgtgcaaggtgttcggcgcccacaaggactgccaggtggcccccctgacccacgtgttccagagacagaagagcgagctgagcgacggcatcgccatcctggtgggcagcaacgacagagtgcagggcgtgatcagccagctggaggacacctgcaagaccatcgaggagtgctgcagaaagcagaagcaggagctgtgcgagaagttcgactacctgtacggcatcctggaggagagaaagaacgagatgacccaggtgatcaccagaacccaggaggagaagctggagcacgtgagagccctgatcaagaagtacagcgaccacctggagaacgtgagcaagctggtggagagcggcatccagttcatggacgagcccgagatggccgtgttcctgcagaacgccaagaccctgctgaagaagatcagcgaggccagcaaggccttccagatggagaagatcgagcacggctacgagaacatgaaccacttcaccgtgaacctgaacagagaggagaagatcatcagagagatcgacttctacagagaggacgaggacgaggaggaggaggagggcggcgagggcgagaaggagggcgagggcgaggtgggcggcgaggccgtggaggtggaggaggtggagaacgtgcagaccgagttccccggcgaggacgagaaccccgagaaggccagcgagctgagccaggtggagctgcaggccgcccccggcgccctgcccgtgagcagccccgagcccccccccgccctgccccccgccgccgacgcccccgtgacccagatcggcttcgaggccccccccctgcagggccaggccgccgcccccgccagcggcagcggcgccgacagcgagcccgccagacacatcttcagcttcagctggctgaacagcctgaacgagtag

SEQ ID NO: 10357 - DNA, 492 bp, synthetic construct
  source 1..492: mol_type = other DNA; note = Synthetic coding sequence
atgcccagcatcaagctgcagagcagcgacggcgagatcttcgaggtggacgtggagatcgccaagcagagcgtgaccatcaagaccatgctggaggacctgggcatggacgacgagggcgacgacgaccccgtgcccctgcccaacgtgaacgccgccatcctgaagaaggtgatccagtggtgcacccaccacaaggacgacccccccccccccgaggacgacgagaacaaggagaagagaaccgacgacatccccgtgtgggaccaggagttcctgaaggtggaccagggcaccctgttcgagctgatcctggccgccaactacctggacatcaagggcctgctggacgtgacctgcaagaccgtggccaacatgatcaagggcaagacccccgaggagatcagaaagaccttcaacatcaagaacgacttcaccgaggaggaggaggcccaggtgagaaaggagaaccagtggtgcgaggagaagtag

SEQ ID NO: 10358 - DNA, 1200 bp, synthetic construct
  source 1..1200: mol_type = other DNA; note = Synthetic coding sequence
atggccgcccccagccccagcggcggcggcggcagcggcggcggcagcggcagcggcacccccggccccgtgggcagccccgcccccggccaccccgccgtgagcagcatgcagggcaagagaaaggccctgaagctgaacttcgccaacccccccttcaagagcaccgccagattcaccctgaaccccaaccccaccggcgtgcagaacccccacatcgagagactgagaacccacagcatcgagagcagcggcaagctgaagatcagccccgagcagcactgggacttcaccgccgaggacctgaaggacctgggcgagatcggcagaggcgcctacggcagcgtgaacaagatggtgcacaagcccagcggccagatcatggccgtgaagagaatcagaagcaccgtggacgagaaggagcagaagcagctgctgatggacctggacgtggtgatgagaagcagcgactgcccctacatcgtgcagttctacggcgccctgttcagagagggcgactgctggatctgcatggagctgatgagcaccagcttcgacaagttctacaagtacgtgtacagcgtgctggacgacgtgatccccgaggagatcctgggcaagatcaccctggccaccgtgaaggccctgaaccacctgaaggagaacctgaagatcatccacagagacatcaagcccagcaacatcctgctggacagaagcggcaacatcaagctgtgcgacttcggcatcagcggccagctggtggacagcatcgccaagaccagagacgccggctgcagaccctacatggcccccgagagaatcgaccccagcgccagcagacagggctacgacgtgagaagcgacgtgtggagcctgggcatcaccctgtacgagctggccaccggcagattcccctaccccaagtggaacagcgtgttcgaccagctgacccaggtggtgaagggcgaccccccccagctgagcaacagcgaggagagagagttcagccccagcttcatcaacttcgtgaacctgtgcctgaccaaggacgagagcaagagacccaagtacaaggagctgctgaagcaccccttcatcctgatgtacgaggagagagccgtggaggtggcctgctacgtgtgcaagatcctggaccagatgcccgccacccccagcagccccatgtacgtggactag

SEQ ID NO: 10359 - DNA, 1122 bp, synthetic construct
  source 1..1122: mol_type = other DNA; note = Synthetic coding sequence
atggcccaggagagccccaagaacagcgccgccgagatccccgtgaccagcaacggcgaggtggacgacagcagagagcacagcttcaacagagacctgaagcacagcctgcccagcggcctgggcctgagcgagacccagatcaccagccacggcttcgacaacaccaaggagggcgtgatcgaggccggcgccttccagggcagccccgccccccccctgcccagcgtgatgagccccagcagagtggccgccagcagactggcccagcagggcagcgacctgatcgtgcccgccggcggccagagaacccagaccaagagcggccccgtgatcctggccgacgagatcaagaaccccgccatggagaagctggagctggtgagaaagtggagcctgaacacctacaagtgcaccagacagatcatcagcgagaagctgggcagaggcagcagaaccgtggacctggagctggaggcccagatcgacatcctgagagacaacaagaagaagtacgagaacatcctgaagctggcccagaccctgagcacccagctgttccagatggtgcacacccagagacagctgggcgacgccttcgccgacctgagcctgaagagcctggagctgcacgaggagttcggctacaacgccgacacccagaagctgctggccaagaacggcgagaccctgctgggcgccatcaacttcttcatcgccagcgtgaacaccctggtgaacaagaccatcgaggacaccctgatgaccgtgaagcagtacgagagcgccagaatcgagtacgacgcctacagaaccgacctggaggagctgaacctgggccccagagacgccaacaccctgcccaagatcgagcagagccagcacctgttccaggcccacaaggagaagtacgacaagatgagaaacgacgtgagcgtgaagctgaagttcctggaggagaacaaggtgaaggtgctgcacaaccagctggtgctgttccacaacgccatcgccgcctacttcgccggcaaccagaagcagctggagcagaccctgaagcagttccacatcaagctgaagacccccggcgtggacgcccccagctggctggaggagcagtag

SEQ ID NO: 10360 - DNA, 654 bp, synthetic construct
  source 1..654: mol_type = other DNA; note = Synthetic coding sequence
atgtacagcctgaaccaggagatcaaggccttcagcagaaacaacctgagaaagcagtgcaccagagtgaccaccctgaccggcaagaagatcatcgagacctggaaggacgccagaatccacgtggtggaggaggtggagcccagcagcggcggcggctgcggctacgtgcaggacctgagcagcgacctgcaggtgggcgtgatcaagccctggctgctgctgggcagccaggacgccgcccacgacctggacaccctgaagaagaacaaggtgacccacatcctgaacgtggcctacggcgtggagaacgccttcctgagcgacttcacctacaagagcatcagcatcctggacctgcccgagaccaacatcctgagctacttccccgagtgcttcgagttcatcgaggaggccaagagaaaggacggcgtggtgctggtgcactgcaacgccggcgtgagcagagccgccgccatcgtgatcggcttcctgatgaacagcgagcagaccagcttcaccagcgccttcagcctggtgaagaacgccagacccagcatctgccccaacagcggcttcatggagcagctgagaacctaccaggagggcaaggagagcaacaagtgcgacagaatccaggagaacagcagctag

SEQ ID NO: 10361 - DNA, 2679 bp, synthetic construct
  source 1..2679: mol_type = other DNA; note = Synthetic coding sequence
atgctgagaaccgccggcagagacggcctgtgcagactgagcacctacctggaggagctggaggccgtggagctgaagaagttcaagctgtacctgggcaccgccaccgagctgggcgagggcaagatcccctggggcagcatggagaaggccggccccctggagatggcccagctgctgatcacccacttcggccccgaggaggcctggagactggccctgagcaccttcgagagaatcaacagaaaggacctgtgggagagaggccagagagaggacctggtgagagacaccccccccggcggccccagcagcctgggcaaccagagcacctgcctgctggaggtgagcctggtgacccccagaaaggacccccaggagacctacagagactacgtgagaagaaagttcagactgatggaggacagaaacgccagactgggcgagtgcgtgaacctgagccacagatacaccagactgctgctggtgaaggagcacagcaaccccatgcaggtgcagcagcagctgctggacaccggcagaggccacgccagaaccgtgggccaccaggccagccccatcaagatcgagaccctgttcgagcccgacgaggagagacccgagccccccagaaccgtggtgatgcagggcgccgccggcatcggcaagagcatgctggcccacaaggtgatgctggactgggccgacggcaagctgttccagggcagattcgactacctgttctacatcaactgcagagagatgaaccagagcgccaccgagtgcagcatgcaggacctgatcttcagctgctggcccgagcccagcgcccccctgcaggagctgatcagagtgcccgagagactgctgttcatcatcgacggcttcgacgagctgaagcccagcttccacgacccccagggcccctggtgcctgtgctgggaggagaagagacccaccgagctgctgctgaacagcctgatcagaaagaagctgctgcccgagctgagcctgctgatcaccaccagacccaccgccctggagaagctgcacagactgctggagcaccccagacacgtggagatcctgggcttcagcgaggccgagagaaaggagtacttctacaagtacttccacaacgccgagcaggccggccaggtgttcaactacgtgagagacaacgagcccctgttcaccatgtgcttcgtgcccctggtgtgctgggtggtgtgcacctgcctgcagcagcagctggagggcggcggcctgctgagacagaccagcagaaccaccaccgccgtgtacatgctgtacctgctgagcctgatgcagcccaagcccggcgcccccagactgcagcccccccccaaccagagaggcctgtgcagcctggccgccgacggcctgtggaaccagaagatcctgttcgaggagcaggacctgagaaagcacggcctggacggcgaggacgtgagcgccttcctgaacatgaacatcttccagaaggacatcaactgcgagagatactacagcttcatccacctgagcttccaggagttcttcgccgccatgtactacatcctggacgagggcgagggcggcgccggccccgaccaggacgtgaccagactgctgaccgagtacgccttcagcgagagaagcttcctggccctgaccagcagattcctgttcggcctgctgaacgaggagaccagaagccacctggagaagagcctgtgctggaaggtgagcccccacatcaagatggacctgctgcagtggatccagagcaaggcccagagcgacggcagcaccctgcagcagggcagcctggagttcttcagctgcctgtacgagatccaggaggaggagttcatccagcaggccctgagccacttccaggtgatcgtggtgagcaacatcgccagcaagatggagcacatggtgagcagcttctgcctgaagagatgcagaagcgcccaggtgctgcacctgtacggcgccacctacagcgccgacggcgaggacagagccagatgcagcgccggcgcccacaccctgctggtgcagctgcccgagagaaccgtgctgctggacgcctacagcgagcacctggccgccgccctgtgcaccaaccccaacctgatcgagctgagcctgtacagaaacgccctgggcagcagaggcgtgaagctgctgtgccagggcctgagacaccccaactgcaagctgcagaacctgagactgaagagatgcagaatcagcagcagcgcctgcgaggacctgagcgccgccctgatcgccaacaagaacctgaccagaatggacctgagcggcaacggcgtgggcttccccggcatgatgctgctgtgcgagggcctgagacacccccagtgcagactgcagatgatccagctgagaaagtgccagctggagagcggcgcctgccaggagatggccagcgtgctgggcaccaacccccacctggtggagctggacctgaccggcaacgccctggaggacctgggcctgagactgctgtgccagggcctgagacaccccgtgtgcagactgagaaccctgtgctggatgctgttcggcatggacctgaacaagatgacccacagcagactggccgccctgagagtgaccaagccctacctggacatcggctgctag

SEQ ID NO: 10362 - DNA, 945 bp, synthetic construct
  source 1..945: mol_type = other DNA; note = Synthetic coding sequence
atgcagaccttcctgaagggcaagagagtgggctactggctgagcgagaagaagatcaagaagctgaacttccaggccttcgccgagctgtgcagaaagagaggcatggaggtggtgcagctgaacctgagcagacccatcgaggagcagggccccctggacgtgatcatccacaagctgaccgacgtgatcctggaggccgaccagaacgacagccagagcctggagctggtgcacagattccaggagtacatcgacgcccaccccgagaccatcgtgctggaccccctgcccgccatcagaaccctgctggacagaagcaagagctacgagctgatcagaaagatcgaggcctacatggaggacgacagaatctgcagcccccccttcatggagctgaccagcctgtgcggcgacgacaccatgagactgctggagaagaacggcctgaccttccccttcatctgcaagaccagagtggcccacggcaccaacagccacgagatggccatcgtgttcaaccaggagggcctgaacgccatccagcccccctgcgtggtgcagaacttcatcaaccacaacgccgtgctgtacaaggtgttcgtggtgggcgagagctacaccgtggtgcagagacccagcctgaagaacttcagcgccggcaccagcgacagagagagcatcttcttcaacagccacaacgtgagcaagcccgagagcagcagcgtgctgaccgagctggacaagatcgagggcgtgttcgagagacccagcgacgaggtgatcagagagctgagcagagccctgagacaggccctgggcgtgagcctgttcggcatcgacatcatcatcaacaaccagaccggccagcacgccgtgatcgacatcaacgccttccccggcgactgccaggtgtgcttcatcgagggctggaagaccgactag

SEQ ID NO: 10363 - DNA, 630 bp, synthetic construct
  source 1..630: mol_type = other DNA; note = Synthetic coding sequence
atgcccgtggccgtgatggccgagagcgccttcagcttcaagaagctgctggaccagtgcgagaaccaggagctggaggcccccggcggcatcgccaccccccccgtgtacggccagctgctggccctgtacctgctgcacaacgacatgaacaacgccagatacctgtggaagagaatcccccccgccatcaagagcgccaacagcgagctgggcggcatctggagcgtgggccagagaatctggcagagagacttccccggcatctacaccaccatcaacgcccaccagtggagcgagaccgtgcagcccatcatggaggccctgagagacgccaccagaagaagagccttcgccctggtgagccaggcctacaccagcatcatcgccgacgacttcgccgccttcgtgggcctgcccgtggaggaggccgtgaagggcatcctggagcagggctggcaggccgacagcaccaccagaatggtgctgcccagaaagcccgtggccggcgccctggacgtgagcttcaacaagttcatccccctgagcgagcccgcccccgtgccccccatccccaacgagcagcagctggccagactgaccgactacgtggccttcctggagaactag

SEQ ID NO: 10364 - DNA, 4935 bp, synthetic construct
  source 1..4935: mol_type = other DNA; note = Synthetic coding sequence
atgttctggtgcggcacctgcttcgtgaccaacaacatgaagggcagcgaggtgagcctggagaagaagaagaagatcaagatgcccgtgaagagactgagagaggtggtgagccagaaccacggcgaccacctggtgctgctgaaggacgagctgccctgcgtgccccccgccctgagcgccaacaagagactgcccgtgggcaccggcaccagcctgaacggcaccagcagaggcagcagcgacctgaccagcgccagaaactgctaccagcccctgctggagaaccccatggtgagcgagagcgacttcagcaaggacgtggccgtgcaggtgctgcccctggacaagatcgaggagaacaacaagcagaaggccaacgacatcttcatcagccagtacaccatgggccagaaggacgccctgagaaccgtgctgaagcagaacgtgagcctgtgcctgaccggctggagcgaccacagcggcgtgatcaccacccactgcagcctgtacctgctgagactgatgagaagcagccacctgagcctgcccagcagctgggactacagagcccagagcatgcccgtgttcaaggaggtgaaggtgcacctgctggaggacgccggcatcgagaaggacgccgtgacccaggagaccagaatcagccccagcggcatcgacagcgccaccaccgtggccgccgccaccgccgccgccatcgccaccgccgcccccctgatcaaggtgcagagcgacctggaggccaaggtgaacagcgtgaccgagctgctgagcaagctgcaggagaccgacaagcacctgcagagagtgaccgagcagcagaccagcatccagagaaagcaggagaagctgcactgccacgaccacgagaagcagatgaacgtgttcatggagcagcacatcagacacctggagaagctgcagcagcagcagatcgacatccagacccacttcatcagcgccgccctgaagaccagcagcttccagcccgtgagcatgcccagcagcagagccgtggagaagtacagcgtgaagcccgagcaccccaacctgggcagctgcaaccccagcctgtacaacaccttcgccagcaagcaggcccccctgaaggaggtggaggacaccagcttcgacaagcagaagagccccctggagacccccgcccccagaagattcgcccccgtgcccgtgagcagagacgacgagctgagcaagagagagaacctgctggaggagaaggagaacatggaggtgagctgccacagaggcaacgtgagactgctggagcagatcctgaacaacaacgacagcctgaccagaaagagcgagagcagcaacaccaccagcctgaccagaagcaagatcggctggacccccgagaagaccaacagattccccagctgcgaggagctggagaccaccaaggtgaccatgcagaagagcgacgacgtgctgcacgacctgggccagaaggagaaggagaccaacagcatggtgcagcccaaggagagcctgagcatgctgaagctgcccgacctgccccagaacagcgtgaagctgcagaccaccaacaccaccagaagcgtgctgaaggacgccgagaagatcctgagaggcgtgcagaacaacaagaaggtgctggaggagaacctggaggccatcatcagagccaaggacggcgccgccatgtacagcctgatcaacgccctgagcaccaacagagagatgagcgagaagatcagaatcagaaagaccgtggacgagtggatcaagaccatcagcgccgagatccaggacgagctgagcagaaccgactacgagcagaagagattcgaccagaagaaccagagaaccaagaagggccagaacatgaccaaggacatcagaaccaacacccaggacaagaccgtgaacaagagcgtgatccccagaaagcacagccagaagcagatcgaggagcacttcagaaacctgcccatgagaggcatgcccgccagcagcctgcagaaggagagaaaggagggcctgctgaaggccaccaccgtgatccaggacgaggactacatgctgcaggtgtacggcaagcccgtgtaccagggccacagaagcaccctgaagaagggcccctacctgagattcaacagccccagccccaagagcagaccccagagacccaaggtgatcgagagagtgaagggcaccaaggtgaagagcatcagaacccagaccgacttctacgccaccaagcccaagaagatggacagcaagatgaagcacagcgtgcccgtgctgccccacggcgaccagcagtacctgttcagccccagcagagagatgcccaccttcagcggcaccctggagggccacctgatccccatggccatcctgctgggccagacccagagcaacagcgacaccatgccccccgccggcgtgatcgtgagcaagccccaccccgtgaccgtgaccaccagcatcccccccagcagcagaaaggtggagaccggcgtgaagaagcccaacatcgccatcgtggagatgaagagcgagaagaaggaccccccccagctgaccgtgcaggtgctgcccagcgtggacatcgacagcatcagcaacagcagcgccgacgtgctgagccccctgagcagccccaaggaggccagcctgccccccgtgcagacctggatcaagacccccgagatcatgaaggtggacgaggaggaggtgaagttccccggcaccaacttcgacgagatcatcgacgtgatccaggaggaggagaagtgcgacgagatccccgacagcgagcccatcctggagttcaacagaagcgtgaaggccgacagcaccaagtacaacggcccccccttcccccccgtggccagcaccttccagcccaccgccgacatcctggacaaggtgatcgagagaaaggagaccctggagaacagcctgatccagtgggtggagcaggagatcatgagcagaatcatcagcggcctgttccccgtgcagcagcagatcgcccccagcatcagcgtgagcgtgagcgagaccagcgagcccctgaccagcgacatcgtggagggcaccagcagcggcgccctgcagctgttcgtggacgccggcgtgcccgtgaacagcaacgtgatcaagcacttcgtgaacgaggccctggccgagaccatcgccgtgatgctgggcgacagagaggccaagaagcagggccccgtggccaccggcgtgagcggcgacgccagcaccaacgagacctacctgcccgccagagtgtgcacccccctgcccaccccccagcccacccccccctgcagccccagcagccccgccaaggagtgcgtgctggtgaagacccccgacagcagcccctgcgacagcgaccacgacatggccttccccgtgaaggagatctgcgccgagaagggcgacgacatgcccgccatcatgctggtgaacacccccaccgtgacccccaccaccacccccccccccgccgccgccgtgttcacccccaccctgagcgacatcagcatcgacaagctgaaggtgagcagccccgagctgcccaagccctggggcgacggcgacctgcccctggaggaggagaaccccaacagcccccaggaggagctgcaccccagagccatcgtgatgagcgtggccaaggacgaggagcccgagagcatggacttccccgcccagccccccccccccgagcccgtgcccttcatgcccttccccgccggcaccaaggcccccagccccagccagatgcccggcagcgacagcagcaccctggagagcaccctgagcgtgaccgtgaccgagaccgagaccctggacaagcccatcagcgagggcgagatcctgttcagctgcggccagaagctggcccccaagatcctggaggacatcggcctgtacctgaccaacctgaacgacagcctgagcagcaccctgcacgacgccgtggagatggaggacgacccccccagcgagggccaggtgatcagaatgagccacaagaagttccacgccgacgccatcctgagcttcgccaagcagaaccaggagagcgccgtgagccagcaggccgtgtaccacagcgaggacctggagaacagcgtgggcgagctgagcgagggccagagaccccagctgaccgccgccgccgagaacatcctgatgggccacagcctgtacatgcagccccccgtgaccaacacccagagcctggaccagcagtgcgaccccaagcccctgagcagacagttcgacaccgtgagcggcagcatctacgaggacagctgcgccagccacggccccatgagcctgggcgagctggagctggagcccaacagcaagctggtgctgcccaccaccctgctgaccgcccaggagaacgacgtgaacctgcccgtggccgccgaggacttcagccagtaccagctgaagcagaaccaggacgtgaagcaggtggagcacaagcccagccagagctacctgagagtgagaaacaagagcgacatcgcccccagccagcagcaggtgagccccggcgacatggacagaacccagatcgagctgaacccctacctgacctgcgtgttcagcggcctgggcgtgcacgtgaagaaggtgagctgcatcggcaagctgggcctgtggagattcgtgatccagatcatcagcagccccagatgggagagcagcgccaccctgagattcaccgacgccccctgccaggacgtgagcgacgccgccgtgagcgagcccagaggcctgctgagcgtgagcgagagccagcacaacgccggcggccacggcgtgttcggcggcagatacctgctgaacggcaagagacagcccgcccagtgcctgtgccactggttctag

SEQ ID NO: 10365 - DNA, 3138 bp, synthetic construct
  source 1..3138: mol_type = other DNA; note = Synthetic coding sequence
atgctgaccgtgcaggtgaagaccagcagcgccatcgagctgcccgacagcctggccttcctgtggatcatccccatgtggtactgcgagggcaaggagctggagaacagccccgacatccacatcgtgcaggccggcaacctgcacagcctgaccatcgccgaggccttcgaggaggacaccggcagatacagctgcttcgccagcaacatctacggcaccgacagcaccagcgccgagatctacatcgagggcgtgagcagcagcgacagcgagggcgaccccaacaaggaggagatgaacagaatccagaagcccaacgaggtgagcagcccccccaccaccagcgccgtgatcccccccgccgtgccccaggcccagcacctggtggcccagcccagagtggccaccatccagcagtgccagagccccaccaactacctgcagggcctggacggcaagcccatcatcgccgcccccgtgttcaccaagatgctgcagaacctgagcgccagcgagggccagctggtggtgttcgagtgcagagtgaagggcgcccccagccccaaggtggagtggtacagagagggcaccctgatcgaggacagccccgacttcagaatcctgcagaagaagcccagaagcatggccgagcccgaggagatctgcaccctggtgatcgccgaggtgttcgccgaggacagcggctgcttcacctgcaccgccagcaacaagtacggcaccgtgagcagcatcgcccagctgcacgtgagaggcaacgaggacctgagcaacaacggcagcctgcacagcgccaacagcaccaccaacctggccgccatcgagccccagcccagccccccccacagcgagccccccagcgtggagcagccccccaagcccaagctggagggcgtgctggtgaaccacaacgagcccagaagcagcagcagaatcggcctgagagtgcacttcaacctgcccgaggacgacaagggcagcgaggccagcagcgaggccggcgtggtgaccaccagacagaccagacccgacagcttccaggagagattcaacggccaggccaccaagacccccgagcccagcagccccgtgaaggagcccccccccgtgctggccaagcccaagctggacagcacccagctgcagcagctgcacaaccaggtgctgctggagcagcaccagctgcagaaccccccccccagcagccccaaggagttccccttcagcatgaccgtgctgaacagcaacgccccccccgccgtgaccaccagcagcaagcaggtgaaggcccccagcagccagaccttcagcctggccagacccaagtacttcttccccagcaccaacaccaccgccgccaccgtggcccccagcagcagccccgtgttcaccctgagcagcaccccccagaccatccagagaaccgtgagcaaggagagcctgctggtgagccaccccagcgtgcagaccaagagccccggcggcctgagcatccagaacgagcccctgccccccggccccaccgagcccacccccccccccttcaccttcagcatccccagcggcaaccagttccagcccagatgcgtgagccccatccccgtgagccccaccagcagaatccagaaccccgtggccttcctgagcagcgtgctgcccagcctgcccgccatcccccccaccaacgccatgggcctgcccagaagcgcccccagcatgcccagccagggcctggccaagaagaacaccaagagcccccagcccgtgaacgacgacaacatcagagagaccaagaacgccgtgatcagagacctgggcaagaagatcaccttcagcgacgtgagacccaaccagcaggagtacaagatcagcagcttcgagcagagactgatgaacgagatcgagttcagactggagagaacccccgtggacgagagcgacgacgagatccagcacgacgagatccccaccggcaagtgcatcgcccccatcttcgacaagagactgaagcacttcagagtgaccgagggcagccccgtgaccttcacctgcaagatcgtgggcatccccgtgcccaaggtgtactggttcaaggacggcaagcagatcagcaagagaaacgagcactgcaagatgagaagagagggcgacggcacctgcagcctgcacatcgagagcaccaccagcgacgacgacggcaactacaccatcatggccgccaacccccagggcagaatcagctgcagcggccacctgatggtgcagagcctgcccatcagaagcagactgaccagcgccggccagagccacagaggcagaagcagagtgcaggagagagacaaggagcccctgcaggagagattcttcagaccccacttcctgcaggcccccggcgacatggtggcccacgagggcagactgtgcagactggactgcaaggtgagcggcctgcccccccccgagctgacctggctgctgaacggccagcccgtgctgcccgacgccagccacaagatgctggtgagagagaccggcgtgcacagcctgctgatcgaccccctgacccagagagacgccggcacctacaagtgcatcgccaccaacaagaccggccagaacagcttcagcctggagctgagcgtggtggccaaggaggtgaagaaggcccccgtgatcctggagaagctgcagaactgcggcgtgcccgagggccaccccgtgagactggagtgcagagtgatcggcatgcccccccccgtgttctactggaagaaggacaacgagaccatcccctgcaccagagagagaatcagcatgcaccaggacaccaccggctacgcctgcctgctgatccagcccgccaagaagagcgacgccggctggtacaccctgagcgccaagaacgaggccggcatcgtgagctgcaccgccagactggacatctacgcccagtggcaccaccagatccccccccccatgagcgtgagacccagcggcagcagatacggcagcctgaccagcaagggcctggacatcttcagcgccttcagcagcatggagagcaccatggtgtacagctgcagcagcagaagcgtggtggagagcgacgagctgtag

SEQ ID NO: 10366 - DNA, 951 bp, synthetic construct
  source 1..951: mol_type = other DNA; note = Synthetic coding sequence
atgacccccagcgagggcgccagagccggcaccggcagagagctggagatgctggacagcctgctggccctgggcggcctggtgctgctgagagacagcgtggagtgggagggcagaagcctgctgaaggccctggtgaagaagagcgccctgtgcggcgagcaggtgcacatcctgggctgcgaggtgagcgaggaggagttcagagagggcttcgacagcgacatcaacaacagactggtgtaccacgacttcttcagagaccccctgaactggagcaagaccgaggaggccttccccggcggccccctgggcgccctgagagccatgtgcaagagaaccgaccccgtgcccgtgaccatcgccctggacagcctgagctggctgctgctgagactgccctgcaccaccctgtgccaggtgctgcacgccgtgagccaccaggacagctgccccggcgacagcagcagcgtgggcaaggtgagcgtgctgggcctgctgcacgaggagctgcacggccccggccccgtgggcgccctgagcagcctggcccagaccgaggtgaccctgggcggcaccatgggccaggccagcgcccacatcctgtgcagaagacccagacagagacccaccgaccagacccagtggttcagcatcctgcccgacttcagcctggacctgcaggagggccccagcgtggagagccagccctacagcgacccccacatcccccccgtggaccccaccacccacctgaccttcaacctgcacctgagcaagaaggagagagaggccagagacagcctgatcctgcccttccagttcagcagcgagaagcagcaggccctgctgagacccagacccggccaggccaccagccacatcttctacgagcccgacgcctacgacgacctggaccaggaggaccccgacgacgacctggacatctag

SEQ ID NO: 10367 - DNA, 1473 bp, synthetic construct; identical to SEQ ID NO: 9885
  source 1..1473: mol_type = other DNA; note = Synthetic coding sequence

SEQ ID NO: 10368 - DNA, 1428 bp, synthetic construct
  source 1..1428: mol_type = other DNA; note = Synthetic coding sequence
atggaggccctgctggagggcatccagaacagaggccacggcggcggcttcctgaccagctgcgaggccgagctgcaggagctgatgaagcagatcgacatcatggtggcccacaagaagagcgagtgggagggcagaacccacgccctggagacctgcctgaagatcagagagcaggagctgaagagcctgagaagccagctggacgtgacccacaaggaggtgggcatgctgcaccagcaggtggaggagcacgagaagatcaagcaggagatgaccatggagtacaagcaggagctgaagaagctgcacgaggagctgtgcatcctgaagagaagctacgagaagctgcagaagaagcagatgagagagttcagaggcaacaccaagaaccacagagaggacagaagcgagatcgagagactgaccgccaagatcgaggagttcagacagaagagcctggactgggagaagcagagactgatctaccagcagcaggtgagcagcctggaggcccagagaaaggccctggccgagcagagcgagatcatccaggcccagctggtgaacagaaagcagaagctggagagcgtggagctgagcagccagagcgagatccagcacctgagcagcaagctggagagagccaacgacaccatctgcgccaacgagctggagatcgagagactgaccatgagagtgaacgacctggtgggcaccagcatgaccgtgctgcaggagcagcagcagaaggaggagaagctgagagagagcgagaagctgctggaggccctgcaggaggagaagagagagctgaaggccgccctgcagagccaggagaacctgatccacgaggccagaatccagaaggagaagctgcaggagaaggtgaaggccaccaacacccagcacgccgtggaggccatcagcctggagagcgtgagcgccacctgcaagcagctgagccaggagctgatggagaagtacgaggagctgaagagaatggaggcccacaacaacgagtacaaggccgagatcaagaagctgaaggagcagatcctgcagggcgagcagagctacagcagcgccctggagggcatgaagatggagatcagccacctgacccaggagctgcaccagagagacatcaccatcgccagcaccaagggcagcagcagcgacatggagaagagactgagagccgagatgcagaaggccgaggacaaggccgtggagcacaaggagatcctggaccagctggagagcctgaagctggagaacagacacctgagcgagatggtgatgaagctggagctgggcctgcacgagagatggggcttcaccatgctgagcagcctggtgctgaacttcggcatccaggccatcagacagccccagagacccaaggtgctggagctgcaggtgtag

SEQ ID NO: 10369 - DNA, 2340 bp, synthetic construct
  source 1..2340: mol_type = other DNA; note = Synthetic coding sequence
atgagaatcgaggagagaaagagccagcacctgaccggcctgaccgacgagaaggtgaaggcctacctgagcctgcacccccaggtgctggacgagttcgtgagcgagagcgtgagcgccgagaccgtggagaagtggctgaagagaaagaacaacaagagcgaggacgagagcgcccccaaggaggtgagcagataccaggacaccaacatgcagggcgtggtgtacgagctgaacagctacatcgagcagagactggacaccggcggcgacaaccagctgctgctgtacgagctgagcagcatcatcaagatcgccaccaaggccgacggcttcgccctgtacttcctgggcgagtgcaacaacagcctgtgcatcttcaccccccccggcatcaaggagggcaagcccagactgatccccgccggccccatcacccagggcaccaccgtgagcgcctacgtggccaagagcagaaagaccctgctggtggaggacatcctgggcgacgagagattccccagaggcaccggcctggagagcggcaccagaatccagagcgtgctgtgcctgcccatcgtgaccgccatcggcgacctgatcggcatcctggagctgtacagacactggggcaaggaggccttctgcctgagccaccaggaggtggccaccgccaacctggcctgggccagcgtggccatccaccaggtgcaggtgtgcagaggcctggccaagcagaccgagctgaacgacttcctgctggacgtgagcaagacctacttcgacaacatcgtggccatcgacagcctgctggagcacatcatgatctacgccaagaacctggtgaacgccgacagatgcgccctgttccaggtggaccacaagaacaaggagctgtacagcgacctgttcgacatcggcgaggagaaggagggcaagcccgtgttcaagaagaccaaggagatcagattcagcatcgagaagggcatcgccggccaggtggccagaaccggcgaggtgctgaacatccccgacgcctacgccgaccccagattcaacagagaggtggacctgtacaccggctacaccaccagaaacatcctgtgcatgcccatcgtgagcagaggcagcgtgatcggcgtggtgcagatggtgaacaagatcagcggcagcgccttcagcaagaccgacgagaacaacttcaagatgttcgccgtgttctgcgccctggccctgcactgcgccaacatgtaccacagaatcagacacagcgagtgcatctacagagtgaccatggagaagctgagctaccacagcatctgcaccagcgaggagtggcagggcctgatgcagttcaccctgcccgtgagactgtgcaaggagatcgagctgttccacttcgacatcggccccttcgagaacatgtggcccggcatcttcgtgtacatggtgcacagaagctgcggcaccagctgcttcgagctggagaagctgtgcagattcatcatgagcgtgaagaagaactacagaagagtgccctaccacaactggaagcacgccgtgaccgtggcccactgcatgtacgccatcctgcagaacaaccacaccctgttcaccgacctggagagaaagggcctgctgatcgcctgcctgtgccacgacctggaccacagaggcttcagcaacagctacctgcagaagttcgaccaccccctggccgccctgtacagcaccagcaccatggagcagcaccacttcagccagaccgtgagcatcctgcagctggagggccacaacatcttcagcaccctgagcagcagcgagtacgagcaggtgctggagatcatcagaaaggccatcatcgccaccgacctggccctgtacttcggcaacagaaagcagctggaggagatgtaccagaccggcagcctgaacctgaacaaccagagccacagagacagagtgatcggcctgatgatgaccgcctgcgacctgtgcagcgtgaccaagctgtggcccgtgaccaagctgaccgccaacgacatctacgccgagttctgggccgagggcgacgagatgaagaagctgggcatccagcccatccccatgatggacagagacaagaaggacgaggtgccccagggccagctgggcttctacaacgccgtggccatcccctgctacaccaccctgacccagatcctgccccccaccgagcccctgctgaaggcctgcagagacaacctgagccagtgggagaaggtgatcagaggcgaggagaccgccacctggatcagcagccccagcgtggcccagaaggccgccgccagcgaggactag

SEQ ID NO: 10370 - DNA, 2112 bp, synthetic construct
  source 1..2112: mol_type = other DNA; note = Synthetic coding sequence
atggccgccgccaccggcgaccccggcctgagcaagctgcagttcgcccccttcagcagcgccctggacgtgggcttctggcacgagctgacccagaagaagctgaacgagtacagactggacgaggcccccaaggacatcaagggctactactacaacggcgacagcgccggcctgcccgccagactgaccctggagttcagcgccttcgacatgagcgcccccacccccgccagatgctgccccgccatcggcaccctgtacaacaccaacaccctggagagcttcaagaccgccgacaagaagctgctgctggagcaggccgccaacgagatctgggagagcatcaagagcggcaccgccctggagaaccccgtgctgctgaacaagttcctgctgctgaccttcgccgacctgaagaagtaccacttctactactggttctgctaccccgccctgtgcctgcccgagagcctgcccctgatccagggccccgtgggcctggaccagagattcagcctgaagcagatcgaggccctggagtgcgcctacgacaacctgtgccagaccgagggcgtgaccgccctgccctacttcctgatcaagtacgacgagaacatggtgctggtgagcctgctgaagcactacagcgacttcttccagggccagagaaccaagatcaccatcggcgtgtacgacccctgcaacctggcccagtaccccggctggcccctgagaaacttcctggtgctggccgcccacagatggagcagcagcttccagagcgtggaggtggtgtgcttcagagacagaaccatgcagggcgccagagacgtggcccacagcatcatcttcgaggtgaagctgcccgagatggccttcagccccgactgccccaaggccgtgggctgggagaagaaccagaagggcggcatgggccccagaatggtgaacctgagcgagtgcatggaccccaagagactggccgagagcagcgtggacctgaacctgaagctgatgtgctggagactggtgcccaccctggacctggacaaggtggtgagcgtgaagtgcctgctgctgggcgccggcaccctgggctgcaacgtggccagaaccctgatgggctggggcgtgagacacatcaccttcgtggacaacgccaagatcagctacagcaaccccgtgagacagcccctgtacgagttcgaggactgcctgggcggcggcaagcccaaggccctggccgccgccgacagactgcagaagatcttccccggcgtgaacgccagaggcttcaacatgagcatccccatgcccggccaccccgtgaacttcagcagcgtgaccctggagcaggccagaagagacgtggagcagctggagcagctgatcgagagccacgacgtggtgttcctgctgatggacaccagagagagcagatggctgcccgccgtgatcgccgccagcaagagaaagctggtgatcaacgccgccctgggcttcgacaccttcgtggtgatgagacacggcctgaagaagcccaagcagcagggcgccggcgacctgtgccccaaccaccccgtggccagcgccgacctgctgggcagcagcctgttcgccaacatccccggctacaagctgggctgctacttctgcaacgacgtggtggcccccggcgacagcaccagagacagaaccctggaccagcagtgcaccgtgagcagacccggcctggccgtgatcgccggcgccctggccgtggagctgatggtgagcgtgctgcagcaccccgagggcggctacgccatcgccagcagcagcgacgacagaatgaacgagccccccaccagcctgggcctggtgccccaccagatcagaggcttcctgagcagattcgacaacgtgctgcccgtgagcctggccttcgacaagtgcaccgcctgcagcagcaaggtgctggaccagtacgagagagagggcttcaacttcctggccaaggtgttcaacagcagccacagcttcctggaggacctgaccggcctgaccctgctgcaccaggagacccaggccgccgagatctgggacatgagcgacgacgagaccatctag

SEQ ID NO: 10371 - DNA, 3246 bp, synthetic construct
  source 1..3246: mol_type = other DNA; note = Synthetic coding sequence
atggagagcgccggcctggagcagctgctgagagagctgctgctgcccgacaccgagagaatcagaagagccaccgagcagctgcagatcgtgctgagagcccccgccgccctgcccgccctgtgcgacctgctggccagcgccgccgacccccagatcagacagttcgccgccgtgctgaccagaagaagactgaacaccagatggagaagactggccgccgagcagagagagagcctgaagagcctgatcctgaccgccctgcagagagagaccgagcactgcgtgagcctgagcctggcccagctgagcgccaccatcttcagaaaggagggcctggaggcctggccccagctgctgcagctgctgcagcacagcacccacagcccccacagccccgagagagagatgggcctgctgctgctgagcgtggtggtgaccagcagacccgaggccttccagccccaccacagagagctgctgagactgctgaacgagaccctgggcgaggtgggcagccccggcctgctgttctacagcctgagaaccctgaccaccatggccccctacctgagcaccgaggacgtgcccctggccagaatgctggtgcccaagctgatcatggccatgcagaccctgatccccatcgacgaggccaaggcctgcgaggccctggaggccctggacgagctgctggagagcgaggtgcccgtgatcaccccctacctgagcgaggtgctgaccttctgcctggaggtggccagaaacgtggccctgggcaacgccatcagaatcagaatcctgtgctgcctgaccttcctggtgaaggtgaagagcaaggccctgctgaagaacagactgctgccccccctgctgcacaccctgttccccatcgtggccgccgagcccccccccggccagctggaccccgaggaccaggacagcgaggaggaggagctggagatcgagctgatgggcgagacccccaagcacttcgccgtgcaggtggtggacatgctggccctgcacctgccccccgagaagctgtgcccccagctgatgcccatgctggaggaggccctgagaagcgagagcccctaccagagaaaggccggcctgctggtgctggccgtgctgagcgacggcgccggcgaccacatcagacagagactgctgccccccctgctgcagatcgtgtgcaagggcctggaggaccccagccaggtggtgagaaacgccgccctgttcgccctgggccagttcagcgagaacctgcagccccacatcagcagctacagcagagaggtgatgcccctgctgctggcctacctgaagagcgtgcccctgggccacacccaccacctggccaaggcctgctacgccctggagaacttcgtggagaacctgggccccaaggtgcagccctacctgcccgagctgatggagtgcatgctgcagctgctgagaaaccccagcagccccagagccaaggagctggccgtgagcgccctgggcgccatcgccaccgccgcccaggccagcctgctgccctacttccccgccatcatggagcacctgagagagttcctgctgaccggcagagaggacctgcagcccgtgcagatccagagcctggagaccctgggcgtgctggccagagccgtgggcgagcccatgagacccctggccgaggagtgctgccagctgggcctgggcctgtgcgaccaggtggacgaccccgacctgagaagatgcacctacagcctgttcgccgccctgagcggcctgatgggcgagggcctggccccccacctggagcagatcaccaccctgatgctgctgagcctgagaagcaccgagggcatcgtgccccagtacgacggcagcagcagcttcctgctgttcgacgacgagagcgacggcgaggaggaggaggagctgatggacgaggacgtggaggaggaggacgacagcgagatcagcggctacagcgtggagaacgccttcttcgacgagaaggaggacacctgcgccgccgtgggcgagatcagcgtgaacaccagcgtggccttcctgccctacatggagagcgtgttcgaggaggtgttcaagctgctggagtgcccccacctgaacgtgagaaaggccgcccacgaggccctgggccagttctgctgcgccctgcacaaggcctgccagagctgccccagcgagcccaacaccgccgccctgcaggccgccctggccagagtggtgcccagctacatgcaggccgtgaacagagagagagagagacaggtggtgatggccgtgctggaggccctgaccggcgtgctgagaagctgcggcaccctgaccctgaagccccccggcagactggccgagctgtgcggcgtgctgaaggccgtgctgcagagaaagaccgcctgccaggacaccgacgaggaggaggaggaggaggacgacgaccaggccgagtacgacgccatgctgctggagcacgccggcgaggccatccccgccctggccgccgccgccggcggcgacagcttcgcccccttcttcgccggcttcctgcccctgctggtgtgcaagaccaagcagggctgcaccgtggccgagaagagcttcgccgtgggcaccctggccgagaccatccagggcctgggcgccgccagcgcccagttcgtgagcagactgctgcccgtgctgctgagcaccgcccaggaggccgaccccgaggtgagaagcaacgccatcttcggcatgggcgtgctggccgagcacggcggccaccccgcccaggagcacttccccaagctgctgggcctgctgttccccctgctggccagagagagacacgacagagtgagagacaacatctgcggcgccctggccagactgctgatggccagccccaccagaaagcccgagccccaggtgctggccgccctgctgcacgccctgcccctgaaggaggacctggaggagtgggtgaccatcggcagactgttcagcttcctgtaccagagcagccccgaccaggtgatcgacgtggcccccgagctgctgagaatctgcagcctgatcctggccgacaacaagatcccccccgacaccaaggccgccctgctgctgctgctgaccttcctggccaagcagcacaccgacagcttccaggccgccctgggcagcctgcccgtggacaaggcccaggagctgcaggccgtgctgggcctgagctag

SEQ ID NO: 10372 - DNA, 7224 bp, synthetic construct
  source 1..7224: mol_type = other DNA; note = Synthetic coding sequence
atggtgggcgagagacacgccggcgacctgatggtgcccctgggccccagactgcaggcctaccccgaggagctgatcagacagagacccggccacgacggccaccccgagtacctgatcagatggagcgtgctgaagtgcggcgaggtgggcaaggtgggcgtggaggagggcaaggccgagcacatcctgatgtggctgagcgcccccgaggtgtacgccaactgccccggcctgctgggcgagagagccctgagcaagggcctgcagcacgagcccgccggcgtgagcggcagcttccccagagaccccggcggcctggacgaggtggccatgggcgagatggaggccgacgtgcaggccctggtgagaagagccgccagacagctggccgagagcggcacccccagcctgaccgccgccgtgctgcacaccatccacgtgctgagcgcctacgccagcatcggccccctgaccggcgtgttcagagagaccggcgccctggacctgctgatgcacatgctgtgcaaccccgagccccagatcagaagaagcgccggcaagatgctgcaggccctggccgcccacgacgccggcagcagagcccacgtgctgctgagcctgagccagcaggacggcatcgagcagcacatggacttcgacagcagatacaccctgctggagctgttcgccgagaccaccagcagcgaggagcactgcatggccttcgagggcatccacctgccccagatccccggcaagctgctgttcagcctggtgaagagatacctgtgcgtgaccagcctgctggaccagctgaacagcagccccgagctgggcgccggcgaccagagcagcccctgcgccaccagagagaagagcagaggccagagagagctggagttcagcatggccgtgggcaacctgatcagcgagctggtgagaagcatgggctgggccagaaacctgagcgagcagggcatgagcccccccagacccaccagaagcatcttccagccctacatcagcggccccagcctgctgctgcccaccatcgtgaccacccccagaagacagggctgggtgttcagacagagaagcgagttcagcagcagaagcggctacggcgagtacgtgcagcagaccctgcagcccggcatgagagtgagaatgctggacgactacgaggagatcagcgccggcgacgagggcgagttcagacagagcaacaacggcatcccccccgtgcagaccctgggcgagaaggccctgggcgagatcagcgtgagcgtggagatggccgagagcctgctgcaggtgctgagcagcagattcgagggcagcaccctgaacgacctgctgaacagccagatctacaccaagtacggcctgctgagcaacgagcccagcagcagcagcaccagcagaaaccacagctgcacccccgaccccgaggaggagagcaagagcgaggccagcttcagcgaggaggagaccgagagcctgaaggccaaggccgaggcccccaagaccgaggccgagcccaccaagaccagaaccgagacccccatggcccagagcgacagccagctgttcaaccagctgctggtgaccgagggcatgaccctgcccaccgagatgaaggaggccgccagcgagatggccagagccctgagaggccccggccccagaagcagcctggaccagcacgtggccgccgtggtggccaccgtgcagatcagcagcctggacaccaacctgcagctgagcggcctgagcgccctgagccaggccgtggaggaggtgaccgagagagaccaccccctggtgagacccgacagaagcctgagagagaagctggtgaagatgctggtggagctgctgaccaaccaggtgggcgagaagatggtggtggtgcaggccctgagactgctgtacctgctgatgaccaagcacgagtggagacccctgttcgccagagagggcggcatctacgccgtgctggtgtgcatgcaggagtacaagaccagcgtgctggtgcagcaggccggcctggccgccctgaagatgctggccgtggccagcagcagcgagatccccaccttcgtgaccggcagagacagcatccacagcctgttcgacgcccagatgaccagagagatcttcgccagcatcgacagcgccaccagacccggcagcgagagcctgctgctgaccgtgcccgccgccgtgatcctgatgctgaacaccgagggctgcagcagcgccgccagaaacggcctgctgctgctgaacctgctgctgtgcaaccaccacaccctgggcgaccagatcatcacccaggagctgagagacaccctgttcagacacagcggcatcgcccccagaaccgagcccatgcccaccaccagaaccatcctgatgatgctgctgaacagatacagcgagccccccggcagccccgagagagccgccctggagacccccatcatccagggccaggacggcagccccgagctgctgatcagaagcctggtgggcggccccagcgccgagctgctgctggacctggagagagtgctgtgcagagagggcagccccggcggcgccgtgagacccctgctgaagagactgcagcaggagacccagcccttcctgctgctgctgagaaccctggacgcccccggccccaacaagaccctgctgctgagcgtgctgagagtgatcaccagactgctggacttccccgaggccatggtgctgccctggcacgaggtgctggagccctgcctgaactgcctgagcggccccagcagcgacagcgagatcgtgcaggagctgacctgcttcctgcacagactggccagcatgcacaaggactacgccgtggtgctgtgctgcctgggcgccaaggagatcctgagcaaggtgctggacaagcacagcgcccagctgctgctgggctgcgagctgagagacctggtgaccgagtgcgagaagtacgcccagctgtacagcaacctgaccagcagcatcctggccggctgcatccagatggtgctgggccagatcgaggaccacagaagaacccaccagcccatcaacatccccttcttcgacgtgttcctgagacacctgtgccagggcagcagcgtggaggtgaaggaggacaagtgctgggagaaggtggaggtgagcagcaacccccacagagccagcaagctgaccgaccacaaccccaagacctactgggagagcaacggcagcaccggcagccactacatcaccctgcacatgcacagaggcgtgctggtgagacagctgaccctgctggtggccagcgaggacagcagctacatgcccgccagagtggtggtgttcggcggcgacagcaccagctgcatcggcaccgagctgaacaccgtgaacgtgatgcccagcgccagcagagtgatcctgctggagaacctgaacagattctggcccatcatccagatcagaatcaagagatgccagcagggcggcatcgacaccagagtgagaggcgtggaggtgctgggccccaagcccaccttctggcccctgttcagagagcagctgtgcagaagaacctgcctgttctacaccatcagagcccaggcctggagcagagacatcgccgaggaccacagaagactgctgcagctgtgccccagactgaacagagtgctgagacacgagcagaacttcgccgacagattcctgcccgacgacgaggccgcccaggccctgggcaagacctgctgggaggccctggtgagccccctggtgcagaacatcaccagccccgacgccgagggcgtgagcgccctgggctggctgctggaccagtacctggagcagagagagaccagcagaaaccccctgagcagagccgccagcttcgccagcagagtgagaagactgtgccacctgctggtgcacgtggagcccccccccggccccagccccgagcccagcaccagacccttcagcaagaacagcaagggcagagacagaagccccgcccccagccccgtgctgcccagcagcagcctgagaaacatcacccagtgctggctgagcgtggtgcaggagcaggtgagcagattcctggccgccgcctggagagcccccgacttcgtgcccagatactgcaagctgtacgagcacctgcagagagccggcagcgagctgttcggccccagagccgccttcatgctggccctgagaagcggcttcagcggcgccctgctgcagcagagcttcctgaccgccgcccacatgagcgagcagttcgccagatacatcgaccagcagatccagggcggcctgatcggcggcgcccccggcgtggagatgctgggccagctgcagagacacctggagcccatcatggtgctgagcggcctggagctggccaccaccttcgagcacttctaccagcactacatggccgacagactgctgagcttcggcagcagctggctggagggcgccgtgctggagcagatcggcctgtgcttccccaacagactgccccagctgatgctgcagagcctgagcaccagcgaggagctgcagagacagttccacctgttccagctgcagagactggacaagctgttcctggagcaggaggacgaggaggagaagagactggaggaggaggaggaggaggaggaggaggaggaggccgagaaggagctgttcatcgaggaccccagccccgccatcagcatcctggtgctgagccccagatgctggcccgtgagccccctgtgctacctgtaccaccccagaaagtgcctgcccaccgagttctgcgacgccctggacagattcagcagcttctacagccagagccagaaccaccccgtgctggacatgggcccccacagaagactgcagtggacctggctgggcagagccgagctgcagttcggcaagcagatcctgcacgtgagcaccgtgcagatgtggctgctgctgaagttcaaccagaccgaggaggtgagcgtggagaccctgctgaaggacagcgacctgagccccgagctgctgctgcaggccctggtgcccctgaccagcggcaacggccccctgaccctgcacgagggccaggacttcccccacggcggcgtgctgagactgcacgagcccggcccccagagaagcggcgaggccctgtggctgatccccccccaggcctacctgaacgtggagaaggacgagggcagaaccctggagcagaagagaaacctgctgagctgcctgctggtgagaatcctgaaggcccacggcgagaagggcctgcacatcgaccagctggtgtgcctggtgctggaggcctggcagaagggccccaacccccccggcaccctgggccacaccgtggccggcggcgtggcctgcaccagcaccgacgtgctgagctgcatcctgcacctgctgggccagggctacgtgaagagaagagacgacagaccccagatcctgatgtacgccgcccccgagcccatgggcccctgcagaggccaggccgacgtgcccttctgcggcagccagagcgagaccagcaagcccagccccgaggccgtggccaccctggccagcctgcagctgcccgccggcagaaccatgagcccccaggaggtggagggcctgatgaagcagaccgtgagacaggtgcaggagaccctgaacctggagcccgacgtggcccagcacctgctggcccacagccactggggcgccgagcagctgctgcagagctacagcgaggaccccgagcccctgctgctggccgccggcctgtgcgtgcaccaggcccaggccgtgcccgtgagacccgaccactgccccgtgtgcgtgagccccctgggctgcgacgacgacctgcccagcctgtgctgcatgcactactgctgcaagagctgctggaacgagtacctgaccaccagaatcgagcagaacctggtgctgaactgcacctgccccatcgccgactgccccgcccagcccaccggcgccttcatcagagccatcgtgagcagccccgaggtgatcagcaagtacgagaaggccctgctgagaggctacgtggagagctgcagcaacctgacctggtgcaccaacccccagggctgcgacagaatcctgtgcagacagggcctgggctgcggcaccacctgcagcaagtgcggctgggccagctgcttcaactgcagcttccccgaggcccactaccccgccagctgcggccacatgagccagtgggtggacgacggcggctactacgacggcatgagcgtggaggcccagagcaagcacctggccaagctgatcagcaagagatgccccagctgccaggcccccatcgagaagaacgagggctgcctgcacatgacctgcgccaagtgcaaccacggcttctgctggagatgcctgaagagctggaagcccaaccacaaggactactacaactgcagcgccatggtgagcaaggccgccagacaggagaagagattccaggactacaacgagagatgcaccttccaccaccaggccagagagttcgccgtgaacctgagaaacagagtgagcgccatccacgaggtgcccccccccagaagcttcaccttcctgaacgacgcctgccagggcctggagcaggccagaaaggtgctggcctacgcctgcgtgtacagcttctacagccaggacgccgagtacatggacgtggtggagcagcagaccgagaacctggagctgcacaccaacgccctgcagatcctgctggaggagaccctgctgagatgcagagacctggccagcagcctgagactgctgagagccgactgcctgagcaccggcatggagctgctgagaagaatccaggagagactgctggccatcctgcagcacagcgcccaggacttcagagtgggcctgcagagccccagcgtggaggcctgggaggccaagggccccaacatgcccggcagccagccccaggccagcagcggccccgaggccgaggaggaggaggaggacgacgaggacgacgtgcccgagtggcagcaggacgagttcgacgaggagctggacaacgacagcttcagctacgacgagagcgagaacctggaccaggagaccttcttcttcggcgacgaggaggaggacgaggacgaggcctacgactag

SEQ ID NO: 10373 - DNA, 672 bp, synthetic construct
  source 1..672: mol_type = other DNA; note = Synthetic coding sequence
atggaggacgtgaagctggagttccccagcctgccccagtgcaaggaggacgccgaggagtggacctaccccatgagaagagagatgcaggagatcctgcccggcctgttcctgggcccctacagcagcgccatgaagagcaagctgcccgtgctgcagaagcacggcatcacccacatcatctgcatcagacagaacatcgaggccaacttcatcaagcccaacttccagcagctgttcagatacctggtgctggacatcgccgacaaccccgtggagaacatcatcagattcttccccatgaccaaggagttcatcgacggcagcctgcagatgggcggcaaggtgctggtgcacggcaacgccggcatcagcagaagcgccgccttcgtgatcgcctacatcatggagaccttcggcatgaagtacagagacgccttcgcctacgtgcaggagagaagattctgcatcaaccccaacgccggcttcgtgcaccagctgcaggagtacgaggccatctacctggccaagctgaccatccagatgatgagccccctgcagatcgagagaagcctgagcgtgcacagcggcaccaccggcagcctgaagagaacccacgaggaggaggacgacttcggcaccatgcaggtggccaccgcccagaacggctag

SEQ ID NO: 10374 - DNA, 1689 bp, synthetic construct
  source 1..1689: mol_type = other DNA; note = Synthetic coding sequence
atggacgacaagggcgaccccagcaacgaggaggcccccaaggccatcaagcccaccagcaaggagttcagaaagacctggggcttcagaagaaccaccatcgccaagagagagggcgccggcgacgccgaggccgaccccctggagcccccccccccccagcagcagctgggcctgagcctgagaagaagcggcagacagcccaagagaaccgagagagtggagcagttcctgaccatcgccagaagaagaggcagaagaagcatgcccgtgagcctggaggacagcggcgagcccaccagctgccccgccaccgacgccgagaccgccagcgagggcagcgtggagagcgccagcgagaccagaagcggcccccagagcgccagcaccgccgtgaaggagagacccgccagcagcgagaaggtgaagggcggcgacgaccacgacgacaccagcgacagcgacagcgacggcctgaccctgaaggagctgcagaacagactgagaagaaagagagagcaggagcccaccgagagacccctgaagggcatccagagcagactgagaaagaagagaagagaggagggccccgccgagaccgtgggcagcgaggccagcgacaccgtggagggcgtgctgcccagcaagcaggagcccgagaacgaccagggcgtggtgagccaggccggcaaggacgacagagagagcaagctggagggcaaggccgcccaggacatcaaggacgaggagcccggcgacctgggcagacccaagcccgagtgcgagggctacgaccccaacgccctgtactgcatctgcagacagccccacaacaacagattcatgatctgctgcgacagatgcgaggagtggttccacggcgactgcgtgggcatcagcgaggccagaggcagactgctggagagaaacggcgaggactacatctgccccaactgcaccatcctgcaggtgcaggacgagacccacagcgagaccgccgaccagcaggaggccaagtggagacccggcgacgccgacggcaccgactgcaccagcatcggcaccatcgagcagaagagcagcgaggaccagggcatcaagggcagaatcgagaaggccgccaaccccagcggcaagaagaagctgaagatcttccagcccgtgatcgaggcccccggcgccagcaagtgcatcggccccggctgctgccacgtggcccagcccgacagcgtgtactgcagcaacgactgcatcctgaagcacgccgccgccaccatgaagttcctgagcagcggcaaggagcagaagcccaagcccaaggagaagatgaagatgaagcccgagaagcccagcctgcccaagtgcggcgcccaggccggcatcaagatcagcagcgtgcacaagagacccgcccccgagaagaaggagaccaccgtgaagaaggccgtggtggtgcccgccagaagcgaggccctgggcaaggaggccgcctgcgagagcagcacccccagctgggccagcgaccacaactacaacgccgtgaagcccgagaagaccgccgcccccagccccagcctgctgtacaagtgcatgtaccacctgggcgtgggcctgctggaccccagcagaagcttctggatcgccatcccctgggcctgccccggcctgggcgtggccgccctgtgctag

SEQ ID NO: 10375 - DNA, 360 bp, synthetic construct
  source 1..360: mol_type = other DNA; note = Synthetic coding sequence
atgatcctgcagcagcccctgcagagaggcccccagggcggcgcccagagactgcccagagccgccctgggcgtgacctggggcctggacgccagagagcccctgagaaagcagttcctgagcgaggagaacatggccacccacttcagccagctgagcctgcacaacgaccacccctactgcagcccccccatgaccttcagccccgccctgccccccctgagaagcccctgcagcgagctgctgctgtggagataccccggcagcctgatccccgaggccctgagactgctgagactgggcgacacccccagccccccctaccccgccacccccgccggcgacatcatggagctgtag

SEQ ID NO: 10376 - DNA, 1794 bp, synthetic construct
  source 1..1794: mol_type = other DNA; note = Synthetic coding sequence
atggtgcccgaggagagaagagtgggcctgagcagcgacgagaccagcagcgacagcctgaagagctggcacagcatctgcgtgctggacagcaaggagcagcccctggcctgccagcagaagcagagacagttcgtgaagcccgtgaccgagagcgagcagcccaccgtgctggagctgctgctggccgagctgagaaccctgttcagcgccgtgctgcaggacagcagccccgccgcctggagatacctgcacgccgtgctgggcctgctgcccccctacagagagctgctggtgggccacctggacctgctgcccttcctggagcagctgtactgctgggccccctgggtgcagacccacctgcacctggacctgctgggcgccatcgtgcaggccttcccccccgacagcagcctgctggacagcgccagccacgccgactgctgcccccagaagagaagactgcaccacagacccccctgccccgcctgccccttcgtgcaggcccagtggagcagacagcaggtgaaggaggagctggccacctggctgagacccctgaccctgcccgagctgcagagatgcctgggcatcgtgggcgcccaggtggccctggaggaggccgtgtggctggacggcctgagcctgctgcccctggccctggccgccgacatccccgtgagatacgagagcagcgacaccgacaacgccgaggtggagcccgtgggcagaaaggagaccagaagccagctggactacgaggtgcccagagagaaggccttccagaagagcagcaccggcttcagccccgagaccagcttcctggacagccaggtgatgaccgccctgaagatggagagatacctgaagaagatccacttcctgtacctgaacgtggcccccagcagatacttcagaccctacagcctgatggtggtgccccccgacaaggtgaaccccgagcactacatcttcagccccttcggcatcctgcacgtgcaccccgtggagggcagcgagaccatgaccctgggcacctggcaccaccactgcgtgctgtggcagcagctgcagttcatccccttcttcaagtactgcctgctgagaaagagcttcacctgctggaagaagaacgtgagactgcagggcctgcacagactgcagaagttcctggagaaccacctgctgctggccgtgccccacttcggcgccggcctgctgcacatcagcagactgctgcaggagctgcacagcgtgagctggctgccccaggagctggacagatgctacgagctgctggacctgcagaccgccctggccgaggagaagcacaaggccctgagactgctgcacagatgcctgaacctgtgcaccagcatcctgagactggtgcacgaggacacctaccacatgcagcagtgcctgcaggagagagtgcagaactgcgacagaatcagaaccggccagggcagcatctacctgcagagagtgcagcacaagcagctggagcagaagctgaagcaggccgaggcctggtggctgcagctgggcaagttcgccagactggtggactacatgatctgccagagcctgatcagcgtgctggaggagcagatcaccagcttcgtggccaacatcctgcaggcccccagacagaagcccttcctgagcagccagctggtgttcgacgaccacggccagctgagccacgtgccctgcgtggagaacatgatccagaccctgaccggcggcctgcagagcgtgaagaccagcgccctgcaggtgttctag

SEQ ID NO: 10377 - DNA, 591 bp, synthetic construct
  source 1..591: mol_type = other DNA; note = Synthetic coding sequence
atggaggacctgttcgagaccttccaggacgagatgggcttcagcaacatggaggacgacggccccgaggaggaggagagagtggccgagccccaggccaacttcaacaccccccaggccctgagattcgaggagctgctggccaacctgctgaacgagcagcaccagatcgccaaggagctgttcgagcagctgaagatgaagaagcccagcgccaagcagcagaaggaggtggagaaggtgaagccccagtgcaaggaggtgcaccagaccctgatcctggaccccgcccagagaaagagactgcagcagcagatgcagcagcacgtgcagctgctgacccagatccacctgctggccacctgcaaccccaacctgaaccccgaggccagcagcaccagaatctgcctgaaggagctgggcaccttcgcccagagcagcatcgccctgcaccaccagtacaaccccaagttccagaccctgttccagccctgcaacctgatgggcgccatgcagctgatcgaggacttcagcacccacgtgagcatcgactgcagcccccacaagaccgtgaagaagaccgtgtgctag

SEQ ID NO: 10378 - DNA, 888 bp, synthetic construct; identical to SEQ ID NO: 10194
  source 1..888: mol_type = other DNA; note = Synthetic coding sequence

SEQ ID NO: 10379 - DNA, 915 bp, synthetic construct
  source 1..915: mol_type = other DNA; note = Synthetic coding sequence
atgaagagagcccaccccgagtacagcagcagcgacagcgagctggacgagaccatcgaggtggagaaggagagcgccgacgagaacggcaacctgagcagcgccctgggcagcatgagccccaccaccagcagccagatcctggccagaaagagaagaagaggcatcatcgagaagagaagaagagacagaatcaacaacagcctgagcgagctgagaagactggtgcccagcgccttcgagaagcagggcagcgccaagctggagaaggccgagatcctgcagatgaccgtggaccacctgaagatgctgcacaccgccggcggcaagggctacttcgacgcccacgccctggccatggactacagaagcctgggcttcagagagtgcctggccgaggtggccagatacctgagcatcatcgagggcctggacgccagcgaccccctgagagtgagactggtgagccacctgaacaactacgccagccagagagaggccgccagcggcgcccacgccggcctgggccacatcccctggggcaccgtgttcggccaccacccccacatcgcccaccccctgctgctgccccagaacggccacggcaacgccggcaccaccgccagccccaccgagccccaccaccagggcagactgggcagcgcccaccccgaggcccccgccctgagagccccccccagcggcagcctgggccccgtgctgcccgtggtgaccagcgccagcaagctgagcccccccctgctgagcagcgtggccagcctgagcgccttccccttcagcttcggcagcttccacctgctgagccccaacgccctgagccccagcgcccccacccaggccgccaacctgggcaagccctacagaccctggggcaccgagatcggcgccttctag

SEQ ID NO: 10380 - DNA, 2529 bp, synthetic construct
  source 1..2529: mol_type = other DNA; note = Synthetic coding sequence
atgtgcggcagcgagagaatcctgcaggccggcaacatcctggagatcagagtgggccaggccggcgccagaagagtggccaccatgaccagccccgtgctggtggacatcagagaggaggtgacctgccccatctgcctggagctgctgaccgagcccctgagcatcgactgcggccacagcttctgccaggcctgcatcacccccaacggcagagagagcgtgatcggccaggagggcgagagaagctgccccgtgtgccagaccagctaccagcccggcaacctgagacccaacagacacctggccaacatcgtgagaagactgagagaggtggtgctgggccccggcaagcagctgaaggccgtgctgtgcgccgaccacggcgagaagctgcagctgttctgccaggaggacggcaaggtgatctgctggctgtgcgagagaagccaggagcacagaggccaccacaccttcctggtggaggaggtggcccaggagtaccaggagaagttccaggagagcctgaagaagctgaagaacgaggagcaggaggccgagaagctgaccgccttcatcagagagaagaagaccagctggaagaaccagatggagcccgagagatgcagaatccagaccgagttcaaccagctgagaaacatcctggacagagtggagcagagagagctgaagaagctggagcaggaggagaagaagggcctgagaatcatcgaggaggccgagaacgacctggtgcaccagacccagagcctgagagagctgatcagcgacctggagagaagatgccagggcagcaccatggagctgctgcaggacgtgagcgacgtgaccgagagaagcgagttctggaccctgagaaagcccgaggccctgcccaccaagctgagaagcatgttcagagcccccgacctgaagagaatgctgagagtgtgcagagagctgaccgacgtgcagagctactgggccatccagggcagcctgaccagaagagagagaagagccagcggcgtgagaaccagaagaagccagggcagcagcgccatggccagcaagatcctgctgaacgtgcaggaggaggtgacctgccccatctgcctggagctgctgaccgagcccctgagcctggactgcggccacagcctgtgcagagcctgcatcaccgtgagcaacaaggaggccgtgaccagcatgggcggcaagagcagctgccccgtgtgcggcatcagctacagcttcgagcacctgcaggccaaccagcacctggccaacatcgtggagagactgaaggaggtgaagctgagccccgacaacggcaagaagagagacctgtgcgaccaccacggcgagaagctgctgctgttctgcaaggaggacagaaaggtgatctgctggctgtgcgagagaagccaggagcacagaggccaccacaccgtgctgaccgaggaggtgttcaaggagtgccaggagaagctgcaggccgtgctgaagagactgaagaaggaggaggaggaggccgagaagctggaggccgacatcagagaggagaagaccagctggaagtaccaggtgcagaccgagagacagagaatccagaccgagttcgaccagctgagaagcatcctgaacaacgaggagcagagagagctgcagagactggaggaggaggagaagaagaccctggacaagttcgccgaggccgaggacgagctggtgcagcagaagcagctggtgagagagctgatcagcgacgtggagtgcagaagccagtggagcaccatggagctgctgcaggacatgagcggcatcatgaagtggagcgagatctggagactgaagaagcccaagatggtgagcaagaagctgaagaccgtgttccacgcccccgacctgagcagaatgctgcagatgttcagagagctgaccgccgtgagatgctactgggtggacgtgaccctgaacagcgtgaacctgaacctgaacctggtgctgagcgaggaccagagacaggtgatcagcgtgcccatctggcccttccagtgctacaactacggcgtgctgggcagccagtacttcagcagcggcaagcactactgggaggtggacgtgagcaagaagaccgcctggatcctgggcgtgtactgcagaacctacagcagacacatgaagtacgtggtgagaagatgcgccaacagacagaacctgtacaccaagtacagacccctgttcggctactgggtgatcggcctgcagaacaagtgcaagtacggcgtgttcgaggagagcctgagcagcgaccccgaggtgctgaccctgagcatggccgtgcccccctgcagagtgggcgtgttcctggactacgaggccggcatcgtgagcttcttcaacgtgaccagccacggcagcctgatctacaagttcagcaagtgctgcttcagccagcccgtgtacccctacttcaacccctggaactgccccgcccccatgaccctgtgcccccccagcagctag

SEQ ID NO: 10381 - DNA, 1497 bp, synthetic construct
  source 1..1497: mol_type = other DNA; note = Synthetic coding sequence
atgaacggcgccctggaccacagcgaccagcccgaccccgacgccatcaagatgttcgtgggccagatccccagaagctggagcgagaaggagctgaaggagctgttcgagccctacggcgccgtgtaccagatcaacgtgctgagagacagaagccagaaccccccccagagcaagggctgctgcttcgtgaccttctacaccagaaaggccgccctggaggcccagaacgccctgcacaacatcaagaccctgcccggcatgcaccaccccatccagatgaagcccgccgacagcgagaagagcaacgccgtggaggacagaaagctgttcatcggcatggtgagcaagaagtgcaacgagaacgacatcagagtgatgttcagccccttcggccagatcgaggagtgcagaatcctgagaggccccgacggcctgagcagaggctgcgccttcgtgaccttcagcaccagagccatggcccagaacgccatcaaggccatgcaccagagccagaccatggagggctgcagcagccccatcgtggtgaagttcgccgacacccagaaggacaaggagcagagaagactgcagcagcagctggcccagcagatgcagcagctgaacaccgccacctggggcaacctgaccggcctgggcggcctgaccccccagtacctggccctgctgcagcaggccaccagcagcagcaacctgggcgccttcagcggcatccagcagatggccggcatgaacgccctgcagctgcagaacctggccaccctggccgccgccgccgccgccgcccagaccagcgccaccagcaccaacgccaaccccctgagcaccaccagcagcgccctgggcgccctgaccagccccgtggccgccagcacccccaacagcaccgccggcgccgccatgaacagcctgaccagcctgggcaccctgcagggcctggccggcgccaccgtgggcctgaacaacatcaacgccctggccgcccccagaagcaagagactgctgctgcccaaggacaacaacggcatggccgccctgaacggcggcctgggcgccaccggcctgaccaacggcaccgccggcaccatggacgccctgacccaggcctacagcggcatccagcagtacgccgccgccgccctgcccaccctgtacagccagagcctgctgcagcagcagagcgccgccggcagccagaaggagggccccgagggcgccaacctgttcatctaccacctgccccaggagttcggcgaccaggacatcctgcagatgttcatgcccttcggcaacgtgatcagcgccaaggtgttcatcgacaagcagaccaacctgagcaagtgcttcggcttcgtgagctacgacaaccccgtgagcgcccaggccgccatccaggccatgaacggcttccagatcggcatgaagagactgaaggtgcagctgaagagaagcaagaacgacagcaagccctactag

SEQ ID NO: 10382 - DNA, 2580 bp, synthetic construct
  source 1..2580: mol_type = other DNA; note = Synthetic coding sequence
atgctggaggtgctggaggagatctggagcgtgagagccagaagagcccacagaccctgccccggccccagcctggccgacgacaccgacgccaacagcaacggcagcagcggcaacgagagcaacggccacgagagcagaggcgccagccagagaagcagccacagcagcagcagcggcaacggcaaggacagcgccctgctggagaccaccgagagcagcaagagcaccaacagccagagccccagcccccccagcagcagcatcgcctacagcctgctgagcgccagcagcgagcaggacaaccccagcaccagcggctgcagcagcgagcagagcgccagagccagaacccagaaggagctgatgaccgccctgagagagctgaagctgagactgccccccgagagaagaggcaagggcagaagcggcaccctggccaccctgcagtacgccctggcctgcgtgaagcaggtgcaggccaaccaggagtactaccagcagtggagcctggaggagggcgagccctgcagcatggacatgagcacctacaccctggaggagctggagcacatcaccagcgagtacaccctgcagaaccaggacaccttcagcgtggccgtgagcttcctgaccggcagaatcgtgtacatcagcgagcaggccgccgtgctgctgagatgcaagagagacgtgttcagaggcaccagattcagcgagctgctggccccccaggacgtgggcgtgttctacggcagcaccgcccccagcagactgcccacctggggcaccggcgccagcgccggcagcggcctgagagacttcacccaggagaagagcgtgttctgcagaatcagaggcggccccgacagagaccccggccccagataccagcccttcagactgaccccctacgtgaccaagatcagagtgagcgacggcgcccccgcccagccctgctgcctgctgatcgccgagagaatccacagcggctacgaggcccccagaatcccccccgacaagagaatcttcaccaccagacacacccccagctgcctgttccaggacgtggacgagagagccgcccccctgctgggctacctgccccaggacctgctgggcgcccccgtgctgctgttcctgcaccccgaggacagacccctgatgctggccatccacaagaagatcctgcagctggccggccagcccttcgaccacagccccatcagattctgcgccagaaacggcgagtacgtgaccatggacaccagctgggccggcttcgtgcacccctggagcagaaaggtggccttcgtgctgggcagacacaaggtgagaaccgcccccctgaacgaggacgtgttcaccccccccgcccccagccccgcccccagcctggacaccgacatccaggagctgagcgagcagatccacagactgctgctgcagcccgtgcacagccccagccccaccggcctgtgcggcgtgggcgccgtgaccagccccggccccctgcacagccccggcagcagcagcgacagcaacggcggcgacgccgagggccccggcccccccgcccccgtgaccttccagcagatctgcaaggacgtgcacctggtgaagcaccagggccagcagctgttcatcgagagcagagccagaccccagagcagacccagactgcccgccaccggcaccttcaaggccaaggccctgccctgccagagccccgaccccgagctggaggccggcagcgcccccgtgcaggcccccctggccctggtgcccgaggaggccgagagaaaggaggccagcagctgcagctaccagcagatcaactgcctggacagcatcctgagatacctggagagctgcaacctgcccagcaccaccaagagaaagtgcgccagcagcagcagctacaccaccagcagcgccagcgacgacgacagacagagaaccggccccgtgagcgtgggcaccaagaaggacccccccagcgccgccctgagcggcgagggcgccacccccagaaaggagcccgtggtgggcggcaccctgagccccctggccctggccaacaaggccgagagcgtggtgagcgtgaccagccagtgcagcttcagcagcaccatcgtgcacgtgggcgacaagaagccccccgagagcgacatcatcatgatggaggacctgcccggcctggcccccggccccgcccccagccccgcccccagccccaccgtggcccccgaccccgcccccgacgcctacagacccgtgggcctgaccaaggccgtgctgagcctgcacacccagaaggaggagcaggccttcctgagcagattcagagacctgggcagactgagaggcctggacagcagcagcaccgcccccagcgccctgggcgagagaggcagccacctgggcccccccggcgcctgccccctgcccagcctgggcctggactgctggggcgtgggcctgaagggcggcgtgagcgcccccggcacccaggccggcgtggccagcaccaccagaccctgcctgggcaccggccccagcctggccagcccccactag

SEQ ID NO: 10383 - DNA, 1266 bp, synthetic construct
  source 1..1266: mol_type = other DNA; note = Synthetic coding sequence
atggccagcagcagcgtgccccccgccaccgtgagcgccgccaccgccggccccggccccggcttcggcttcgccagcaagaccaagaagaagcacttcgtgcagcagaaggtgaaggtgttcagagccgccgaccccctggtgggcgtgttcctgtggggcgtggcccacagcatcaacgagctgagccaggtgcccccccccgtgatgctgctgcccgacgacttcaaggccagcagcaagatcaaggtgaacaaccacctgttccacagagagaacctgcccagccacttcaagttcaaggagtactgcccccaggtgttcagaaacctgagagacagattcggcatcgacgaccaggactacctggtgagcctgaccagaaacccccccagcgagagcgagggcagcgacggcagattcctgatcagctacgacagaaccctggtgatcaaggaggtgagcagcgaggacatcgccgacatgcacagcaacctgagcaactaccaccagtacatcgtgaagtgccacggcaacaccctgctgccccagttcctgggcatgtacagagtgagcgtggacaacgaggacagctacatgctggtgatgagaaacatgttcagccacagactgcccgtgcacagaaagtacgacctgaagggcagcctggtgagcagagaggccagcgacaaggagaaggtgaaggagctgcccaccctgaaggacatggacttcctgaacaagaaccagaaggtgtacatcggcgaggaggagaagaagatcttcctggagaagctgaagagagacgtggagttcctggtgcagctgaagatcatggactacagcctgctgctgggcatccacgacatcatcagaggcagcgagcccgaggaggaggcccccgtgagagaggacgagagcgaggtggacggcgactgcagcctgaccggcccccccgccctggtgggcagctacggcaccagccccgagggcatcggcggctacatccacagccacagacccctgggccccggcgagttcgagagcttcatcgacgtgtacgccatcagaagcgccgagggcgccccccagaaggaggtgtacttcatgggcctgatcgacatcctgacccagtacgacgccaagaagaaggccgcccacgccgccaagaccgtgaagcacggcgccggcgccgagatcagcaccgtgcaccccgagcagtacgccaagagattcctggacttcatcaccaacatcttcgcctag

SEQ ID NO: 10384 - DNA, 2031 bp, synthetic construct
  source 1..2031: mol_type = other DNA; note = Synthetic coding sequence
atggccgccgccaccggcgaccccggcctgagcaagctgcagttcgcccccttcagcagcgccctggacgtgggcttctggcacgagctgacccagaagaagctgaacgagtacagactggacgaggcccccaaggacatcaagggctactactacaacggcgacagcgccggcctgcccgccagactgaccctggagttcagcgccttcgacatgagcgcccccacccccgccagatgctgccccgccatcggcaccctgtacaacaccaacaccctggagagcttcaagaccgccgacaagaagctgctgctggagcaggccgccaacgagatctgggagagcatcaagagcggcaccgccctggagaaccccgtgctgctgaacaagttcctgctgctgaccttcgccgacctgaagaagtaccacttctactactggttctgctaccccgccctgtgcctgcccgagagcctgcccctgatccagggccccgtgggcctggaccagagattcagcctgaagcagatcgaggccctggagtgcgcctacgacaacctgtgccagaccgagggcgtgaccgccctgccctacttcctgatcaagtacgacgagaacatggtgctggtgagcctgctgaagcactacagcgacttcttccagggccagagaaccaagatcaccatcggcgtgtacgacccctgcaacctggcccagtaccccggctggcccctgagaaacttcctggtgctggccgcccacagatggagcagcagcttccagagcgtggaggtggtgtgcttcagagacagaaccatgcagggcgccagagacgtggcccacagcatcatcttcgaggtgaagctgcccgagatggccttcagccccgactgccccaaggccgtgggctgggagaagaaccagaagggcggcatgggccccagaatggtgaacctgagcgagtgcatggaccccaagagactggccgagagcagcgtggacctgaacctgaagctgatgtgctggagactggtgcccaccctggacctggacaaggtggtgagcgtgaagtgcctgctgctgggcgccggcaccctgggctgcaacgtggccagaaccctgatgggctggggcgtgagacacatcaccttcgtggacaacgccaagatcagctacagcaaccccgtgagacagcccctgtacgagttcgaggactgcctgggcggcggcaagcccaaggccctggccgccgccgacagactgcagaagatcttccccggcgtgaacgccagaggcttcaacatgagcatccccatgcccggccaccccgtgaacttcagcagcgtgaccctggagcaggccagaagagacgtggagcagctggagcagctgatcgagagccacgacgtggtgttcctgctgatggacaccagagagagcagatggctgcccgccgtgatcgccgccagcaagagaaagctggtgatcaacgccgccctgggcttcgacaccttcgtggtgatgagacacggcctgaagaagcccaagcagcagggcgccggcgacctgtgccccaaccaccccgtggccagcgccgacctgctgggcagcagcctgttcgccaacatccccggctacaagctgggctgctacttctgcaacgacgtggtggcccccggcgacagcaccagagacagaaccctggaccagcagtgcaccgtgagcagacccggcctggccgtgatcgccggcgccctggccgtggagctgatggtgagcgtgctgcagcaccccgagggcggctacgccatcgccagcagcagcgacgacagaatgaacgagccccccaccagcctgggcctggtgccccaccaggtgctggaccagtacgagagagagggcttcaacttcctggccaaggtgttcaacagcagccacagcttcctggaggacctgaccggcctgaccctgctgcaccaggagacccaggccgccgagatctgggacatgagcgacgacgagaccatctag

SEQ ID NO: 10385 - DNA, 1329 bp, synthetic construct
  source 1..1329: mol_type = other DNA; note = Synthetic coding sequence
atggccagcgacggcgccagcgccctgcccggccccgacatgagcatgaagcccagcgccgcccccagccccagccccgccctgcccttcctgccccccaccagcgacccccccgaccacccccccagagagccccccccccagcccatcatgcccagcgtgttcagccccgacaaccccctgatgctgagcgccttccccagcagcctgctggtgaccggcgacggcggcccctgcctgagcggcgccggcgccggcaaggtgatcgtgaaggtgaagaccgagggcggcagcgccgagcccagccagacccagaacttcatcctgacccagaccgccctgaacagcaccgcccccggcaccccctgcggcggcctggagggccccgccccccccttcgtgaccgccagcaacgtgaagaccatcctgcccagcaaggccgtgggcgtgagccaggagggcccccccggcctgcccccccagccccccccccccgtggcccagctggtgcccatcgtgcccctggagaaggcctggcccggcccccacggcaccaccggcgagggcggccccgtggccaccctgagcaagcccagcctgggcgacagaagcaagatcagcaaggacgtgtacgagaacttcagacagtggcagagatacaaggccctggccagaagacacctgagccagagccccgacaccgaggccgtgaaggagtacgtggacatcatggagtggctggtgggcacccacctggccaccggcgagagcgacggcaagcaggaggaggagggccagcagcaggaggaggagggcatgtaccccgaccccggcctgctgagctacatcaacgagctgtgcagccagaaggtgttcgtgagcaaggtggaggccgtgatccacccccagttcctggccgacctgctgagccccgagaagcagagagaccccctggccctgatcgaggagctggagcaggaggagggcctgaccctggcccagctggtgcagaagagactgatggccctggaggaggaggaggacgccgaggccccccccagcttcagcggcgcccagctggacagcagccccagcggcagcgtggaggacgaggacggcgacggcagactgagacccagccccggcctgcagggcgccggcggcgccgcctgcctgggcaaggtgagcagcagcggcaagagagccagagaggtgcacggcggccaggagcaggccctggacagccccagaggcatgcacagagacggcaacaccctgcccagccccagcagctgggacctgcccaccaacggcgagagccagtgctag

SEQ ID NO: 10386 - DNA, 666 bp, synthetic construct
  source 1..666: mol_type = other DNA; note = Synthetic coding sequence
atgcaggtgcaggacgacggcgtgaacctgatccccttcgccaagtgcagcagagtggtgagcagaagccccccccccagactgcccagccagagcctgagacccatgccccagagatacggcgacgtgttctggaagaacctgaaccagagacccacccccacctggctggaggagcagcacatcccccccatgctgctgcccccccccgagatgctgtggagaagaaagaagagaagaccctgcctggagggcatgcagcagcagggcctgggcggcgtgcccgccagagtgagagccgtgacctaccacctggaggacctgagaagaagacagagcatcatcaacgagctgaagaaggcccagtggggcagcagcggcgccgccagcgagcccgtggtgctgggcgaggagggctgcggcttccccagcaccaacgagtaccccgacctggaggaggagagagccacctacccccaggaggaggacagattcctgacccccggcagagcccagctgctgtggagcccctggagccccctggaccaggaggaggcctgcgccagcagacagctgcacagcctggccagcttcagcaccgtgaccgccagaagaaaccccctgcacaacccctggggcatggagctggccgccagcgaggagtag

SEQ ID NO: 10387 - DNA, 480 bp, synthetic construct
  source 1..480: mol_type = other DNA; note = Synthetic coding sequence
atgcagagagtgggcaacaccttcagcaacgagagcagagtggccagcagatgccccagcgtgggcctggccgagagaaacagagtggccaccatgcccgtgagactgctgagagacagccccgccgcccaggaggacaacgaccacgccagagacggcttccagatgaagctggacgcccacggcttcgcccccgaggagctggtggtgcaggtggacggccagtggctgatggtgaccggccagcagcagctggacgtgagagaccccgagagagtgagctacagaatgagccagaaggtgcacagaaagatgctgcccagcaacctgagccccaccgccatgacctgctgcctgacccccagcggccagctgtgggtgagaggccagtgcgtggccctggccctgcccgaggcccagaccggccccagccccagactgggcagcctgggcagcaaggccagcaacctgaccagatag

SEQ ID NO: 10388 - DNA, 1782 bp, synthetic construct
  source 1..1782: mol_type = other DNA; note = Synthetic coding sequence
atggagaagctgagcgccctgcaggagcagaagggcgagctgagaaagagactgagctacaccacccacaagctggagaagctggagaccgagttcgacagcaccagacactacctggagatcgagctgagaagagcccaggaggagctggagaaggtgaccgagaagctgagaagaatccagagcaactacatggccctgcagagaatcaaccaggagctggaggacaagctgtacagaatgggccagcactacgaggaggagaagagagccctgagccacgagatcgtggccctgaacagccacctgctggaggccaaggtgaccatcgacaagctgagcgaggacaacgagctgtacagaaaggactgcaacctggccgcccagctgctgcagtgcagccagacctacggcagagtgcacaaggtgagcgagctgcccagcgacttccaggagagagtgagcctgcacatggagaagcacggctgcagcctgcccagccccctgtgccaccccgcctacgccgacagcgtgcccacctgcgtgatcgccaaggtgctggagaagcccgaccccgccagcctgagcagcagactgagcgacgccagcgccagagacctggccttctgcgacggcgtggagaagcccggccccagacccccctacaagggcgacatctactgcagcgacaccgccctgtactgccccgaggagagaagaagagacagaagacccagcgtggacgcccccgtgaccgacgtgggcttcctgagagcccagaacagcaccgacagcgccgccgaggaggaggaggaggccgaggccgccgccttccccgccggcttccagcacgaggccttccccagctacgccggcagcctgcccaccagcagcagctacagcagcttcagcgccaccagcgaggagaaggagcacgcccaggccagcaccctgaccgccagccagcaggccatctacctgaacagcagagacgagctgttcgacagaaagccccccgccaccacctacgagggcagccccagattcgccaaggccaccgccgccgtggccgcccccctggaggccgaggtggcccccggcttcggcagaaccatgagcccctaccccgccgagaccttcagattccccgccagccccggcccccagcaggccctgatgccccccaacctgtggagcctgagagccaagcccggcaccgccagactgcccggcgaggacatgagaggccagtggagacccctgagcgtggaggacatcggcgcctacagctaccccgtgagcgccgccggcagagccagcccctgcagcttcagcgagagatactacggcggcgccggcggcagccccggcaagaaggccgacggcagagccagccccctgtacgccagctacaaggccgacagcttcagcgagggcgacgacctgagccagggccacctggccgagccctgcttcctgagagccggcggcgacctgagcctgagccccggcagaagcgccgaccccctgcccggctacgcccccagcgagggcggcgacggcgacagactgggcgtgcagctgtgcggcaccgccagcagccccgagcccgagcagggcagcagagacagcctggagcccagcagcatggaggccagccccgagatgcaccccgccgccagactgagcccccagcaggccttccccagaaccggcggcagcggcctgagcagaaaggacagcctgaccaaggcccagctgtacggcaccctgctgaactag

SEQ ID NO: 10389 - DNA, 2610 bp, synthetic construct
  source 1..2610: mol_type = other DNA; note = Synthetic coding sequence
atgggcaacagagagatggaggagctgatccccctggtgaacagactgcaggacgccttcagcgccctgggccagagctgcctgctggagctgccccagatcgccgtggtgggcggccagagcgccggcaagagcagcgtgctggagaacttcgtgggcagagacttcctgcccagaggcagcggcatcgtgaccagaagacccctggtgctgcagctggtgaccagcaaggccgagtacgccgagttcctgcactgcaagggcaagaagttcaccgacttcgacgaggtgagactggagatcgaggccgagaccgacagagtgaccggcatgaacaagggcatcagcagcatccccatcaacctgagagtgtacagcccccacgtgctgaacctgaccctgatcgacctgcccggcatcaccaaggtgcccgtgggcgaccagccccccgacatcgagtaccagatcagagagatgatcatgcagttcatcaccagagagaactgcctgatcctggccgtgacccccgccaacaccgacctggccaacagcgacgccctgaagctggccaaggaggtggacccccagggcctgagaaccatcggcgtgatcaccaagctggacctgatggacgagggcaccgacgccagagacgtgctggagaacaagctgctgcccctgagaagaggctacgtgggcgtggtgaacagaagccagaaggacatcgacggcaagaaggacatcaaggccgccatgctggccgagagaaagttcttcctgagccaccccgcctacagacacatcgccgacagaatgggcaccccccacctgcagaaggtgctgaaccagcagctgaccaaccacatcagagacaccctgcccaacttcagaaacaagctgcagggccagctgctgagcatcgagcacgaggtggaggcctacaagaacttcaagcccgaggaccccaccagaaagaccaaggccctgctgcagatggtgcagcagttcgccgtggacttcgagaagagaatcgagggcagcggcgaccaggtggacaccctggagctgagcggcggcgccaagatcaacagaatcttccacgagagattccccttcgagatcgtgaagatggagttcaacgagaaggagctgagaagagagatcagctacgccatcaagaacatccacggcatcagaaccggcctgttcacccccgacatggccttcgaggccatcgtgaagaagcagatcgtgaagctgaagggccccagcctgaagagcgtggacctggtgatccaggagctgatcaacaccgtgaagaagtgcaccaagaagctggccaacttccccagactgtgcgaggagaccgagagaatcgtggccaaccacatcagagagagagagggcaagaccaaggaccaggtgctgctgctgatcgacatccaggtgagctacatcaacaccaaccacgaggacttcatcggcttcgccaacgcccagcagagaagcagccaggtgcacaagaagaccaccgtgggcaaccagggcaccaacctgccccccagcagacagatcgtgatcagaaagggctggctgaccatcagcaacatcggcatcatgaagggcggcagcaagggctactggttcgtgctgaccgccgagagcctgagctggtacaaggacgacgaggagaaggagaagaagtacatgctgcccctggacaacctgaaggtgagagacgtggagaagagcttcatgagcagcaagcacatcttcgccctgttcaacaccgagcagagaaacgtgtacaaggactacagattcctggagctggcctgcgacagccaggaggacgtggacagctggaaggccagcctgctgagagccggcgtgtaccccgacaagagcgtggccgagaacgacgagaacggccaggccgagaacttcagcatggacccccagctggagagacaggtggagaccatcagaaacctggtggacagctacatgagcatcatcaacaagtgcatcagagacctgatccccaagaccatcatgcacctgatgatcaacaacgtgaaggacttcatcaacagcgagctgctggcccagctgtacagcagcgaggaccagaacaccctgatggaggagagcgccgagcaggcccagagaagagacgagatgctgagaatgtaccaggccctgaaggaggccctgggcatcatcggcgacatcagcaccgccaccgtgagcacccccgcccccccccccgtggacgacagctggatccagcacagcagaagaagccccccccccagccccaccacccagagaagacccaccctgagcgcccccctggccagacccaccagcggcagaggccccgcccccgccatccccagccccggcccccacagcggcgccccccccgtgcccttcagacccggccccctgccccccttccccagcagcagcgacagcttcggcgcccccccccaggtgcccagcagacccaccagagccccccccagcgtgcccagcagaagacccccccccagccccaccagacccaccatcatcagacccctggagagcagcctgctggactag

SEQ ID NO: 10390 - DNA, 1896 bp, synthetic construct
  source 1..1896: mol_type = other DNA; note = Synthetic coding sequence
atgaacagcagcgacgaggagaagcagctgcagctgatcaccagcctgaaggagcaggccatcggcgagtacgaggacctgagagccgagaaccagaagaccaaggagaagtgcgacaagatcagacaggagagagacgaggccgtgaagaagctggaggagttccagaagatcagccacatggtgatcgaggaggtgaacttcatgcagaaccacctggagatcgagaagacctgcagagagagcgccgaggccctggccaccaagctgaacaaggagaacaagaccctgaagagaatcagcatgctgtacatggccaagctgggccccgacgtgatcaccgaggagatcaacatcgacgacgaggacagcaccaccgacaccgacggcgccgccgagacctgcgtgagcgtgcagtgccagaagcagatcaaggagctgagagaccagatcgtgagcgtgcaggaggagaagaagatcctggccatcgagctggagaacctgaagagcaagctggtggaggtgatcgaggaggtgaacaaggtgaagcaggagaagaccgtgctgaacagcgaggtgctggagcagagaaaggtgctggagaagtgcaacagagtgagcatgctggccgtggaggagtacgaggagatgcaggtgaacctggagctggagaaggacctgagaaagaaggccgagagcttcgcccaggagatgttcatcgagcagaacaagctgaagagacagagccacctgctgctgcagagcagcatccccgaccagcagctgctgaaggccctggacgagaacgccaagctgacccagcagctggaggaggagagaatccagcaccagcagaaggtgaaggagctggaggagcagctggagaacgagaccctgcacaaggagatccacaacctgaagcagcagctggagctgctggaggaggacaagaaggagctggagctgaagtaccagaacagcgaggagaaggccagaaacctgaagcacagcgtggacgagctgcagaagagagtgaaccagagcgagaacagcgtgcccccccccccccccccccccccccccctgcccccccccccccccaaccccatcagaagcctgatgagcatgatcagaaagagaagccaccccagcggcagcggcgccaagaaggagaaggccacccagcccgagaccaccgaggaggtgaccgacctgaagagacaggccgtggaggagatgatggacagaatcaagaagggcgtgcacctgagacccgtgaaccagaccgccagacccaagaccaagcccgagagcagcaagggctgcgagagcgccgtggacgagctgaagggcatcctgggcaccctgaacaagagcaccagcagcagaagcctgaagagcctggaccccgagaacagcgagaccgagctggagagaatcctgagaagaagaaaggtgaccgccgaggccgacagcagcagccccaccggcatcctggccaccagcgagagcaagagcatgcccgtgctgggcagcgtgagcagcgtgaccaagaccgccctgaacaagaagaccctggaggccgagttcaacagccccagcccccccacccccgagcccggcgagggccccagaaagctggagggctgcaccagcagcaaggtgaccttccagccccccagcagcatcggctgcagaaagaagtacatcgacggcgagaagcaggccgagcccgtggtggtgctggaccccgtgagcacccacgagccccagaccaaggaccaggtggccgagaaggaccccacccagcacaaggaggacgagggcgagatccagcccgagaacaaggaggacagcatcgagaacgtgagagagaccgacagcagcaactgctag

SEQ ID NO: 10391 - DNA, 1701 bp, synthetic construct
  source 1..1701: mol_type = other DNA; note = Synthetic coding sequence
atggacctgcacagagccgccttcaagatggagaacagcagctacctgcccaaccccctggccagccccgccctgatggtgctggccagcaccgccgaggccagcagagacgccagcatcccctgccagcagcccagacccttcggcgtgcccgtgagcgtggacaaggacgtgcacatccccttcaccaacggcagctacaccttcgccagcatgtaccacagacagggcggcgtgcccggcaccttcgccaacagagacttcccccccagcctgctgcacctgcacccccagttcgccccccccaacctggactgcacccccatcagcatgctgaaccacagcggcgtgggcgccttcagacccttcgccagcaccgaggacagagagagctaccagagcgccttcacccccgccaagagactgaagaactgccacgacaccgagagcccccacctgagattcagcgacgccgacggcaaggagtacgacttcggcacccagctgcccagcagcagccccggcagcctgaaggtggacgacaccggcaagaagatcttcgccgtgagcggcctgatcagcgacagagaggccagcagcagccccgaggacagaaacgacagatgcaagaagaaggccgccgccctgttcgacagccaggcccccatctgccccatctgccaggtgctgctgagacccagcgagctgcaggagcacatggagcaggagctggagcagctggcccagctgcccagcagcaagaacagcctgctgaaggacgccatggcccccggcacccccaagagcctgctgctgagcgccagcatcaagagagagggcgagagccccaccgccagcccccacagcagcgccaccgacgacctgcaccacagcgacagataccagaccttcctgagagtgagagccaacagacagaccagactgaacgccagaatcggcaagatgaagagaagaaagcaggacgagggccagagagagggcagctgcatggccgaggacgacgccgtggacatcgagcacgagaacaacaacagattcgaggagtacgagtggtgcggccagaagagaatcagagccaccaccctgctggagggcggcttcagaggcagcggcttcatcatgtgcagcggcaaggagaaccccgacagcgacgccgacctggacgtggacggcgacgacaccctggagtacggcaagccccagtacaccgaggccgacgtgatcccctgcaccggcgaggagcccggcgaggccaaggagagagaggccctgagaggcgccgtgctgaacggcggcccccccagcaccagaatcacccccgagttcagcaagtgggccagcgacgagatgcccagcaccagcaacggcgagagcagcaagcaggaggccatgcagaagacctgcaagaacagcgacatcgagaagatcaccgaggacagcgccgtgaccaccttcgaggccctgaaggccagagtgagagagctggagagacagctgagcagaggcgacagatacaagtgcctgatctgcatggacagctacagcatgcccctgaccagcatccagtgctggcacgtgcactgcgaggagtgctggctgagaaccctgggcgccaagaagctgtgcccccagtgcaacaccatcaccgcccccggcgacctgagaagaatctacctgtag

SEQ ID NO: 10392 - DNA, 1071 bp, synthetic construct
  source 1..1071: mol_type = other DNA; note = Synthetic coding sequence
atgctgagcgccatcaccaacgtggtgcagaacaccggcaagagcgtgctgaccggcggcctggacgccctggagttcatcggcaagaagaccatgaacgtgctggccgagagcgaccccggcttcaagagaaccaagaccctgatggagagaaccgtgagcctgagccagatgctgagagaggccaaggagaaggagaagcagagactggcccagcagctgaccatggagagaaccgcccactacggcatgctgttcgacgagtaccagggcctgagccacctggaggccctggagatcctgagcaacgagagcgagagcaaggtgcagagcttcctggccagcctggacggcgagaagctggagctgctgaagaacgacctgatcagcatcaaggacatcttcgccgccaaggagctggagaacgaggagaaccaggaggagcagggcctggaggagaagggcgaggagttcgccagaatgctgaccgagctgctgttcgagctgcacgtggccgccacccccgacaagctgaacaaggccatgaagagagcccacgactgggtggaggaggaccagaccgtggtgagcgtggacgtggccaaggtgagcgaggaggagaccaagaaggaggagaaggaggagaagagccaggacccccaggaggacaagaaggaggagaagaagaccaagaccatcgaggaggtgtacatgagcagcatcgagagcctggccgaggtgaccgccagatgcatcgagcagctgcacaaggtggccgagctgatcctgcacggccaggaggaggagaagcccgcccaggaccaggccaaggtgctgatcaagctgaccaccgccatgtgcaacgaggtggccagcctgagcaagaagttcaccaacagcctgaccaccgtgggcagcaacaagaaggccgaggtgctgaaccccatgatcagcagcgtgctgctggagggctgcaacagcaccacctacatccaggacgccttccagctgctgctgcccgtgctgcaggtgagccacatccagaccagctgcctgaaggcccagccctag

SEQ ID NO: 10393 - DNA, 519 bp, synthetic construct
  source 1..519: mol_type = other DNA; note = Synthetic coding sequence
atgagctacaactgctgcagcggcaacttcagcagcagaagctgcggcggctacctgcactaccccgccagcagctgcggcttcagctaccccagcaaccaggtgtacagcaccgacctgtgcagccccagcacctgccagctgggcagcagcctgtacagaggctgccagcagacctgctgggagcccaccagctgccagaccagctacgtggagagcagcccctgccagaccagctgctacagacccagaaccagcctgctgtgcagcccctgccagaccacctacagcggcagcctgggcttcggcagcagcagctgcagaagcctgggctacggcagcagaagctgctacagcgtgggctgcggcagcagcggcttcagaagcctgggctacggcggctgcggcttccccagcctgggctacggcgtgggcttctgcagacccacctacctggccagcagaagctgccagagcagctgctacagacccacctgcggcagcggcttctactactag

SEQ ID NO: 10394 - DNA, 2253 bp, synthetic construct; identical to SEQ ID NO: 10318
  source 1..2253: mol_type = other DNA; note = Synthetic coding sequence

SEQ ID NO: 10395 - DNA, 888 bp, synthetic construct; identical to SEQ ID NO: 10194
  source 1..888: mol_type = other DNA; note = Synthetic coding sequence

SEQ ID NO: 10396 - DNA, 1476 bp, synthetic construct
  source 1..1476: mol_type = other DNA; note = Synthetic coding sequence
atggacaccaagggctgcaccaccaccaacagccccagcaccccctgccagaactgcagcagaatcaccaacgtgagcaccatcagcagcaacaacggctgccaccccggcggcctgaccgtgaacaactgccagcccgccggccacgtgctgagaatcccctgggaccagggctgccagcccacccccagattctgcagaaagcccatctacctgatgaacaacttcaacgccagattcagcctggacgactgcagctggtacggcgagggcatcaacagcaacgagaaggagaccatgcagatcctgaacgagagactggccaactacctgcagaaggtgagaatgctggagagagagaacgccgagctggagagcaagatccaggaggagagcaacaaggagctgcccgtgctgtgccccgactacctgagctactacaccaccatcgaggagctgcagcagaagatcctgtgcaccaaggccgagaacagcagactggtgagccagatcgacaacaccaagctgaccgccgacgacctgagagccaagtacgaggccgaggtgagcctgagacagctggtggagagcgacgccaacggcctgaagcagatcctgaacgtgctgaccctgggcaaggccgacctggaggcccaggtgcagagcctgaaggaggagctgctgtgcctgaagaacaaccacaaggaggagatcaacagcctgcagtgccagctgggcgagagactggacatcgaggtgaccgccgcccccagcgccgacctgaaccaggtgctgcaggagatgagatgccagtacgagcccatcatggagaccaacagaaaggacgtggagcagtggttcaacacccagatcgaggagctgaaccagcaggtggtgaccagcagccagcagcagcagtgctgccagaaggagatcatcgagctgagaagaagcgtgaacaccctggaggtggagctgcaggcccagcacagaatgagagacagccaggagtgcatcctgaccgagaccgaggccagatacaccgccctgctgacccagatccagagcctgatcgacaacctggaggcccagctggccgagatcagatgcgccctggagagacagaaccaggagtacgagatcctgctggacgtgaagagcagactggagtgcgagatcaccacctacagaagcctgctggagagcagcgacggcaagagaccctgctaccccagagccaccaagtgcgagcccagcccctggaccagctgcaagagcggcgccatcgagagcaccgcccccgcctgcaccagcagcagcccctgcagcctgaaggagcactgcagcgcctgcggccccctgagcagaatcctggtgaagatctgcaccatcaccaaggagatcaaggacggcaaggtgatcagcagctacgagcacgtgcagccctgcttcatcatcagacccgccaaggtgtag

SEQ ID NO: 10397 - DNA, 1287 bp, synthetic construct
  source 1..1287: mol_type = other DNA; note = Synthetic coding sequence
atgaagagaggcggcagagacagcgacagaaacagcagcgaggagggcaccgccgagaagagcaagaagctgagaaccaccaacgagcacagccagacctgcgactggggcaacctgctgcaggacatcatcctgcaggtgttcaagtacctgcccctgctggacagagcccacgccagccaggtgtgcagaaactggaaccaggtgttccacatgcccgacctgtggagatgcttcgagttcgagctgaaccagcccgccaccagctacctgaaggccacccaccccgagctgatcaagcagatcatcaagagacacagcaaccacctgcagtacgtgagcttcaaggtggacagcagcaaggagagcgccgaggccgcctgcgacatcctgagccagctggtgaactgcagcctgaagaccctgggcctgatcagcaccgccagacccagcttcatggacctgcccaagagccacttcatcagcgccctgaccgtggtgttcgtgaacagcaagagcctgagcagcctgaagatcgacgacacccccgtggacgaccccagcctgaaggtgctggtggccaacaacagcgacaccctgaagctgctgaagatgagcagctgcccccacgtgagccccgccggcatcctgtgcgtggccgaccagtgccacggcctgagagagctggccctgaactaccacctgctgagcgacgagctgctgctggccctgagcagcgagaagcacgtgagactggagcacctgagaatcgacgtggtgagcgagaaccccggccagacccacttccacaccatccagaagagcagctgggacgccttcatcagacacagccccaaggtgaacctggtgatgtacttcttcctgtacgaggaggagttcgaccccttcttcagatacgagatccccgccacccacctgtacttcggcagaagcgtgagcaaggacgtgctgggcagagtgggcatgacctgccccagactggtggagctggtggtgtgcgccaacggcctgagacccctggacgaggagctgatcagaatcgccgagagatgcaagaacctgagcgccatcggcctgggcgagtgcgaggtgagctgcagcgccttcgtggagttcgtgaagatgtgcggcggcagactgagccagctgagcatcatggaggaggtgctgatccccgaccagaagtacagcctggagcagatccactgggaggtgagcaagcacctgggcagagtgtggttccccgacatgatgcccacctggtag

SEQ ID NO: 10398 - DNA, 3603 bp, synthetic construct
  source 1..3603: mol_type = other DNA; note = Synthetic coding sequence
atgaacaccgacagcggcggctgcgccagaaagagagccgccatgagcgtgaccctgaccagcgtgaagagagtgcagagcagccccaacctgctggccgccggcagagacagccagagccccgacagcgcctggagaagctacaacgacggcaaccaggagaccctgaacggcgacgccacctacagcagcctggccgccaagggcttcagaagcgtgagacccaacctgcaggacaagagaagccccacccagagccagatcaccgtgaacggcaacagcggcggcgccgtgagccccatgagctactaccagagacccttcagccccagcgcctacagcctgcccgccagcctgaacagcagcatcgtgatgcagcacggcaccagcctggacagcaccgacacctacccccagcacgcccagagcctggacggcaccaccagcagcagcatccccctgtacagaagcagcgaggaggagaagagagtgaccgtgatcaaggccccccactaccccggcatcggccccgtggacgagagcggcatccccaccgccatcagaaccaccgtggacagacccaaggactggtacaagaccatgttcaagcagatccacatggtgcacaagcccgacgacgacaccgacatgtacaacaccccctacacctacaacgccggcctgtacaaccccccctacagcgcccagagccaccccgccgccaagacccagacctacagacccctgagcaagagccacagcgacaacagccccaacgccttcaaggacgccagcagccccgtgccccccccccacgtgcccccccccgtgccccccctgagacccagagacagaagcagcaccgagaagcacgactgggacccccccgacagaaaggtggacaccagaaagttcagaagcgagcccagaagcatcttcgagtacgagcccggcaagagcagcatcctgcagcacgagagacccgccagcctgtaccagagcagcatcgacagaagcctggagagacccatgagcagcgccagcatggccagcgacttcagaaagagaagaaagagcgagcccgccgtgggcccccccagaggcctgggcgaccagagcgccagcagaaccagccccggcagagtggacctgcccggcagcagcaccaccctgaccaagagcttcaccagcagcagccccagcagccccagcagagccaagggcggcgacgacagcaagatctgccccagcctgtgcagctacagcggcctgaacggcaaccccagcagcgagctggactactgcagcacctacagacagcacctggacgtgcccagagacagccccagagccatcagcttcaagaacggctggcagatggccagacagaacgccgagatctggagcagcaccgaggagaccgtgagccccaagatcaagagcagaagctgcgacgacctgctgaacgacgactgcgacagcttccccgaccccaaggtgaagagcgagagcatgggcagcctgctgtgcgaggaggacagcaaggagagctgccccatggcctggggcagcccctacgtgcccgaggtgagaagcaacggcagaagcagaatcagacacagaagcgccagaaacgcccccggcttcctgaagatgtacaagaagatgcacagaatcaacagaaaggacctgatgaacagcgaggtgatctgcagcgtgaagagcagaatcctgcagtacgagagcgagcagcagcacaaggacctgctgagagcctggagccagtgcagcaccgaggaggtgcccagagacatggtgcccaccagaatcagcgagttcgagaagctgatccagaagagcaagagcatgcccaacctgggcgacgacatgctgagccccgtgaccctggagcccccccagaacggcctgtgccccaagagaagattcagcatcgagtacctgctggaggaggagaaccagagcggcccccccgccagaggcagaagaggctgccagagcaacgccctggtgcccatccacatcgaggtgaccagcgacgagcagcccagagcccacgtggagttcagcgacagcgaccaggacggcgtggtgagcgaccacagcgactacatccacctggagggcagcagcttctgcagcgagagcgacttcgaccacttcagcttcaccagcagcgagagcttctacggcagcagccaccaccaccaccaccaccaccaccaccaccacagacacctgatcagcagctgcaagggcagatgccccgccagctacaccagattcaccaccatgctgaagcacgagagagccagacacgagaacaccgaggagcccagaagacaggagatggaccccggcctgagcaagctggccttcctggtgagccccgtgcccttcagaagaaagaagaacagcgcccccaagaagcagaccgagaaggccaagtgcaaggccagcgtgttcgaggccctggacagcgccctgaaggacatctgcgaccagatcaaggccgagaagaagagaggcagcctgcccgacaacagcatcctgcacagactgatcagcgagctgctgcccgacgtgcccgagagaaacagcagcctgagagccctgagaagaagccccctgcaccagcccctgcaccccctgccccccgacggcgccatccactgccccccctaccagaacgactgcggcagaatgcccagaagcgccagcttccaggacgtggacaccgccaacagcagctgccaccaccaggacagaggcggcgccctgcaggacagagagagccccagaagctacagcagcaccctgaccgacatgggcagaagcgcccccagagagagaagaggcacccccgagaaggagaagctgcccgccaaggccgtgtacgacttcaaggcccagaccagcaaggagctgagcttcaagaagggcgacaccgtgtacatcctgagaaagatcgaccagaactggtacgagggcgagcaccacggcagagtgggcatcttccccatcagctacgtggagaagctgaccccccccgagaaggcccagcccgccagaccccccccccccgcccagcccggcgagatcggcgaggccatcgccaagtacaacttcaacgccgacaccaacgtggagctgagcctgagaaagggcgacagagtgatcctgctgaagagagtggaccagaactggtacgagggcaagatccccggcaccaacagacagggcatcttccccgtgagctacgtggaggtggtgaagaagaacaccaagggcgccgaggactaccccgacccccccatcccccacagctacagcagcgacagaatccacagcctgagcagcaacaagccccagagacccgtgttcacccacgagaacatccagggcggcggcgagcccttccaggccctgtacaactacacccccagaaacgaggacgagctggagctgagagagagcgacgtgatcgacgtgatggagaagtgcgacgacggctggttcgtgggcaccagcagaagaaccaagttcttcggcaccttccccggcaactacgtgaagagactgtag

SEQ ID NO: 10399 - DNA, 1470 bp, synthetic construct
  source 1..1470: mol_type = other DNA; note = Synthetic coding sequence
atggaggacagcgccagcgccagcctgagcagcgccgccgccaccggcaccagcaccagcacccccgccgcccccaccgccagaaagcagctggacaaggagcaggtgagaaaggccgtggacgccctgctgacccactgcaagagcagaaagaacaactacggcctgctgctgaacgagaacgagagcctgttcctgatggtggtgctgtggaagatccccagcaaggagctgagagtgagactgaccctgccccacagcatcagaagcgacagcgaggacatctgcctgttcaccaaggacgagcccaacagcacccccgagaagaccgagcagttctacagaaagctgctgaacaagcacggcatcaagaccgtgagccagatcatcagcctgcagaccctgaagaaggagtacaagagctacgaggccaagctgagactgctgagcagcttcgacttcttcctgaccgacgccagaatcagaagactgctgcccagcctgatcggcagacacttctaccagagaaagaaggtgcccgtgagcgtgaacctgctgagcaagaacctgagcagagagatcaacgactgcatcggcggcaccgtgctgaacatcagcaagagcggcagctgcagcgccatcagaatcggccacgtgggcatgcagatcgagcacatcatcgagaacatcgtggccgtgaccaagggcctgagcgagaagctgcccgagtgggagagcgtgaagctgctgttcgtgaagaccgagaagagcgccgccctgcccatcttcagcagcttcgtgagcaactgggacgaggccaccaagagaagcctgctgaacaagaagaagaaggaggccagaagaaagagaagagagagaaacttcgagaagcagaaggagagaaagaagaagagacagcaggccagaaagaccgccagcgtgctgagcaaggacgacgtggcccccgagagcggcgacaccaccgtgaagaagcccgagagcaagaaggagcagacccccgagcacggcaagaagaagagaggcagaggcaaggcccaggtgaaggccaccaacgagagcgaggacgagatcccccagctggtgcccatcggcaagaagacccccgccaacgagaaggtggagatccagaagcacgccaccggcaagaagagccccgccaagagccccaaccccagcacccccagaggcaagaagagaaaggccctgcccgccagcgagacccccaaggccgccgagagcgagacccccggcaagagccccgagaagaagcccaagatcaaggaggaggccgtgaaggagaagagccccagcctgggcaagaaggacgccagacagacccccaagaagcccgaggccaagttcttcaccacccccagcaagagcgtgagaaaggccagccacacccccaagaagtggcccaagaagcccaaggtgccccagagcacctag

SEQ ID NO: 10400 - DNA, 3171 bp, synthetic construct
  source 1..3171: mol_type = other DNA; note = Synthetic coding sequence
atggccggcgccctgagaagaggcagagccctgggcagcagacccagcggccccaccgtgagcagcagaagaagcccccagtgccccgtggcccaggagggcctgggcgccagaagcagacccagagtggcccccagaagcctggccagatgcggccccagcagcagactgatgggctggaagcccagcgaggccagaggccagagccagagcttccaggccagcggcctgcagcccagaagcctgaaggccgccagaagagccaccggcagacccgacagaagcagagccgccccccccaacatggaccccgacccccaggccggcgtgcaggtgggcatgagagtggtgagaggcgtggactggaagtggggccagcaggacggcggcgagggcggcgtgggcaccgtggtggagctgggcagacacggcagccccagcacccccgacagaaccgtggtggtgcagtgggaccagggcaccagaaccaactacagagccggctaccagggcgcccacgacctgctgctgtacgacaacgcccagatcggcgtgagacaccccaacatcatctgcgactgctgcaagaagcacggcctgagaggcatgagatggaagtgcagagtgtgcctggactacgacctgtgcacccagtgctacatgcacaacaagcacgagctggcccacgccttcgacagatacgagaccgcccacagcagacccgtgaccctgagccccagacagggcctgcccagaatccccctgagaggcatcttccagggcgccaaggtggtgagaggccccgactgggagtggggcagccaggacggcggcgagggcaagcccggcagagtggtggacatcagaggctgggacgtggagaccggcagaagcgtggccagcgtgacctgggccgacggcaccaccaacgtgtacagagtgggccacaagggcaaggtggacctgaagtgcgtgggcgaggccgccggcggcttctactacaaggaccacctgcccagactgggcaagcccgccgagctgcagagaagagtgagcgccgacagccagcccttccagcacggcgacaaggtgaagtgcctgctggacaccgacgtgctgagagagatgcaggagggccacggcggctggaaccccagaatggccgagttcatcggccagaccggcaccgtgcacagaatcaccgacagaggcgacgtgagagtgcagttcaaccacgagaccagatggaccttccaccccggcgccctgaccaagcaccacagcttctgggtgggcgacgtggtgagagtgatcggcgacctggacaccgtgaagagactgcaggccggccacggcgagtggaccgacgacatggcccccgccctgggcagagtgggcaaggtggtgaaggtgttcggcgacggcaacctgagagtggccgtggccggccagagatggaccttcagccccagctgcctggtggcctacagacccgaggaggacgccaacctggacgtggccgagagagccagagagaacaagagcagcctgagcgtggccctggacaagctgagagcccagaagagcgaccccgagcaccccggcagactggtggtggaggtggccctgggcaacgccgccagagccctggacctgctgagaagaagacccgagcaggtggacaccaagaaccagggcagaaccgccctgcaggtggccgcctacctgggccaggtggagctgatcagactgctgctgcaggccagagccggcgtggacctgcccgacgacgagggcaacaccgccctgcactacgccgccctgggcaaccagcccgaggccaccagagtgctgctgagcgccggctgcagagccgacgccatcaacagcacccagagcaccgccctgcacgtggccgtgcagagaggcttcctggaggtggtgagagccctgtgcgagagaggctgcgacgtgaacctgcccgacgcccacagcgacacccccctgcacagcgccatcagcgccggcaccggcgccagcggcatcgtggaggtgctgaccgaggtgcccaacatcgacgtgaccgccaccaacagccagggcttcaccctgctgcaccacgccagcctgaagggccacgccctggccgtgagaaagatcctggccagagccagacagctggtggacgccaagaaggaggacggcttcaccgccctgcacctggccgccctgaacaaccacagagaggtggcccagatcctgatcagagagggcagatgcgacgtgaacgtgagaaacagaaagctgcagagccccctgcacctggccgtgcagcaggcccacgtgggcctggtgcccctgctggtggacgccggctgcagcgtgaacgccgaggacgaggagggcgacaccgccctgcacgtggccctgcagagacaccagctgctgcccctggtggccgacggcgccggcggcgaccccggccccctgcagctgctgagcagactgcaggccagcggcctgcccggcagcgccgagctgaccgtgggcgccgccgtggcctgcttcctggccctggagggcgccgacgtgagctacaccaaccacagaggcagaagccccctggacctggccgccgagggcagagtgctgaaggccctgcagggctgcgcccagagattcagagagagacaggccggcggcggcgccgcccccggccccagacagaccctgggcacccccaacaccgtgaccaacctgcacgtgggcgccgcccccggccccgaggccgccgagtgcctggtgtgcagcgagctggccctgctggtgctgttcagcccctgccagcacagaaccgtgtgcgaggagtgcgccagaagaatgaagaagtgcatcagatgccaggtggtggtgagcaagaagctgagacccgacggcagcgaggtggccagcgccgcccccgcccccggcccccccagacagctggtggaggagctgcagagcagatacagacagatggaggagagaatcacctgccccatctgcatcgacagccacatcagactggtgttccagtgcggccacggcgcctgcgccccctgcggcagcgccctgagcgcctgccccatctgcagacagcccatcagagacagaatccagatcttcgtgtag

SEQ ID NO: 10401 - DNA, 858 bp, synthetic construct
  source 1..858: mol_type = other DNA; note = Synthetic coding sequence
atgagcgaggccggcgaggagcagcccatggagaccaccggcgccaccgagaacggccacgaggccgtgcccgagggcgagagccccgccggcgccggcaccggcgccgccgccggcgccggcggcgccaccgccgccccccccagcggcaaccagaacggcgccgagggcgaccagatcaacgccagcaagaacgaggaggacgccggcaagatgttcgtgggcggcctgagctgggacaccagcaagaaggacctgaaggactacttcaccaagttcggcgaggtggtggactgcaccatcaagatggaccccaacaccggcagaagcagaggcttcggcttcatcctgttcaaggacgccgccagcgtggagaaggtgctggaccagaaggagcacagactggacggcagagtgatcgaccccaagaaggccatggccatgaagaaggaccccgtgaagaagatcttcgtgggcggcctgaaccccgaggccaccgaggagaagatcagagagtacttcggcgagttcggcgagatcgaggccatcgagctgcccatggaccccaagctgaacaagagaagaggcttcgtgttcatcaccttcaaggaggaggagcccgtgaagaaggtgctggagaagaagttccacaccgtgagcggcagcaagtgcgagatcaaggtggcccagcccaaggaggtgtaccagcagcagcagtacggcagcggcggcagaggcaacagaaacagaggcaacagaggcagcggcggcggcggcggcggcggcggccagggcagcaccaactacggcaagagccagagaagaggcggccaccagaacaactacaagccctactag

SEQ ID NO: 10402 - DNA, 1212 bp, synthetic construct; identical to SEQ ID NO: 9962
  source 1..1212: mol_type = other DNA; note = Synthetic coding sequence

SEQ ID NO: 10403 - DNA, 1347 bp, synthetic construct
  source 1..1347: mol_type = other DNA; note = Synthetic coding sequence
atggccaccgacagctgggccctggccgtggacgagcaggaggccgccgccgagagcctgagcaacctgcacctgaaggaggagaagatcaagcccgacaccaacggcgccgtggtgaagaccaacgccaacgccgagaagaccgacgaggaggagaaggaggacagagccgcccagagcctgctgaacaagctgatcagaagcaacctggtggacaacaccaaccaggtggaggtgctgcagagagaccccaacagccccctgtacagcgtgaagagcttcgaggagctgagactgccccagaacctgatcgcccagagccagagcggcaccggcaagaccgccgccttcgtgctggccatgctgagccaggtggagcccgccaacaagtacccccagtgcctgtgcctgagccccacctacgagctggccctgcagaccggcaaggtgatcgagcagatgggcaagttctaccccgagctgaagctggcctacgccgtgagaggcaacaagctggagagaggccagaagatcagcgagcagatcgtgatcggcacccccggcaccgtgctggactggtgcagcaagctgaagttcatcgaccccaagaagatcaaggtgttcgtgctggacgaggccgacgtgatgatcgccacccagggccaccaggaccagagcatcagaatccagagaatgctgcccagaaactgccagatgctgctgttcagcgccaccttcgaggacagcgtgtggaagttcgcccagaaggtggtgcccgaccccaacgtgatcaagctgaagagagaggaggagaccctggacaccatcaagcagtactacgtgctgtgcagcagcagagacgagaagttccaggccctgtgcaacctgtacggcgccatcaccatcgcccaggccatgatcttctgccacaccagaaagaccgccagctggctggccgccgagctgagcaaggagggccaccaggtggccctgctgagcggcgagatgatggtggagcagagagccgccgtgatcgagagattcagagagggcaaggagaaggtgctggtgaccaccaacgtgtgcgccagaggcatcgacgtggagcaggtgagcgtggtgatcaacttcgacctgcccgtggacaaggacggcaaccccgacaacgagacctacctgcacagaatcggcagaaccggcagattcggcaagagaggcctggccgtgaacatggtggacagcaagcacagcatgaacatcctgaacagaatccaggagcacttcaacaagaagatcgagagactggacaccgacgacctggacgagatcgagaagatcgccaactag

SEQ ID NO: 10404 - DNA, 1248 bp, synthetic construct; identical to SEQ ID NO: 10184
  source 1..1248: mol_type = other DNA; note = Synthetic coding sequence

SEQ ID NO: 10405 - DNA, 1026 bp, synthetic construct
  source 1..1026: mol_type = other DNA; note = Synthetic coding sequence
atggcccaggagagccccaagaacagcgccgccgagatccccgtgaccagcaacggcgaggtggacgacagcagagagcacagcttcaacagagacctgaagcacagcctgcccagcggcctgggcctgagcgagacccagatcaccagccacggcttcgacaacaccaaggagggcgtgatcgaggccggcgccttccagggcggccagagaacccagaccaagagcggccccgtgatcctggccgacgagatcaagaaccccgccatggagaagctggagctggtgagaaagtggagcctgaacacctacaagtgcaccagacagatcatcagcgagaagctgggcagaggcagcagaaccgtggacctggagctggaggcccagatcgacatcctgagagacaacaagaagaagtacgagaacatcctgaagctggcccagaccctgagcacccagctgttccagatggtgcacacccagagacagctgggcgacgccttcgccgacctgagcctgaagagcctggagctgcacgaggagttcggctacaacgccgacacccagaagctgctggccaagaacggcgagaccctgctgggcgccatcaacttcttcatcgccagcgtgaacaccctggtgaacaagaccatcgaggacaccctgatgaccgtgaagcagtacgagagcgccagaatcgagtacgacgcctacagaaccgacctggaggagctgaacctgggccccagagacgccaacaccctgcccaagatcgagcagagccagcacctgttccaggcccacaaggagaagtacgacaagatgagaaacgacgtgagcgtgaagctgaagttcctggaggagaacaaggtgaaggtgctgcacaaccagctggtgctgttccacaacgccatcgccgcctacttcgccggcaaccagaagcagctggagcagaccctgaagcagttccacatcaagctgaagacccccggcgtggacgcccccagctggctggaggagcagtag

SEQ ID NO: 10406 - DNA, 1572 bp, synthetic construct
  source 1..1572: mol_type = other DNA; note = Synthetic coding sequence
atggccaacgtgggcctgcagttccaggccagcgccggcgacagcgacccccagagcagacccctgctgctgctgggccagctgcaccacctgcacagagtgccctggagccacgtgagaggcaagctgcagcccagagtgaccgaggagctgtggcaggccgccctgagcaccctgaaccccaaccccaccgacagctgccccctgtacctgaactacgccaccgtggccgccctgccctgcagagtgagcagacacaacagccccagcgccgcccacttcatcaccagactggtgagaacctgcctgccccccggcgcccacagatgcatcgtgatggtgtgcgagcagcccgaggtgttcgccagcgcctgcgccctggccagagccttccccctgttcacccacagaagcggcgccagcagaagactggagaagaagaccgtgaccgtggagttcttcctggtgggccaggacaacggccccgtggaggtgagcaccctgcagtgcctggccaacgccaccgacggcgtgagactggccgccagaatcgtggacaccccctgcaacgagatgaacaccgacaccttcctggaggagatcaacaaggtgggcaaggagctgggcatcatccccaccatcatcagagacgaggagctgaagaccagaggcttcggcggcatctacggcgtgggcaaggccgccctgcacccccccgccctggccgtgctgagccacacccccgacggcgccacccagaccatcgcctgggtgggcaagggcatcgtgtacgacaccggcggcctgagcatcaagggcaagaccaccatgcccggcatgaagagagactgcggcggcgccgccgccgtgctgggcgccttcagagccgccatcaagcagggcttcaaggacaacctgcacgccgtgttctgcctggccgagaacagcgtgggccccaacgccaccagacccgacgacatccacctgctgtacagcggcaagaccgtggagatcaacaacaccgacgccgagggcagactggtgctggccgacggcgtgagctacgcctgcaaggacctgggcgccgacatcatcctggacatggccaccctgaccggcgcccagggcatcgccaccggcaagtaccacgccgccgtgctgaccaacagcgccgagtgggaggccgcctgcgtgaaggccggcagaaagtgcggcgacctggtgcaccccctggtgtactgccccgagctgcacttcagcgagttcaccagcgccgtggccgacatgaagaacagcgtggccgacagagacaacagccccagcagctgcgccggcctgttcatcgccagccacatcggcttcgactggcccggcgtgtgggtgcacctggacatcgccgcccccgtgcacgccggcgagagagccaccggcttcggcgtggccctgctgctggccctgttcggcagagccagcgaggaccccctgctgaacctggtgagccccctgggctgcgaggtggacgtggaggagggcgacctgggcagagacagcaagagaagaagactggtgtag

SEQ ID NO: 10407 - DNA, 1371 bp, synthetic construct
  source 1..1371: mol_type = other DNA; note = Synthetic coding sequence
atggccgacggcggcagcgagagagccgacggcagaatcgtgaagatggaggtggactacagcgccaccgtggaccagagactgcccgagtgcgccaagctggccaaggagggcagactgcaggaggtgatcgagaccctgctgagcctggagaagcagaccagaaccgccagcgacatggtgagcaccagcagaatcctggtggccgtggtgaagatgtgctacgaggccaaggagtgggacctgctgaacgagaacatcatgctgctgagcaagagaagaagccagctgaagcaggccgtggccaagatggtgcagcagtgctgcacctacgtggaggagatcaccgacctgcccatcaagctgagactgatcgacaccctgagaatggtgaccgagggcaagatctacgtggagatcgagagagccagactgaccaagaccctggccaccatcaaggagcagaacggcgacgtgaaggaggccgccagcatcctgcaggagctgcaggtggagacctacggcagcatggagaagaaggagagagtggagttcatcctggagcagatgagactgtgcctggccgtgaaggactacatcagaacccagatcatcagcaagaagatcaacaccaagttcttccaggaggagaacaccgagaagctgaagctgaagtactacaacctgatgatccagctggaccagcacgagggcagctacctgagcatctgcaagcactacagagccatctacgacaccccctgcatccaggccgagagcgagaagtggcagcaggccctgaagagcgtggtgctgtacgtgatcctggcccccttcgacaacgagcagagcgacctggtgcacagaatcagcggcgacaagaagctggaggagatccccaagtacaaggacctgctgaagctgttcaccaccatggagctgatgagatggagcaccctggtggaggactacggcatggagctgagaaagggcagcctggagagccccgccaccgacgtgttcggcagcaccgaggagggcgagaagagatggaaggacctgaagaacagagtggtggagcacaacatcagaatcatggccaagtactacaccagaatcaccatgaagagaatggcccagctgctggacctgagcgtggacgagagcgaggccttcctgagcaacctggtggtgaacaagaccatcttcgccaaggtggacagactggccggcatcatcaacttccagagacccaaggaccccaacaacctgctgaacgactggagccagaagctgaacagcctgatgagcctggtgaacaagaccacccacctgatcgccaaggaggagatgatccacaacctgcagtag

SEQ ID NO: 10408 - DNA, 1011 bp, synthetic construct
  source 1..1011: mol_type = other DNA; note = Synthetic coding sequence
atgaagatcgacatccacagccacatcctgcccaaggagtggcccgacctgaagaagagattcggctacggcggctgggtgcagctgcagcaccacagcaagggcgaggccaagctgctgaaggacggcaaggtgttcagagtggtgagagagaactgctgggaccccgaggtgagaatcagagagatggaccagaagggcgtgaccgtgcaggccctgagcaccgtgcccgtgatgttcagctactgggccaagcccgaggacaccctgaacctgtgccagctgctgaacaacgacctggccagcaccgtggtgagctaccccagaagattcgtgggcctgggcaccctgcccatgcaggcccccgagctggccgtgaaggagatggagagatgcgtgaaggagctgggcttccccggcgtgcagatcggcacccacgtgaacgagtgggacctgaacgcccaggagctgttccccgtgtacgccgccgccgagagactgaagtgcagcctgttcgtgcacccctgggacatgcagatggacggcagaatggccaagtactggctgccctggctggtgggcatgcccgccgagaccaccatcgccatctgcagcatgatcatgggcggcgtgttcgagaagttccccaagctgaaggtgtgcttcgcccacggcggcggcgccttccccttcaccgtgggcagaatcagccacggcttcagcatgagacccgacctgtgcgcccaggacaaccccatgaaccccaagaagtacctgggcagcttctacaccgacgccctggtgcacgaccccctgagcctgaagctgctgaccgacgtgatcggcaaggacaaggtgatcctgggcaccgactaccccttccccctgggcgagctggagcccggcaagctgatcgagagcatggaggagttcgacgaggagaccaagaacaagctgaaggccggcaacgccctggccttcctgggcctggagagaaagcagttcgagtag

SEQ ID NO: 10409 - DNA, 1617 bp, synthetic construct
  source 1..1617: mol_type = other DNA; note = Synthetic coding sequence
atggagctgagctaccagaccctgaagttcacccaccaggccagagaggcctgcgagatgagaaccgaggccagaagaaagaacctgctgatcctgatcagccactacctgacccaggagggctacatcgacaccgccaacgccctggagcaggagaccaagctgggcctgagaagattcgaggtgtgcgacaacatcgacctggagaccatcctgatggagtacgagagctactacttcgtgaagttccagaagtaccccaagatcgtgaagaagagcagcgacaccgccgagaacaacctgccccagagaagcagaggcaagaccagaagaatgatgaacgacagctgccagaacctgcccaagatcaaccagcagagacccagaagcaagaccaccgccggcaagaccggcgacaccaagagcctgaacaaggagcaccccaaccaggaggtggtggacaacaccagactggagagcgccaacttcggcctgcacatcagcagaatcagaaaggacagcggcgaggagaacgcccaccccagaagaggccagatcatcgacttccagggcctgctgaccgacgccatcaagggcgccaccagcgagctggccctgaacaccttcgaccacaaccccgaccccagcgagagactgctgaagcccctgagcgccttcatcggcatgaacagcgagatgagagagctggccgccgtggtgagcagagacatctacctgcacaaccccaacatcaagtggaacgacatcatcggcctggacgccgccaagcagctggtgaaggaggccgtggtgtaccccatcagatacccccagctgttcaccggcatcctgagcccctggaagggcctgctgctgtacggcccccccggcaccggcaagaccctgctggccaaggccgtggccaccgagtgcaagaccaccttcttcaacatcagcgccagcaccatcgtgagcaagtggagaggcgacagcgagaagctggtgagagtgctgttcgagctggccagataccacgcccccagcaccatcttcctggacgagctggagagcgtgatgagccagagaggcaccgccagcggcggcgagcacgagggcagcctgagaatgaagaccgagctgctggtgcagatggacggcctggccagaagcgaggacctggtgttcgtgctggccgccagcaacctgccctgggagctggactgcgccatgctgagaagactggagaagagaatcctggtggacctgcccagcagagaggccagacaggccatgatctaccactggctgccccccgtgagcaagagcagagccctggagctgcacaccgagctggagtacagcgtgctgagccaggagaccgagggctacagcggcagcgacatcaagctggtgtgcagagaggccgccatgagacccgtgagaaagatcttcgacgccctggagaaccaccagagcgagagcagcgacctgcccagaatccagctggacatcgtgaccaccgccgacttcctggacgtgctgacccacaccaagcccagcgccaagaacctggcccagagatacagcgactggcagagagagttcgagagcgtgtag

SEQ ID NO: 10410 - DNA, 507 bp, synthetic construct; identical to SEQ ID NO: 9834
  source 1..507: mol_type = other DNA; note = Synthetic coding sequence

SEQ ID NO: 10411 - DNA, 1764 bp, synthetic construct
  source 1..1764: mol_type = other DNA; note = Synthetic coding sequence
atggccagcgaggacatcgccaagctggccgagaccctggccaagacccaggtggccggcggccagctgagcttcaagggcaagagcctgaagctgaacaccgccgaggacgccaaggacgtgatcaaggagatcgaggacttcgacagcctggaggccctgagactggagggcaacaccgtgggcgtggaggccgccagagtgatcgccaaggccctggagaagaagagcgagctgaagagatgccactggagcgacatgttcaccggcagactgagaaccgagatcccccccgccctgatcagcctgggcgagggcctgatcaccgccggcgcccagctggtggagctggacctgagcgacaacgccttcggccccgacggcgtgcagggcttcgaggccctgctgaagagcagcgcctgcttcaccctgcaggagctgaagctgaacaactgcggcatgggcatcggcggcggcaagatcctggccgccgccctgaccgagtgccacagaaagagcagcgcccagggcaagcccctggccctgaaggtgttcgtggccggcagaaacagactggagaacgacggcgccaccgccctggccgaggccttcagagtgatcggcaccctggaggaggtgcacatgccccagaacggcatcaaccaccccggcatcaccgccctggcccaggccttcgccgtgaaccccctgctgagagtgatcaacctgaacgacaacaccttcaccgagaagggcgccgtggccatggccgagaccctgaagaccctgagacaggtggaggtgatcaacttcggcgactgcctggtgagaagcaagggcgccgtggccatcgccgacgccatcagaggcggcctgcccaagctgaaggagctgaacctgagcttctgcgagatcaagagagacgccgccctggccgtggccgaggccatggccgacaaggccgagctggagaagctggacctgaacggcaacaccctgggcgaggagggctgcgagcagctgcaggaggtgctggagggcttcaacatggccaaggtgctggccagcctgagcgacgacgaggacgaggaggaggaggaggagggcgaggaggaggaggaggaggccgaggaggaggaggaggaggacgaggaggaggaggaggaggaggaggaggaggaggaggaggagccccagcagagaggccagggcgagaagagcgccacccccagcagaaagatcctggaccccaacaccggcgagcccgcccccgtgctgagcagccccccccccgccgacgtgagcaccttcctggccttccccagccccgagaagctgctgagactgggccccaagagcagcgtgctgatcgcccagcagaccgacaccagcgaccccgagaaggtggtgagcgccttcctgaaggtgagcagcgtgttcaaggacgaggccaccgtgagaatggccgtgcaggacgccgtggacgccctgatgcagaaggccttcaacagcagcagcttcaacagcaacaccttcctgaccagactgctggtgcacatgggcctgctgaagagcgaggacaaggtgaaggccatcgccaacctgtacggccccctgatggccctgaaccacatggtgcagcaggactacttccccaaggccctggcccccctgctgctggccttcgtgaccaagcccaacagcgccctggagagctgcagcttcgccagacacagcctgctgcagaccctgtacaaggtgtag

SEQ ID NO: 10412 - DNA, 2529 bp, synthetic construct
  source 1..2529: mol_type = other DNA; note = Synthetic coding sequence
atggacatcagcaagggcctgcccggcatgcagggcggcctgcacatctggatcagcgagaacagaaagatggtgcccgtgcccgagggcgcctacggcaacttcttcgaggagcactgctacgtgatcctgcacgtgccccagagccccaaggccacccagggcgccagcagcgacctgcactactgggtgggcaagcaggccggcgccgaggcccagggcgccgccgaggccttccagcagagactgcaggacgagctgggcggccagaccgtgctgcacagagaggcccagggccacgagagcgactgcttctgcagctacttcagacccggcatcatctacagaaagggcggcctggccagcgacctgaagcacgtggagaccaacctgttcaacatccagagactgctgcacatcaagggcagaaagcacgtgagcgccaccgaggtggagctgagctggaacagcttcaacaagggcgacatcttcctgctggacctgggcaagatgatgatccagtggaacggccccaagaccagcatcagcgagaaggccagaggcctggccctgacctacagcctgagagacagagagagaggcggcggcagagcccagatcggcgtggtggacgacgaggccaaggcccccgacctgatgcagatcatggaggccgtgctgggcagaagagtgggcagcctgagagccgccacccccagcaaggacatcaaccagctgcagaaggccaacgtgagactgtaccacgtgtacgagaagggcaaggacctgctgcaggaggaggacttctacatcctggaccagggcggcttcaagatctacgtgtggcagggcagaatgagcagcctgcaggagagaaaggccgccttcagcagagccgtgggcttcatccaggccaagggctaccccacctacaccaacgtggaggtggtgaacgacggcgccgagagcgccgccttcaagcagctgttcagaacctggagcgagaagagaagaagaaaccagaagctgggcggcagagacaagagcatccacgtgaagctggacgtgggcaagctgcacacccagcccaagctggccgcccagctgagaatggtggacgacggcagcggcaaggtggaggtgtggtgcatccaggacctgcacagacagcccgtggaccccaagagacacggccagctgtgcgccggcaactgctacctggtgctgtacacctaccagagactgggcagagtgcagtacatcctgtacctgtggcagggccaccaggccaccgccgacgagatcgaggccctgaacagcaacgccgaggagctggacgtgatgtacggcggcgtgctggtgcaggagcacgtgaccatgggcagcgagcccccccacttcctggccatcttccagggccagctggtgatcttccaggagagagccggccaccacggcaagggccagagcgccagcaccaccagactgttccaggtgcagggcaccgacagccacaacaccagaaccatggaggtgcccgccagagccagcagcctgaacagcagcgacatcttcctgctggtgaccgccagcgtgtgctacctgtggttcggcaagggctgcaacggcgaccagagagagatggccagagtggtggtgaccgtgatcagcagaaagaacgaggagaccgtgctggagggccaggagcccccccacttctgggaggccctgggcggcagagccccctaccccagcaacaagagactgcccgaggaggtgcccagcttccagcccagactgttcgagtgcagcagccacatgggctgcctggtgctggccgaggtgggcttcttcagccaggaggacctggacaagtacgacatcatgctgctggacacctggcaggagatcttcctgtggctgggcgaggccgccagcgagtggaaggaggccgtggcctggggccaggagtacctgaagacccaccccgccggcagaagccccgccacccccatcgtgctggtgaagcagggccacgagccccccaccttcatcggctggttcttcacctgggacccctacaagtggaccagccaccccagccacaaggaggtggtggacggcagccccgccgccgccagcaccatcagcgagatcaccgccgaggtgaacaacctgagactgagcagatggcccggcaacggcagagccggcgccgtggccctgcaggccctgaagggcagccaggacagcagcgagaacgacctggtgagaagccccaagagcgccggcagcagaaccagcagcagcgtgagcagcaccagcgccaccatcaacggcggcctgagaagagagcagctgatgcaccaggccgtggaggacctgcccgagggcgtggaccccgccagaagagagttctacctgagcgacagcgacttccaggacatcttcggcaagagcaaggaggagttctacagcatggccacctggagacagagacaggagaagaagcagctgggcttcttctag

SEQ ID NO: 10413 - DNA, 1620 bp, synthetic construct
  source 1..1620: mol_type = other DNA; note = Synthetic coding sequence
atggacgccatggccagccccggcaaggacaactacagaatgaagagctacaagaacaaggccctgaacccccaggagatgagaagaagaagagaggaggagggcatccagctgagaaagcagaagagagaggagcagctgttcaagagaagaaacgtgtacctgcccagaaacgacgagagcatgctggagagccccatccaggaccccgacatcagcagcaccgtgcccatccccgaggaggaggtggtgaccaccgacatggtgcagatgatcttcagcaacaacgccgaccagcagctgaccgccacccagaagttcagaaagctgctgagcaaggagcccaacccccccatcgaccaggtgatccagaagcccggcgtggtgcagagattcgtgaagttcctggagagaaacgagaactgcaccctgcagttcgaggccgcctgggccctgaccaacatcgccagcggcaccttcctgcacaccaaggtggtgatcgagaccggcgccgtgcccatcttcatcaagctgctgaacagcgagcacgaggacgtgcaggagcaggccgtgtgggccctgggcaacatcgccggcgacaacgccgagtgcagagacttcgtgctgaactgcgagatcctgccccccctgctggagctgctgaccaacagcaacagactgaccaccaccagaaacgccgtgtgggccctgagcaacctgtgcagaggcaagaaccccccccccaacttcagcaaggtgagcccctgcctgaacgtgctgagcagactgctgttcagcagcgaccccgacgtgctggccgacgtgtgctgggccctgagctacctgagcgacggccccaacgacaagatccaggccgtgatcgacagcggcgtgtgcagaagactggtggagctgctgatgcacaacgactacaaggtggtgagccccgccctgagagccgtgggcaacatcgtgaccggcgacgacatccagacccaggtgatcctgaactgcagcgccctgccctgcctgctgcacctgctgagcagccccaaggagagcatcagaaaggaggcctgctggaccgtgagcaacatcaccgccggcaacagagcccagatccaggccgtgatcgacgccaacatcttccccgtgctgatcgagatcctgcagaaggccgagttcagaaccagaaaggaggccgcctgggccatcaccaacgccaccagcggcggcacccccgagcagatcagatacctggtggccctgggctgcatcaagcccctgtgcgacctgctgaccgtgatggacagcaagatcgtgcaggtggccctgaacggcctggagaacatcctgagactgggcgagcaggagagcaagcagaacggcatcggcatcaacccctactgcgccctgatcgaggaggcctacggcctggacaagatcgagttcctgcagagccacgagaaccaggagatctaccagaaggccttcgacctgatcgagcactacttcggcgtggaggaggacgaccccagcatcgtgccccaggtggacgagaaccagcagcagttcatcttccagcagcaggaggcccccatggacggcttccagctgtag

SEQ ID NO: 10414 - DNA, 3735 bp, synthetic construct
  source 1..3735: mol_type = other DNA; note = Synthetic coding sequence
atgctgatcaaggagtaccacatcctgctgcccatgagcctggacgagtaccaggtggcccagctgtacatgatccagaagaagagcagagaggagagcagcggcgagggcagcggcgtggagatcctggccaacagaccctacaccgacggccccggcggcagcggccagtacacccacaaggtgtaccacgtgggcagccacatccccggctggttcagagccctgctgcccaaggccgccctgcaggtggaggaggagagctggaacgcctacccctacaccagaaccagatacacctgccccttcgtggagaagttcagcatcgagatcgagacctactacctgcccgacggcggccagcagcccaacgtgttcaacctgagcggcgccgagagaagacagagaatcctggacaccatcgacatcgtgagagacgccgtggcccccggcgagtacaaggccgaggaggaccccagactgtaccacagcgtgaagaccggcagaggccccctgagcgacgactgggccagaaccgccgcccagaccggccccctgatgtgcgcctacaagctgtgcaaggtggagttcagatactggggcatgcaggccaagatcgagcagttcatccacgacgtgggcctgagaagagtgatgctgagagcccacagacaggcctggtgctggcaggacgagtggaccgagctgagcatggccgacatcagagccctggaggaggagaccgccagaatgctggcccagagaatggccaagtgcaacaccggcagcgagggcagcgaggcccagccccccggcaagcccagcaccgaggccagaagcgccgccagcaacaccggcacccccgacggccccgaggccccccccggccccgacgccagccccgacgccagcttcggcaagcagtggagcagcagcagcagaagcagctacagcagccagcacggcggcgccgtgagcccccagagcctgagcgagtggagaatgcagaacatcgccagagacagcgagaacagcagcgaggaggagttcttcgacgcccacgagggcttcagcgacagcgaggaggtgttccccaaggagatgaccaagtggaacagcaacgacttcatcgacgccttcgccagccccgtggaggccgagggcacccccgagcccggcgccgaggccgccaagggcatcgaggacggcgcccaggcccccagagacagcgagggcctggacggcgccggcgagctgggcgccgaggcctgcgccgtgcacgccctgttcctgatcctgcacagcggcaacatcctggacagcggccccggcgacgccaacagcaagcaggccgacgtgcagaccctgagcagcgccttcgaggccgtgaccagaatccacttccccgaggccctgggccacgtggccctgagactggtgccctgcccccccatctgcgccgccgcctacgccctggtgagcaacctgagcccctacagccacgacggcgacagcctgagcagaagccaggaccacatccccctggccgccctgcccctgctggccaccagcagcagcagataccagggcgccgtggccaccgtgatcgccagaaccaaccaggcctacagcgccttcctgagaagccccgagggcgccggcttctgcggccaggtggccctgatcggcgacggcgtgggcggcatcctgggcttcgacgccctgtgccacagcgccaacgccggcaccggcagcagaggcagcagcagaagaggcagcatgaacaacgagctgctgagccccgagttcggccccgtgagagaccccctggccgacggcgtggagggcctgggcagaggcagccccgagcccagcgccctgcccccccagagaatccccagcgacatggccagccccgagcccgagggcagccagaacagcctgcaggccgcccccgccaccaccagcagctgggagcccagaagagccagcaccgccttctgcccccccgccgccagcagcgaggcccccgacggccccagcagcaccgccagactggacttcaaggtgagcggcttcttcctgttcggcagccccctgggcctggtgctggccctgagaaagaccgtgatgcccgccctggaggccgcccagatgagacccgcctgcgagcagatctacaacctgttccacgccgccgacccctgcgccagcagactggagcccctgctggcccccaagttccaggccatcgcccccctgaccgtgcccagataccagaagttccccctgggcgacggcagcagcctgctgctggccgacaccctgcagacccacagcagcctgttcctggaggagctggagatgctggtgcccagcacccccaccagcaccagcggcgccttctggaagggcagcgagctggccaccgacccccccgcccagcccgccgcccccagcaccaccagcgaggtggtgaagatcctggagagatggtggggcaccaagagaatcgactacagcctgtactgccccgaggccctgaccgccttccccaccgtgaccctgccccacctgttccacgccagctactgggagagcgccgacgtggtggccttcatcctgagacaggtgatcgagaaggagagaccccagctggccgagtgcgaggagcccagcatctacagccccgccttccccagagagaagtggcagagaaagagaacccaggtgaagatcagaaacgtgaccagcaaccacagagccagcgacaccgtggtgtgcgagggcagaccccaggtgctgagcggcagattcatgtacggccccctggacgtggtgaccctgaccggcgagaaggtggacgtgtacatcatgacccagcccctgagcggcaagtggatccacttcggcaccgaggtgaccaacagcagcggcagactgaccttccccgtgccccccgagagagccctgggcatcggcgtgtaccccgtgagaatggtggtgagaggcgaccacacctacgccgagtgctgcctgaccgtggtggccagaggcaccgaggccgtggtgttcagcatcgacggcagcttcaccgccagcgtgagcatcatgggcagcgaccccaaggtgagagccggcgccgtggacgtggtgagacactggcaggacagcggctacctgatcgtgtacgtgaccggcagacccgacatgcagaagcacagagtggtggcctggctgagccagcacaacttcccccacggcgtggtgagcttctgcgacggcctgacccacgaccccctgagacagaaggccatgttcctgcagagcctggtgcaggaggtggagctgaacatcgtggccggctacggcagccccaaggacgtggccgtgtacgccgccctgggcctgagccccagccagacctacatcgtgggcagagccgtgagaaagctgcaggcccagtgccagttcctgagcgacggctacgtggcccacctgggccagctggaggccggcagccacagccacgccagcagcggcccccccagagccgccctgggcaagagcagctacggcgtggccgcccccgtggacttcctgagaaagcagagccagctgctgagaagcagaggccccagccaggccgagagagagggccccggcaccccccccaccaccctggccagaggcaaggccagaagcatcagcctgaagctggacagcgaggagtag

SEQ ID NO: 10415 - DNA, 882 bp, synthetic construct
  source 1..882: mol_type = other DNA; note = Synthetic coding sequence
atgaccgaggacagccagagaaacttcagaagcgtgtactacgagaaggtgggcttcagaggcgtggaggagaagaagagcctggagatcctgctgaaggacgacagactggacaccgagaagctgtgcaccttcagccagagattccccctgcccagcatgtacagagccctggtgtggaaggtgctgctgggcatcctgcccccccaccacgagagccacgccaaggtgatgatgtacagaaaggagcagtacctggacgtgctgcacgccctgaaggtggtgagattcgtgagcgacgccaccccccaggccgaggtgtacctgagaatgtaccagctggagagcggcaagctgcccagaagccccagcttccccctggagcccgacgacgaggtgttcctggccatcgccaaggccatggaggagatggtggaggacagcgtggactgctactggatcaccagaagattcgtgaaccagctgaacaccaagtacagagacagcctgccccagctgcccaaggccttcgagcagtacctgaacctggaggacggcagactgctgacccacctgagaatgtgcagcgccgcccccaagctgccctacgacctgtggttcaagagatgcttcgccggctgcctgcccgagagcagcctgcagagagtgtgggacaaggtggtgagcggcagctgcaagatcctggtgttcgtggccgtggagatcctgctgaccttcaagatcaaggtgatggccctgaacagcgccgagaagatcaccaagttcctggagaacatcccccaggacagcagcgacgccatcgtgagcaaggccatcgacctgtggcacaagcactgcggcacccccgtgcacagcagctag

SEQ ID NO: 10416 - DNA, 249 bp, synthetic construct
  source 1..249: mol_type = other DNA; note = Synthetic coding sequence
atgagcgagggcgagagccagaccgtgctgagcagcggcagcgaccccaaggtggagagcagcagcagcgcccccggcctgaccagcgtgagcccccccgtgaccagcaccaccagcgccgccagccccgaggaggaggaggagagcgaggacgagagcgagatcctggaggagagcccctgcggcagatggcagaagagaagagaggaggtgaaccagagaaacgtgcccggcatcgacagcgcctag

SEQ ID NO: 10417 - DNA, 5058 bp, synthetic construct
  source 1..5058: mol_type = other DNA; note = Synthetic coding sequence
atgagcctgcccttctaccagagatgccaccagcactacgacctgagctacagaaacaaggacgtgagaagcaccgtgagccactaccagagagagaagaagagaagcgccgtgtacacccagggcagcaccgcctacagcagcagaagcagcgccgcccacagaagagagagcgaggccttcagaagagccagcgccagcagcagccagcagcaggccagccagcacgccctgagcagcgaggtgagcagaaaggccgccagcgcctacgactacggcagcagccacggcctgaccgacagcagcctgctgctggacgactacagcagcaagctgagccccaagcccaagagagccaagcacagcctgctgagcggcgaggagaaggagaacctgcccagcgactacatggtgcccatcttcagcggcagacagaagcacgtgagcggcatcaccgacaccgaggaggagagaatcaaggaggccgccgcctacatcgcccagagaaacctgctggccagcgaggagggcatcaccaccagcaagcagagcaccgccagcaagcagaccaccgccagcaagcagagcaccgccagcaagcagagcaccgccagcaagcagagcaccgccagcagacagagcaccgccagcagacagagcgtggtgagcaagcaggccaccagcgccctgcagcaggaggagaccagcgagaagaagagcagaaaggtggtgatcagagagaaggccgagagactgagcctgagaaagaccctggaggagaccgagacctaccacgccaagctgaacgaggaccacctgctgcacgcccccgagttcatcatcaagcccagaagccacaccgtgtgggagaaggagaacgtgaagctgcactgcagcatcgccggctggcccgagcccagagtgacctggtacaagaaccaggtgcccatcaacgtgcacgccaaccccggcaagtacatcatcgagagcagatacggcatgcacaccctggagatcaacggctgcgacttcgaggacaccgcccagtacagagccagcgccatgaacgtgaagggcgagctgagcgcctacgccagcgtggtggtgaagagatacaagggcgagttcgacgagaccagattccacgccggcgccagcaccatgcccctgagcttcggcgtgaccccctacggctacgccagcagattcgagatccacttcgacgacaagttcgacgtgagcttcggcagagagggcgagaccatgagcctgggctgcagagtggtgatcacccccgagatcaagcacttccagcccgagatccagtggtacagaaacggcgtgcccctgagccccagcaagtgggtgcagaccctgtggagcggcgagagagccaccctgaccttcagccacctgaacaaggaggacgagggcctgtacaccatcagagtgagaatgggcgagtactacgagcagtacagcgcctacgtgttcgtgagagacgccgacgccgagatcgagggcgcccccgccgcccccctggacgtgaagtgcctggaggccaacaaggactacatcatcatcagctggaagcagcccgccgtggacggcggcagccccatcctgggctacttcatcgacaagtgcgaggtgggcaccgacagctggagccagtgcaacgacacccccgtgaagttcgccagattccccgtgaccggcctgatcgagggcagaagctacatcttcagagtgagagccgtgaacaagatgggcatcggcttccccagcagagtgagcgagcccgtggccgccctggaccccgccgagaaggccagactgaagagcagacccagcgccccctggaccggccagatcatcgtgaccgaggaggagcccagcgagggcatcgtgcccggcccccccaccgacctgagcgtgaccgaggccaccagaagctacgtggtgctgagctggaagccccccggccagagaggccacgagggcatcatgtacttcgtggagaagtgcgaggccggcaccgagaactggcagagagtgaacaccgagctgcccgtgaagagccccagattcgccctgttcgacctggccgagggcaagagctactgcttcagagtgagatgcagcaacagcgccggcgtgggcgagcccagcgaggccaccgaggtgaccgtggtgggcgacaagctggacatccccaaggcccccggcaagatcatccccagcagaaacaccgacaccagcgtggtggtgagctgggaggagagcaaggacgccaaggagctggtgggctactacatcgaggccagcgtggccggcagcggcaagtgggagccctgcaacaacaaccccgtgaagggcagcagattcacctgccacggcctggtgaccggccagagctacatcttcagagtgagagccgtgaacgccgccggcctgagcgagtacagccaggacagcgaggccatcgaggtgaaggccgccatcggcggcggcgtgagccccgacgtgtgccccgccctgagcgacgagcccggcggcctgaccgccagcagaggcagagtgcacgaggccagcccccccaccttccagaaggacgccctgctgggcagcaagcccaacaagcccagcctgcccagcagcagccagaacctgggccagaccgaggtgagcaaggtgagcgagaccgtgcaggaggagctgaccccccccccccagaaggccgccccccagggcaagagcaagagcgaccccctgaagaagaagaccgacagagccccccccagccccccctgcgacatcacctgcctggagagcttcagagacagcatggtgctgggctggaagcagcccgacaagatcggcggcgccgagatcaccggctactacgtgaactacagagaggtgatcgacggcgtgcccggcaagtggagagaggccaacgtgaaggccgtgagcgaggaggcctacaagatcagcaacctgaaggagaacatggtgtaccagttccaggtggccgccatgaacatggccggcctgggcgcccccagcgccgtgagcgagtgcttcaagtgcgaggagtggaccatcgccgtgcccggccccccccacagcctgaagtgcagcgaggtgagaaaggacagcctggtgctgcagtggaagccccccgtgcacagcggcagaacccccgtgaccggctacttcgtggacctgaaggaggccaaggccaaggaggaccagtggagaggcctgaacgaggccgccatcaagaacgtgtacctgaaggtgagaggcctgaaggagggcgtgagctacgtgttcagagtgagagccatcaaccaggccggcgtgggcaagcccagcgacctggccggccccgtggtggccgagaccagacccggcaccaaggaggtggtggtgaacgtggacgacgacggcgtgatcagcctgaacttcgagtgcgacaagatgacccccaagagcgagttcagctggagcaaggactacgtgagcaccgaggacagccccagactggaggtggagagcaagggcaacaagaccaagatgaccttcaaggacctgggcatggacgacctgggcatctacagctgcgacgtgaccgacaccgacggcatcgccagcagctacctgatcgacgaggaggagctgaagagactgctggccctgagccacgagcacaagttccccaccgtgcccgtgaagagcgagctggccgtggagatcctggagaagggccaggtgagattctggatgcaggccgagaagctgagcggcaacgccaaggtgaactacatcttcaacgagaaggagatcttcgagggccccaagtacaagatgcacatcgacagaaacaccggcatcatcgagatgttcatggagaagctgcaggacgaggacgagggcacctacaccttccagctgcaggacggcaaggccaccaaccacagcaccgtggtgctggtgggcgacgtgttcaagaagctgcagaaggaggccgagttccagagacaggagtggatcagaaagcagggcccccacttcgtggagtacctgagctgggaggtgaccggcgagtgcaacgtgctgctgaagtgcaaggtggccaacatcaagaaggagacccacatcgtgtggtacaaggacgagagagagatcagcgtggacgagaagcacgacttcaaggacggcatctgcaccctgctgatcaccgagttcagcaagaaggacgccggcatctacgaggtgatcctgaaggacgacagaggcaaggacaagagcagactgaagctggtggacgaggccttcaaggagctgatgatggaggtgtgcaagaagatcgccctgagcgccaccgacctgaagatccagagcaccgccgagggcatccagctgtacagcttcgtgacctactacgtggaggacctgaaggtgaactggagccacaacggcagcgccatcagatacagcgacagagtgaagaccggcgtgaccggcgagcagatctggctgcagatcaacgagcccacccccaacgacaagggcaagtacgtgatggagctgttcgacggcaagaccggccaccagaagaccgtggacctgagcggccaggcctacgacgaggcctacgccgagttccagagactgaagcaggccgccatcgccgagaagaacagagccagagtgctgggcggcctgcccgacgtggtgaccatccaggagggcaaggccctgaacctgacctgcaacgtgtggggcgaccccccccccgaggtgagctggctgaagaacgagaaggccctggccagcgacgaccactgcaacctgaagttcgaggccggcagaaccgcctacttcaccatcaacggcgtgagcaccgccgacagcggcaagtacggcctggtggtgaagaacaagtacggcagcgagaccagcgacttcaccgtgagcgtgttcatccccgaggaggaggccagaatggccgccctggagagcctgaagggcggcaagaaggccaagtag

SEQ ID NO: 10418 - DNA, 5877 bp, synthetic construct
  source 1..5877: mol_type = other DNA; note = Synthetic coding sequence
atggccgacagaaccgcccccagatgccagctgagactggagtgggtgtacggctacagaggccaccagtgcagaaacaacctgtactacaccgccggcaaggaggtggtgtacttcgtggccggcgtgggcgtggtgtacaacaccagagagcacagccagaagttcttcctgggccacaacgacgacatcatcagcctggccctgcaccccgacaagaccctggtggccaccggccaggtgggcaaggagccctacatctgcatctgggacagctacaacgtgcagaccgtgagcctgctgaaggacgtgcacacccacggcgtggcctgcctggccttcgacagcgacggccagagactggccagcgtgggcctggacgccaagaacaccgtgtgcatctgggactggagaaagggcaagctgctggccagcgccaccggccacagcgacagaatcttcgacatcagctgggacccctaccagcccaacagagtggtgagctgcggcgtgaagcacatcaagttctggaccctgtgcggcaacgccctgaccgccaagagaggcatcttcggcaagaccggcgacctgcagaccatcctgtgcctggcctgcgccaaggaggacatcacctacagcggcgccctgaacggcgacatctacgtgtggaagggcctgaacctggtgagaaccatccagggcgcccacagcgccggcatcttcagcatgtacgcctgcgaggagggcttcgccaccggcggcagagacggctgcatcagactgtgggacaccgacttcaagcccatcaccaagatcgacctgagagagaccgagcagggctacaagggcctgagcatcagaagcgtgtgctggaaggccgacagactgctggccggcacccaggacagcgagatcttcgaggtgatcgtgagagagagagacaagcccatgctgatcctgcagggccactgcgagggcgagctgtgggccctggccctgcaccccaagaagcccctggccgtgaccggcagcgacgacagaagcgtgagactgtggagcctggccgaccacgccctgatcgccagatgcaacatggaggaggccgtgagaagcgtggccttcagccccgacggcagccagctggccctgggcatgaaggacggcagcttcatcgtgctgagagtgagagacatgaccgaggtggtgcacatcaaggacagaaaggaggtgatccacgagatgaagttcagccccgacggcagctacctggccgtgggcagcaacgacggccccgtggacgtgtacgccgtggcccagagatacaagaagatcggcgagtgcagcaagagcctgagcttcatcacccacatcgactggagcctggacagcaagtacctgcagaccaacgacggcgccggcgagagactgttctacagaatgcccagcggcaagcccctgaccagcaaggaggagatcaagggcatcccctgggccagctggacctgcgtgaagggccccgaggtgagcggcatctggcccaagtacaccgaggtgaccgacatcaacagcgtggacgccaactacaacagcagcgtgctggtgagcggcgacgacttcggcctggtgaagctgttcaagttcccctgcctgaagagaggcgccaagttcagaaagtacgtgggccacagcgcccacgtgaccaacgtgagatggagccacgacttccagtgggtgctgagcaccggcggcgccgaccacagcgtgttccagtggagattcatccccgagggcgtgagcaacggcatgctggagaccgccccccaggagggcggcgccgacagctacagcgaggagagcgacagcgacctgagcgacgtgcccgagctggacagcgacatcgagcaggaggcccagatcaactacgacagacaggtgtacaaggaggacctgccccagctgaagcagcagagcaaggagaagaaccacgccgtgcccttcctgaagagagagaaggcccccgaggacagcctgaagctgcagttcatccacggctacagaggctacgactgcagaaacaacctgttctacacccaggccggcgaggtggtgtaccacatcgccgccgtggccgtggtgtacaacagacagcagcacagccagagactgtacctgggccacgacgacgacatcctgagcctgaccatccaccccgtgaaggactacgtggccaccggccaggtgggcagagacgccgccatccacgtgtgggacacccagaccctgaagtgcctgagcctgctgaagggccagcaccagagaggcgtgtgcgccctggacttcagcgccgacggcaagtgcctggtgagcgtgggcctggacgacttccacagcatcgtgttctgggactggaagaagggcgagaagatcgccaccaccagaggccacaaggacaagatcttcgtggtgaagtgcaacccccaccacgtggacaagctggtgaccgtgggcatcaagcacatcaagttctggcagcaggccggcggcggcttcaccagcaagagaggcaccttcggcagcgtgggcaagctggagaccatgatgtgcgtgagctacggcagaatggaggacctggtgttcagcggcgccgccaccggcgacatcttcatctggaaggacatcctgctgctgaagaccgtgaaggcccacgacggccccgtgttcgccatgtacgccctggacaagggcttcgtgaccggcggcaaggacggcatcgtggagctgtgggacgacatgttcgagagatgcctgaagacctacgccatcaagagaagcgccctgagcaccagcagcaagggcctgctgctggaggacaaccccagcatcagagccatcaccctgggccacggccacatcctggtgggcaccaagaacggcgagatcctggagatcgacaagagcggccccatgaccctgctggtgcagggccacatggagggcgaggtgtggggcctggccgcccaccccctgctgcccatctgcgccaccgtgagcgacgacaagaccctgagaatctgggagctgagcgcccagcacagaatgctggccgtgagaaagctgaagaagggcggcagatgctgcgccttcagccccgacggcaaggccctggccgtgggcctgaacgacggcagcttcctggtggtgaacgccgacaccgtggaggacatggtgagcttccaccacagaaaggagatgatcagcgacatcaagttcagcaaggacaccggcaagtacctggccgtggccagccacgacaacttcgtggacatctacaacgtgctgaccagcaagagagtgggcatctgcaagggcgccagcagctacatcacccacatcgactgggacagcagaggcaagctgctgcaggtgaacagcggcgccagagagcagctgttcttcgaggcccccagaggcaagagacacatcatcagacccagcgagatcgagaagatcgagtgggacacctggacctgcgtgctgggccccacctgcgagggcatctggcccgcccacagcgacatcaccgacgtgaacgccgccagcctgaccaaggactgcagcctgctggccaccggcgacgacttcggcttcgtgaagctgttcagctaccccgtgaagggccagcacgccagattcaagaagtacgtgggccacagcgcccacgtgaccaacgtgagatggctgcacaacgacagcgtgctgctgaccgtgggcggcgccgacaccgccctgatgatctggaccagagagttcgtgggcacccaggagagcaagctggtggacagcgaggagagcgacaccgacgtggaggaggacggcggctacgacagcgacgtggccagagagaaggccatcgactacaccaccaagatctacgccgtgagcatcagagagatggagggcaccaagccccaccagcagctgaaggaggtgagcgtggaggagagaccccccgtgagcagagccgccccccagcccgagaagctgcagaagaacaacatcaccaagaagaagaagctggtggaggagctggccctggaccacgtgttcggctacagaggcttcgactgcagaaacaacctgcactacctgaacgacggcgccgacatcatcttccacaccgccgccgccggcatcgtgcagaacctgagcaccggcagccagagcttctacctggagcacaccgacgacatcctgtgcctgaccgtgaaccagcaccccaagtacagaaacgtggtggccaccagccagatcggcaccacccccagcatccacatctgggacgccatgaccaagcacaccctgagcatgctgagatgcttccacagcaagggcgtgaactacatcaacttcagcgccaccggcaagctgctggtgagcgtgggcgtggaccccgagcacaccatcaccgtgtggagatggcaggagggcgccaaggtggccagcagaggcggccacctggagagaatcttcgtggtggagttcagacccgacagcgacacccagttcgtgagcgtgggcgtgaagcacatgaagttctggaccctggccggcagcgccctgctgtacaagaagggcgtgatcggcagcctgggcgccgccaagatgcagaccatgctgagcgtggccttcggcgccaacaacctgaccttcaccggcgccatcaacggcgacgtgtacgtgtggaaggaccacttcctgatcagactggtggccaaggcccacaccggccccgtgttcaccatgtacaccaccctgagagacggcctgatcgtgaccggcggcaaggagagacccaccaaggagggcggcgccgtgaagctgtgggaccaggagatgaagagatgcagagccttccagctggagaccggccagctggtggagtgcgtgagaagcgtgtgcagaggcaagggcaagatcctggtgggcaccaaggacggcgagatcatcgaggtgggcgagaagaacgccgccagcaacatcctgatcgacggccacatggagggcgagatctggggcctggccacccaccccagcaaggacctgttcatcagcgccagcaacgacggcaccgccagaatctgggacctggccgacaagaagctgctgaacaaggtgagcctgggccacgccgccagatgcgccgcctacagccccgacggcgagatggtggccatcggcatgaagaacggcgagttcgtgatcctgctggtgaacagcctgaaggtgtggggcaagaagagagacagaaagagcgccatccaggacatcagaatcagccccgacaacagattcctggccgtgggcagcagcgagcacaccgtggacttctacgacctgacccagggcaccaacctgaacagaatcggctactgcaaggacatccccagcttcgtgatccagatggacttcagcgccgacggcaagtacatccaggtgagcaccggcgcctacaagagacaggtgcacgaggtgcccctgggcaagcaggtgaccgaggccgtggtgatcgagaagatcacctgggccagctggaccagcgtgctgggcgacgaggtgatcggcatctggcccagaaacgccgacaaggccgacgtgaactgcgcctgcgtgacccacgccggcctgaacatcgtgaccggcgacgacttcggcctggtgaagctgttcgacttcccctgcaccgagaagttcgccaagcacaagagatacttcggccacagcgcccacgtgaccaacatcagattcagctacgacgacaagtacgtggtgagcaccggcggcgacgactgcagcgtgttcgtgtggagatgcctgtag

SEQ ID NO: 10419 - DNA, 630 bp, synthetic construct
  source 1..630: mol_type = other DNA; note = Synthetic coding sequence
atgaaccccagcatgaagcagaagcaggaggagatcaaggagaacatcaagaacagcagcgtgcccagaagaaccctgaagatgatccagcccagcgccagcggcagcctggtgggcagagagaacgagctgagcgccggcctgagcaagagaaagcacagaaacgaccacctgaccagcaccaccagcagccccggcgtgatcgtgcccgagagcagcgagaacaagaacctgggcggcgtgacccaggagagcttcgacctgatgatcaaggagaaccccagcagccagtactggaaggaggtggccgagaagagaagaaaggccctgtacgaggccctgaaggagaacgagaagctgcacaaggagatcgagcagaaggacaacgagatcgccagactgaagaaggagaacaaggagctggccgaggtggccgagcacgtgcagtacatggccgagctgatcgagagactgaacggcgagcccctggacaacttcgagagcctggacaaccaggagttcgacagcgaggaggagaccgtggaggacagcctggtggaggacagcgagatcggcacctgcgccgagggcaccgtgagcagcagcaccgacgccaagccctgcatctag

SEQ ID NO: 10420 - DNA, 1635 bp, synthetic construct
  source 1..1635: mol_type = other DNA; note = Synthetic coding sequence
atgaacaccagcatcccctaccagcagaacccctacaaccccagaggcagcagcaacgtgatccagtgctacagatgcggcgacacctgcaagggcgaggtggtgagagtgcacaacaaccacttccacatcagatgcttcacctgccaggtgtgcggctgcggcctggcccagagcggcttcttcttcaagaaccaggagtacatctgcacccaggactaccagcagctgtacggcaccagatgcgacagctgcagagacttcatcaccggcgaggtgatcagcgccctgggcagaacctaccaccccaagtgcttcgtgtgcagcctgtgcagaaagcccttccccatcggcgacaaggtgaccttcagcggcaaggagtgcgtgtgccagacctgcagccagagcatggccagcagcaagcccatcaagatcagaggccccagccactgcgccggctgcaaggaggagatcaagcacggccagagcctgctggccctggacaagcagtggcacgtgagctgcttcaagtgccagacctgcagcgtgatcctgaccggcgagtacatcagcaaggacggcgtgccctactgcgagagcgactaccacgcccagttcggcatcaagtgcgagacctgcgacagatacatcagcggcagagtgctggaggccggcggcaagcactaccaccccacctgcgccagatgcgtgagatgccaccagatgttcaccgagggcgaggagatgtacctgaccggcagcgaggtgtggcaccccatctgcaagcaggccgccagagccgagaagaagctgaagcacagaagaaccagcgagaccagcatcagcccccccggcagcagcatcggcagccccaacagagtgatctgcgacatctacgagaacctggacctgagacagagaagagccagcagccccggctacatcgacagccccacctacagcagacagggcatgagccccaccttcagcagaagcccccaccactactacagaagcggcgacctgagcaccgccaccaagagcaagaccagcgaggacatcagccagaccagcaagtacagccccatctacagccccgacccctactacgccagcgagagcgagtactggacctaccacggcagccccaaggtgcccagagccagaagattcagcagcggcggcgaggaggacgacttcgacagaagcatgcacaagctgcagagcggcatcggcagactgatcctgaaggaggagatgaaggccagaagcagcagctacgccgacccctggaccccccccagaagcagcaccagcagcagagaggccctgcacaccgccggctacgagatgagcctgaacggcagccccagaagccactacctggccgacagcgaccccctgatcagcaagagcgccagcctgcccgcctacagaagaaacggcctgcacagaacccccagcgccgacctgttccactacgacagcatgaacgccgtgaactggggcatgagagagtacaagatctacccctacgagctgctgctggtgaccaccagaggcagaaacagactgcccaaggacgtggacagaaccagactggagggcaacttctggaagagcggctgcctgtag

SEQ ID NO: 10421 - DNA, 840 bp, synthetic construct
  source 1..840: mol_type = other DNA; note = Synthetic coding sequence
atgacccccagcgagggcgccagagccggcaccggcagagagctggagatgctggacagcctgctggccctgggcggcctggtgctgctgagagacagcgtggagtgggagggcagaagcctgctgaaggccctggtgaagaagagcgccctgtgcggcgagcaggtgcacatcctgggctgcgaggtgagcgaggaggagttcagagagggcttcgacagcgacatcaacaacagactggtgtaccacgacttcttcagagaccccctgaactggagcaagaccgaggaggccttccccggcggccccctgggcgccctgagagccatgtgcaagagaaccgaccccgtgcccgtgaccatcgccctggacagcctgagctggctgctgctgagactgccctgcaccaccctgtgccaggtgctgcacgccgtgagccaccaggacagctgccccggcgacagcagcagcgtgggcaaggtgagcgtgctgggcctgctgcacgaggagctgcacggccccggccccgtgggcgccctgagcagcctggcccagaccgaggtgaccctgggcggcaccatgggccaggccagcgcccacatcctgtgcagaagacccagacagagacccaccgaccagacccagtggttcagcatcctgcccgacttcagcctggacctgcaggagggccccagcgtggagagccagccctacagcgacccccacatcccccccgtgagcaagaacgccaaggccagaaccagaaagtgcagcctggtgagcggccacggcagagagaacaagagctgcagaggctggggctggggccagggcttctag

SEQ ID NO: 10422 - DNA, 405 bp, synthetic construct
  source 1..405: mol_type = other DNA; note = Synthetic coding sequence
atgagcgagaacgccgcccccggcctgtgcggcgagctgctgctgcagagaggcaccaccaaggtggccaccggcctggtgctgaacagagaccagagactggcctgggccgagaacagcatcgacttcatcagcagagagctgtgcgcccacagcatcagaaagctgcaggcccacgtgctgctgatcaaggccgtgcacggctacttcgacagcagacagaactacagcgagaaggagagcctgagcttcatgatcgacaccatgaagagcaccctgaaggagcagttccagttcgtggaggtgcccggcaaccactgcgtgcacatgagcgagccccagcacgtggccagcatcatcagcagcttcctgcagtgcacccacatgctgcccgcccagctgtag

SEQ ID NO: 10423 - DNA, 1350 bp, synthetic construct
  source 1..1350: mol_type = other DNA; note = Synthetic coding sequence
atgatgctgggcaccgagggcggcgagggcttcgtggtgaaggtgagaggcctgccctggagctgcagcgccgacgaggtgcagagattcttcagcgactgcaagatccagaacggcgcccagggcatcagattcatctacaccagagagggcagacccagcggcgaggccttcgtggagctggagagcgaggacgaggtgaagctggccctgaagaaggacagagagaccatgggccacagatacgtggaggtgttcaagagcaacaacgtggagatggactgggtgctgaagcacaccggccccaacagccccgacaccgccaacgacggcttcgtgagactgagaggcctgcccttcggctgcagcaaggaggagatcgtgcagttcttcagcggcctggagatcgtgcccaacggcatcaccctgcccgtggacttccagggcagaagcaccggcgaggccttcgtgcagttcgccagccaggagatcgccgagaaggccctgaagaagcacaaggagagaatcggccacagatacatcgagatcttcaagagcagcagagccgaggtgagaacccactacgacccccccagaaagctgatggccatgcagagacccggcccctacgacagacccggcgccggcagaggctacaacagcatcggcagaggcgccggcttcgagagaatgagaagaggcgcctacggcggcggctacggcggctacgacgactacaacggctacaacgacggctacggcttcggcagcgacagattcggcagagacctgaactactgcttcagcggcatgagcgaccacagatacggcgacggcggcagcaccttccagagcaccaccggccactgcgtgcacatgagaggcctgccctacagagccaccgagaacgacatctacaacttcttcagccccctgaaccccgtgagagtgcacatcgagatcggccccgacggcagagtgaccggcgaggccgacgtggagttcgccacccacgaggacgccgtggccgccatgagcaaggacaaggccaacatgcagcacagatacgtggagctgttcctgaacagcaccgccggcgccagcggcggcgcctacgagcacagatacgtggagctgttcctgaacagcaccgccggcgccagcggcggcgcctacggcagccagatgatgggcggcatgggcctgagcaaccagagcagctacggcggccccgccagccagcagctgagcggcggctacggcggcggctacggcggccagagcagcatgagcggctacgaccaggtgctgcaggagaacagcagcgacttccagagcaacatcgcctag

SEQ ID NO: 10424 - DNA, 4077 bp, synthetic construct
  source 1..4077: mol_type = other DNA; note = Synthetic coding sequence
atgggcaaccagctggccggcatcgcccccagccagatcctgagcgtggagagctacttcagcgacatccacgacttcgagtacgacaagagcctgggcagcaccagattcttcaaggtggccagagccaagcacagagagggcctggtggtggtgaaggtgttcgccatccaggaccccaccctgcccctgaccagctacaagcaggagctggaggagctgaagatcagactgaacagcgcccagaactgcctgcccttccagaaggccagcgagaaggccagcgagaaggccgccatgctgttcagacagtacgtgagagacaacctgtacgacagaatcagcaccagacccttcctgaacaacatcgagaagagatggatcgccttccagatcctgaccgccgtggaccaggcccacaagagcggcgtgagacacggcgacatcaagaccgagaacgtgatggtgaccagctggaactgggtgctgctgaccgacttcgccagcttcaagcccacctacctgcccgaggacaaccccgccgacttcaactacttcttcgacaccagcagaagaagaacctgctacatcgcccccgagagattcgtggacggcggcatgttcgccaccgagctggagtacatgagagaccccagcacccccctggtggacctgaacagcaaccagagaaccagaggcgagctgaagagagccatggacatcttcagcgccggctgcgtgatcgccgagctgttcaccgagggcgtgcccctgttcgacctgagccagctgctggcctacagaaacggccacttcttccccgagcaggtgctgaacaagatcgaggaccacagcatcagagagctggtgacccagatgatccacagagagcccgacaagagactggaggccgaggactacctgaagcagcagagaggcaacgccttccccgagatcttctacaccttcctgcagccctacatggcccagttcgccaaggagaccttcctgagcgccgacgagagaatcctggtgatcagaaaggacctgggcaacatcatccacaacctgtgcggccacgacctgcccgagaaggccgagggcgagcccaaggagaacggcctggtgatcctggtgagcgtgatcaccagctgcctgcagaccctgaagtactgcgacagcaagctggccgccctggagctgatcctgcacctggcccccagactgagcgtggagatcctgctggacagaatcaccccctacctgctgcacttcagcaacgacagcgtgcccagagtgagagccgaggccctgagaaccctgaccaaggtgctggccctggtgaaggaggtgcccagaaacgacatcaacatctaccccgagtacatcctgcccggcatcgcccacctggcccaggacgacgccaccatcgtgagactggcctacgccgagaacatcgccctgctggccgagaccgccctgagattcctggagctggtgcagctgaagaacctgaacatggagaacgaccccaacaacgaggagatcgacgaggtgacccaccccaacggcaactacgacaccgagctgcaggccctgcacgagatggtgcagcagaaggtggtgaccctgctgagcgaccccgagaacatcgtgaagcagaccctgatggagaacggcatcaccagactgtgcgtgttcttcggcagacagaaggccaacgacgtgctgctgagccacatgatcaccttcctgaacgacaagaacgactggcacctgagaggcgccttcttcgacagcatcgtgggcgtggccgcctacgtgggctggcagagcagcagcatcctgaagcccctgctgcagcagggcctgagcgacgccgaggagttcgtgatcgtgaaggccctgtacgccctgacctgcatgtgccagctgggcctgctgcagaagccccacgtgtacgagttcgccagcgacatcgcccccttcctgtgccaccccaacctgtggatcagatacggcgccgtgggcttcatcaccgtggtggccagacagatcagcaccgccgacgtgtactgcaagctgatgccctacctggacccctacatcacccagcccatcatccagatcgagagaaagctggtgctgctgagcgtgctgaaggagcccgtgagcagaagcatcttcgactacgccctgagaagcaaggacatcaccagcctgttcagacacctgcacatgagacagaagaagagaaacggcagcctgcccgactgccccccccccgaggaccccgccatcgcccagctgctgaagaagctgctgagccagggcatgaccgaggaggaggaggacaagctgctggccctgaaggacttcatgatgaagagcaacaaggccaaggccaacatcgtggaccagagccacctgcacgacagcagccagaagggcgtgatcgacctggccgccctgggcatcaccggcagacaggtggacctggtgaagaccaagcaggagcccgacgacaagagagccagaaagcacgtgaagcaggacagcaacgtgaacgaggagtggaagagcatgttcggcagcctggacccccccaacatgccccaggccctgcccaagggcagcgaccaggaggtgatccagaccggcaagccccccagaagcgagagcagcgccggcatctgcgtgcccctgagcaccagcagccaggtgcccgaggtgaccaccgtgcagaacaagaagcccgtgatccccgtgctgagcagcaccatcctgcccagcacctaccagatcagaatcaccacctgcaagaccgagctgcagcagctgatccagcagaagagagagcagtgcaacgccgagagaatcgccaagcagatgatggagaacgccgagtgggagagcaagccccccccccccggctggagacccaagggcctgctggtggcccacctgcacgagcacaagagcgccgtgaacagaatcagagtgagcgacgagcacagcctgttcgccacctgcagcaacgacggcaccgtgaagatctggaacagccagaagatggagggcaagaccaccaccaccagaagcatcctgacctacagcagaatcggcggcagagtgaagaccctgaccttctgccagggcagccactacctggccatcgccagcgacaacggcgccgtgcagctgctgggcatcgaggccagcaagctgcccaagagccccaagatccaccccctgcagagcagaatcctggaccagaaggaggacggctgcgtggtggacatgcaccacttcaacagcggcgcccagagcgtgctggcctacgccaccgtgaacggcagcctggtgggctgggacctgagaagcagcagcaacgcctggaccctgaagcacgacctgaagagcggcctgatcaccagcttcgccgtggacatccaccagtgctggctgtgcatcggcaccagcagcggcaccatggcctgctgggacatgagattccagctgcccatcagcagccactgccaccccagcagagccagaatcagaagactgagcatgcaccccctgtaccagagctgggtgatcgccgccgtgcagggcaacaacgaggtgagcatgtgggacatggagaccggcgacagaagattcaccctgtgggccagcagcgccccccccctgagcgagctgcagcccagcccccacagcgtgcacggcatctactgcagccccgccgacggcaaccccatcctgctgaccgccggcagcgacatgaagatcagattctgggacctggcctaccccgagagaagctacgtggtggccggcagcaccagcagccccagcgtgagctactacagaaagatcatcgagggcaccgaggtggtgcaggagatccagaacaagcagaaggtgggccccagcgacgacacccccagaagaggccccgagagcctgcccgtgggccaccacgacatcatcaccgacgtggccaccttccagaccacccagggcttcatcgtgaccgccagcagagacggcatcgtgaaggtgtggaagtag

SEQ ID NO: 10425 - DNA, 993 bp, synthetic construct
  source 1..993: mol_type = other DNA; note = Synthetic coding sequence
atgcccgtggtgaccaccgacgccgagagcgagaccggcatccccaagagcctgagcaacgagccccccagcgagaccatggaggagatcgagcacacctgcccccagcccagactgaccctgaccgcccccgcccccttcgccgacgagaccaactgccagtgccaggccccccacgagaagctgaccatcgcccaggccagactgggcacccccgccgacagacccgtgagagtgtacgccgacggcatcttcgacctgttccacagcggccacgccagagccctgatgcaggccaagaccctgttccccaacagctacctgctggtgggcgtgtgcagcgacgacctgacccacaagttcaagggcttcaccgtgatgaacgaggccgagagatacgaggccctgagacactgcagatacgtggacgaggtgatcagagacgccccctggaccctgacccccgagttcctggagaagcacaagatcgacttcgtggcccacgacgacatcccctacagcagcgccggcagcgacgacgtgtacaagcacatcaaggaggccggcatgttcgtgcccacccagagaaccgagggcatcagcaccagcgacatcatcaccagaatcgtgagagactacgacgtgtacgccagaagaaacctgcagagaggctacaccgccaaggagctgaacgtgagcttcatcaacgagaagagatacagattccagaaccaggtggacaagatgaaggagaaggtgaagaacgtggaggagagaagcaaggagttcgtgaacagagtggaggagaagagccacgacctgatccagaagtgggaggagaagagcagagagttcatcggcaacttcctggagctgttcggccccgacggcgcctggaagcagatgttccaggagagaagcagcagaatgctgcaggccctgagccccaagcagagccccctgaagagctgggccagatgcagagacttctag

SEQ ID NO: 10426 - DNA, 2025 bp, synthetic construct
  source 1..2025: mol_type = other DNA; note = Synthetic coding sequence
atgcagaccagcagcagcagaagcgtgcacctgagcgagtggcagaagaactacttcgccatcaccagcggcatctgcaccggccccaaggccgacgcctacagagcccagatcctgagaatccagtacgcctgggccaacagcgagatcagccaggtgtgcgccaccaagctgttcaagaagtacgccgagaagtacagcgccatcatcgacagcgacaacgtggagagcggcctgaacaactacgccgagaacatcctgaccctggccggcagccagcagaccgacagcgacaagtggcagagcggcctgagcatcaacaacgtgttcaagatgagcagcgtgcagaagatgatgcaggccggcaagaagttcaaggacagcctgctggagcccgccctggccagcgtggtgatccacaaggaggccaccgtgttcgacctgcccaagttcagcgtgtgcggcagcagccaggagagcgacagcctgcccaacagcgcccacgacagagacagaacccaggacttccccgagagcaacagactgaagctgctgcagaacgcccagccccccatggtgaccaacaccgccagaacctgccccaccttcagcgcccccgtgggcgagagcgccaccgccaagttccacgtgacccccctgttcggcaacgtgaagaaggagaaccacagcagcgccaaggagaacatcggcctgaacgtgttcctgagcaaccagagctgcttccccgccgcctgcgagaacccccagagaaagagcttctacggcagcggcaccatcgacgccctgagcaaccccatcctgaacaaggcctgcagcaagaccgaggacaacggccccaaggaggacagcagcctgcccaccttcaagaccgccaaggagcagctgtgggtggaccagcagaagaagtaccaccagccccagagagccagcggcagcagctacggcggcgtgaagaagagcctgggcgccagcagaagcagaggcatcctgggcaagttcgtgccccccatccccaagcaggacggcggcgagcagaacggcggcatgcagtgcaagccctacggcgccggccccaccgagcccgcccaccccgtggacgagagactgaagaacctggagcccaagatgatcgagctgatcatgaacgagatcatggaccacggcccccccgtgaactgggaggacatcgccggcgtggagttcgccaaggccaccatcaaggagatcgtggtgtggcccatgctgagacccgacatcttcaccggcctgagaggcccccccaagggcatcctgctgttcggcccccccggcaccggcaagaccctgatcggcaagtgcatcgccagccagagcggcgccaccttcttcagcatcagcgccagcagcctgaccagcaagtgggtgggcgagggcgagaagatggtgagagccctgttcgccgtggccagatgccagcagcccgccgtgatcttcatcgacgagatcgacagcctgctgagccagagaggcgacggcgagcacgagagcagcagaagaatcaagaccgagttcctggtgcagctggacggcgccaccaccagcagcgaggacagaatcctggtggtgggcgccaccaacagaccccaggagatcgacgaggccgccagaagaagactggtgaagagactgtacatccccctgcccgaggccagcgccagaaagcagatcgtgatcaacctgatgagcaaggagcagtgctgcctgagcgaggaggagatcgagcagatcgtgcagcagagcgacgccttcagcggcgccgacatgacccagctgtgcagagaggccagcctgggccccatcagaagcctgcagaccgccgacatcgccaccatcacccccgaccaggtgagacccatcgcctacatcgacttcgagaacgccttcagaaccgtgagacccagcgtgagccccaaggacctggagctgtacgagaactggaacaagaccttcggctgcggcaagtag

SEQ ID NO: 10427 - DNA, 1143 bp, synthetic construct
  source 1..1143: mol_type = other DNA; note = Synthetic coding sequence
atgctgagaagaaagcccagcaacgccagcgagaaggagcccacccagaagaagaagctgagcctgcagagaagcagcagcttcaaggacttcgccaagagcaagcccagcagccccgtggtgagcgagaaggagttcaacctggacgacaacatccccgaggacgacagcggcgtgcccacccccgaggacgccggcaagagcggcaagaagctgggcaagaagtggagagccgtgatcagcagaaccatgaacagaaagatgggcaagatgatggtgaaggccctgagcgaggagatggccgacaccctggaggagggcagcgccagccccaccagccccgactacagcctggacagccccggccccgagaagatggccctggccttcagcgagcaggaggagcacgagctgcccgtgctgagcagacaggccagcaccggcagcgagctgtgcagccccagccccggcagcggcagcttcggcgaggagccccccgccccccagtacaccggccccttctgcggcagagccagagtgcacaccgacttcacccccagcccctacgaccacgacagcctgaagctgcagaagggcgacgtgatccagatcatcgagaagccccccgtgggcacctggctgggcctgctgaacggcaaggtgggcagcttcaagttcatctacgtggacgtgctgcccgaggaggccgtgggccacgccagacccagcagaagacagagcaagggcaagagacccaagcccaagaccctgcacgagctgctggagagaatcggcctggaggagcacaccagcaccctgctgctgaacggctaccagaccctggaggacttcaaggagctgagagagacccacctgaacgagctgaacatcatggacccccagcacagagccaagctgctgaccgccgccgagctgctgctggactacgacaccggcagcgaggaggccgaggagggcgccgagagcagccaggagcccgtggcccacaccgtgagcgagcccaaggtggacatccccagagacagcggctgcttcgagggcagcgagagcggcagagacgacgccgagctggccggcaccgaggagcagctgcagggcctgagcctggccggcgccccctag

SEQ ID NO: 10428 - DNA, 1692 bp, synthetic construct
  source 1..1692: mol_type = other DNA; note = Synthetic coding sequence
atgaaccccctgttcggccccaacctgttcctgctgcagcaggagcagcagggcctggccggccccctgggcgacagcctgggcggcgaccacttcgccggcggcggcgacctgccccccgcccccctgagccccgccggccccgccgcctacagcccccccggccccggccccgccccccccgccgccatggccctgagaaacgacctgggcagcaacatcaacgtgctgaagaccctgaacctgagattcagatgcttcctggccaaggtgcacgagctggagagaagaaacagactgctggagaagcagctgcagcaggccctggaggagggcaagcagggcagaagaggcctgggcagaagagaccaggccgtgcagaccggcttcgtgagccccatcagacccctgggcctgcagctgggcgccagacccgccgccgtgtgcagccccagcgccagagtgctgggcagccccgccagaagccccgccggccccctggcccccagcgccgccagcctgagcagcagcagcaccagcaccagcaccacctacagcagcagcgccagattcatgcccggcaccatctggagcttcagccacgccagaagactgggccccggcctggagcccaccctggtgcagggccccggcctgagctgggtgcaccccgacggcgtgggcgtgcagatcgacaccatcacccccgagatcagagccctgtacaacgtgctggccaaggtgaagagagagagagacgagtacaagagaagatgggaggaggagtacaccgtgagaatccagctgcaggacagagtgaacgagctgcaggaggaggcccaggaggccgacgcctgccaggaggagctggccctgaaggtggagcagctgaaggccgagctggtggtgttcaagggcctgatgagcaacaacctgagcgagctggacaccaagatccaggagaaggccatgaaggtggacatggacatctgcagaagaatcgacatcaccgccaagctgtgcgacgtggcccagcagagaaactgcgaggacatgatccagatgttccagaagaagctggtgcccagcatgggcggcagaaagagagagagaaaggccgccgtggaggaggacaccagcctgagcgagagcgagggccccagacagcccgacggcgacgaggaggagagcaccgccctgagcatcaacgaggagatgcagagaatgctgaaccagctgagagagtacgacttcgaggacgactgcgacagcctgacctgggaggagaccgaggagaccctgctgctgtgggaggacttcagcggctacgccatggccgccgccgaggcccagggcgagcagcaggaggacagcctggagaaggtgatcaaggacaccgagagcctgttcaagaccagagagaaggagtaccaggagaccatcgaccagatcgagctggagctggccaccgccaagaacgacatgaacagacacctgcacgagtacatggagatgtgcagcatgaagagaggcctggacgtgcagatggagacctgcagaagactgatcacccagagcggcgacagaaagagccccgccttcaccgccgtgcccctgagcgaccccccccccccccccagcgaggccgaggacagcgacagagacgtgagcagcgacagcagcatgagatag

SEQ ID NO: 10429 - DNA, 1893 bp, synthetic construct
  source 1..1893: mol_type = other DNA; note = Synthetic coding sequence
atgctgttcctggccatcccccagagcatcgacgaggagaccgaggtgtggagcgaccacatcatcttccccagaatccccagaggccccgtgcagcagcccctggaggacagaatcttcacccccgccgtgagcgccgtgtacagcaccgtgacccaggtggccagacagcccggcacccccacccccagcccctacagcgcccacgagatcaacaagggccaccccaacctggccgccaccccccccggccacgccagcagccccggcctgagccagaccccctaccccagcggccagaacgccggccccaccaccctggtgtacccccagaccccccagaccatgaacagccagccccagaccagaagccccttcgccgccggccccagacccccccaccaccagttcttccagagaccccagatccagccccccagagccaccatccccaacagcagccccagcatcagacccggcgcccagacccccaccgccgtgtaccaggccaaccagcacatcatgatggtgaaccacctgcccatgccctaccccgtgccccagggcccccagtactgcatcccccagtacagacacagcggccccccctacgtgggccccccccagcagtaccccgtgcagccccccggccccggccccttctaccccggccccggccccggcgacttccccaacgcctacggcacccccttctaccccagccagcccgtgtaccagagcgcccccatcatcgtgcccacccagcagcagcccccccccgccaagagagagaagaagaccatcagaatcagagaccccaaccagggcggcaaggacatcaccgaggagatcatgagcggcggcggcagcagaaaccccaccccccccatcggcagacccaccagcacccccacccccccccagcagctgcccagccaggtgcccgagcacagccccgtggtgtacggcaccgtggagagcgcccacctggccgccagcacccccgtgaccgccgccagcgaccagaagcaggaggagaagcccaagcccgaccccgtgctgaagagccccagccccgtgctgagactggtgctgagcggcgagaagaaggagcaggagggccagaccagcgagaccaccgccatcgtgagcatcgccgagctgcccctgccccccagccccaccaccgtgagcagcgtggccagaagcaccatcgccgcccccaccagcagcgccctgagcagccagcccatcttcaccaccgccatcgacgacagatgcgagctgagcagccccagagaggacaccatccccatccccagcctgaccagctgcaccgagaccagcgaccccctgcccaccaacgagaacgacgacgacatctgcaagaagccctgcagcgtggcccccaacgacatccccctggtgagcagcaccaacctgatcaacgagatcaacggcgtgagcgagaagctgagcgccaccgagagcatcgtggagatcgtgaagcaggaggtgctgcccctgaccctggagctggagatcctggagaacccccccgaggagatgaagctggagtgcatccccgcccccatcacccccagcaccgtgcccagcttcccccccaccccccccaccccccccgccagccccccccacacccccgtgatcgtgcccgccgccgccaccaccgtgagcagccccagcgccgccatcaccgtgcagagagtgctggaggaggacgagagcatcagaacctgcctgagcgaggacgccaaggagatccagaacaagatcgaggtggaggccgacggccagaccgaggagatcctggacagccagaacctgaacagcagaagaagccccgtgcccgagaccagcaacgagtgctag

SEQ ID NO: 10430 - DNA, 414 bp, synthetic construct
  source 1..414: mol_type = other DNA; note = Synthetic coding sequence
atgatcctgcccaccaaggccatggccacccaggagctgaccgtgaagagaaagctgagcggcaacaccctgcaggtgcaggccagcagccccgtggccctgggcgtgagaatccccaccgtggccctgcacatgatggagctgttcgacaccaccgtggagcagctgtacagcatcttcaccgtgaaggagctgaccaacaagaagatcatcatgaagtggagatgcggcaactggcccgaggagcactacgccatggtggccctgaacttcgtgcccaccctgggccagaccgagctgcagctgaaggagttcctgagcatctgcaaggaggagaacatgaagttctgctggcagaagcagcacttcgaggagatcaagggcagcctgcagctgacccccctgaacggctag

SEQ ID NO: 10431 - DNA, 1248 bp, synthetic construct; identical to SEQ ID NO: 10184
  source 1..1248: mol_type = other DNA; note = Synthetic coding sequence

SEQ ID NO: 10432 - DNA, 1464 bp, synthetic construct
  source 1..1464: mol_type = other DNA; note = Synthetic coding sequence
atgagcagccccctggccagcctgagcaagaccagaaaggtgcccctgcccagcgagcccatgaaccccggcagaagaggcatcagaatctacggcgacgtgcccgccagccacgacagcgagctgatggccttcatgaccagaaagctgtgggacctggagcagcaggtgaaggcccagaccgacgagatcctgagcaaggaccagaagatcgccgccctggaggacctggtgcagaccctgagaccccaccccgccgaggccaccctgcagagacaggaggagctggagaccatgtgcgtgcagctgcagagacaggtgagagagatggagagattcctgagcgactacggcctgcagtgggtgggcgagcccatggaccaggaggacagcgagagcaagaccgtgagcgagcacggcgagagagactggatgaccgccaagaagttctggaagcccggcgacagcctggccccccccgaggtggacttcgacagactgctggccagcctgcaggacctgagcgagctggtggtggagggcgacacccaggtgacccccgtgcccggcggcgccagactgagaaccctggagcccatccccctgaagctgtacagaaacggcatcatgatgttcgacggccccttccagcccttctacgaccccagcacccagagatgcctgagagacatcctggacggcttcttccccagcgagctgcagagactgtaccccaacggcgtgcccttcaaggtgagcgacctgagaaaccaggtgtacctggaggacggcctggaccccttccccggcgagggcagagtggtgggcagacagctgatgcacaaggccctggacagagtggaggagcaccccggcagcagaatgaccgccgagaagttcctgaacagactgcccaagttcgtgatcagacagggcgaggtgatcgacatcagaggccccatcagagacaccctgcagaactgctgccccctgcccgccagaatccaggagatcgtggtggagacccccaccctggccgccgagagagagagaagccaggagagccccaacacccccgccccccccctgagcatgctgagaatcaagagcgagaacggcgagcaggccttcctgctgatgatgcagcccgacaacaccatcggcgacgtgagagccctgctggcccaggccagagtgatggacgccagcgccttcgagatcttcagcaccttcccccccaccctgtaccaggacgacaccctgaccctgcaggccgccggcctggtgcccaaggccgccctgctgctgagagccagaagagcccccaagagcagcctgaagttcagccccggcccctgccccggccccggccccggccccagccccggccccggccccggccccagccccggccccggccccggccccagcccctgccccggccccagccccagcccccagtag

SEQ ID NO: 10433 - DNA, 1467 bp, synthetic construct
  source 1..1467: mol_type = other DNA; note = Synthetic coding sequence
atgagcgccttctgcctgggcctggtgggcagagccagcgcccccgccgagcccgacagcgcctgctgcatggagctgcccgccgccgccggcgacgccgtgagaagccccgccgccgccgccgccctgatcttccccggcggcagcggcgagctggagctggccctggaggaggagctggccctgctggccgccggcgagagacccagcgaccccggcgagcacccccaggccgagctgctgagcgtgatcagacagaaggagaaggacctggtgctggccgccagactgggcaaggccctgctggagagaaaccaggacatgagcagacagtacgagcagatgcacaaggagctgaccgacaagctggagcacctggagcaggagaagcacgagctgagaagaagattcgagaacagagagggcgagtgggagggcagagtgagcgagctggagagcgacgtgaagcagctgcaggacgagctggagagacagcagatccacctgagagaggccgacagagagaagagcagagccgtgcaggagctgagcgagcagaaccagagactgctggaccagctgagcagagccagcgaggtggagagacagctgagcatgcaggtgcacgccctgagagaggacttcagagagaagaacagcagcaccaaccagcacatcatcagactggagagcctgcaggccgagatcaagatgctgagcgacagaaagagagagctggagcacagactgagcgccaccctggaggagaacgacctgctgcagggcaccgtggaggagctgcaggacagagtgctgatcctggagagacagggccacgacaaggacctgcagctgcaccagagccagctggagctgcaggaggtgagactgagctgcagacagctgcaggtgaaggtggaggagctgaccgaggagagaagcctgcagagcagcgccgccaccagcaccagcctgctgagcgagatcgagcagagcatggaggccgaggagctggagcaggagagagagcagctgagactgcagctgtgggaggcctactgccaggtgagatacctgtgcagccacctgagaggcaacgacagcgccgacagcgccgtgagcaccgacagcagcatggacgagagcagcgagaccagcagcgccaaggacgtgcccgccggcagcctgagaaccgccctgaacgagctgaagagactgatccagagcatcgtggacggcatggagcccaccggcagcagaagactggacgacgacagcctggaggagcagatcagacagaccagcgaggacagcagagccctgagagagctgatggagggcgagagaggcagactgcccgaggccagcagatgctgcctgcccgcctgcagccagcccatccagagccccagcctgccccacgtgggcaaggcccagcagggctgcgccgccagaatgtacctgtag

SEQ ID NO: 10434 - DNA, 1428 bp, synthetic construct
  source 1..1428: mol_type = other DNA; note = Synthetic coding sequence
atgaccagaggcaccggcggcaccgcccagagaggcagaagcggccccgacagccagggcctgctggacagcagcctgatggccagcggcaccgccagcagaagcgaggacgaggagagcctggccggccagaagagagccagcagccaggccctgggcaccatccccaagagaagaagcagcagcagattcatcaagagaaagaagttcgacgacgagctggtggagagcagcctggccaagagcagcaccagagccaagggcgccagcggcgtggagcccggcagatgcagcggcagcgagcccagcagcagcgagaagaagaaggtgagcaaggcccccagcacccccgtgccccccagccccgcccccgcccccggcctgaccaagagagtgaagaagagcaagcagcccctgcaggtgaccaaggacctgggcagatggaagcccgccgacgacctgctgctgatcaacgccgtgctgcagaccaacgacctgaccagcgtgcacctgggcgtgaagttcagctgcagattcaccctgagagaggtgcaggagagatggtacgccctgctgtacgaccccgtgatcagcaagctggcctgccaggccatgagacagctgcaccccgaggccatcgccgccatccagagcaaggccctgttcagcaaggccgaggagcagctgctgagcaaggtgggcagcaccagccagcccaccctggagaccttccaggacctgctgcacagacaccccgacgccttctacctggccagaaccgccaaggccctgcaggcccactggcagctgatgaagcagtactacctgctggaggaccagaccgtgcagcccctgcccaagggcgaccaggtgctgaacttcagcgacgccgaggacctgatcgacgacagcaagctgaaggacatgagagacgaggtgctggagcacgagctgatggtggccgacagaagacagaagagagagatcagacagctggagcaggagctgcacaagtggcaggtgctggtggacagcatcaccggcatgagcagccccgacttcgacaaccagaccctggccgtgctgagaggcagaatggtgagatacctgatgagaagcagagagatcaccctgggcagagccaccaaggacaaccagatcgacgtggacctgagcctggagggccccgcctggaagatcagcagaaagcagggcgtgatcaagctgaagaacaacggcgacttcttcatcgccaacgagggcagaagacccatctacatcgacggcagacccgtgctgtgcggcagcaagtggagactgagcaacaacagcgtggtggagatcgccagcctgagattcgtgttcctgatcaaccaggacctgatcgccctgatcagagccgaggccgccaagatcaccccccagtag

SEQ ID NO: 10435 - DNA, 1311 bp, synthetic construct
  source 1..1311: mol_type = other DNA; note = Synthetic coding sequence
atggccgacggcggcagcgagagagccgacggcagaatcgtgaagatggaggtggactacagcgccaccgtggaccagagactgcccgagtgcgccaagctggccaaggccagcgacatggtgagcaccagcagaatcctggtggccgtggtgaagatgtgctacgaggccaaggagtgggacctgctgaacgagaacatcatgctgctgagcaagagaagaagccagctgaagcaggccgtggccaagatggtgcagcagtgctgcacctacgtggaggagatcaccgacctgcccatcaagctgagactgatcgacaccctgagaatggtgaccgagggcaagatctacgtggagatcgagagagccagactgaccaagaccctggccaccatcaaggagcagaacggcgacgtgaaggaggccgccagcatcctgcaggagctgcaggtggagacctacggcagcatggagaagaaggagagagtggagttcatcctggagcagatgagactgtgcctggccgtgaaggactacatcagaacccagatcatcagcaagaagatcaacaccaagttcttccaggaggagaacaccgagaagctgaagctgaagtactacaacctgatgatccagctggaccagcacgagggcagctacctgagcatctgcaagcactacagagccatctacgacaccccctgcatccaggccgagagcgagaagtggcagcaggccctgaagagcgtggtgctgtacgtgatcctggcccccttcgacaacgagcagagcgacctggtgcacagaatcagcggcgacaagaagctggaggagatccccaagtacaaggacctgctgaagctgttcaccaccatggagctgatgagatggagcaccctggtggaggactacggcatggagctgagaaagggcagcctggagagccccgccaccgacgtgttcggcagcaccgaggagggcgagaagagatggaaggacctgaagaacagagtggtggagcacaacatcagaatcatggccaagtactacaccagaatcaccatgaagagaatggcccagctgctggacctgagcgtggacgagagcgaggccttcctgagcaacctggtggtgaacaagaccatcttcgccaaggtggacagactggccggcatcatcaacttccagagacccaaggaccccaacaacctgctgaacgactggagccagaagctgaacagcctgatgagcctggtgaacaagaccacccacctgatcgccaaggaggagatgatccacaacctgcagtag

SEQ ID NO: 10436 - DNA, 1974 bp, synthetic construct
  source 1..1974: mol_type = other DNA; note = Synthetic coding sequence
atggacgaccccgactgcgacagcacctgggaggaggacgaggaggacgccgaggacgccgaggacgaggactgcgaggacggcgaggccgccggcgccagagacgccgacgccggcgacgaggacgaggagagcgaggagcccagagccgccagacccagcagcttccagagcagaatgaccggcagcagaaactggagagccaccagagacatgtgcagatacagacacaactaccccgacctggtggagagagactgcaacggcgacacccccaacctgagcttctacagaaacgagatcagattcctgcccaacggctgcttcatcgaggacatcctgcagaactggaccgacaactacgacctgctggaggacaaccacagctacatccagtggctgttccccctgagagagcccggcgtgaactggcacgccaagcccctgaccctgagagaggtggaggtgttcaagagcagccaggagatccaggagagactggtgagagcctacgagctgatgctgggcttctacggcatcagactggaggacagaggcaccggcaccgtgggcagagcccagaactaccagaagagattccagaacctgaactggagaagccacaacaacctgagaatcaccagaatcctgaagagcctgggcgagctgggcctggagcacttccaggcccccctggtgagattcttcctggaggagaccctggtgagaagagagctgcccggcgtgagacagagcgccctggactacttcatgttcgccgtgagatgcagacaccagagaagacagctggtgcacttcgcctgggagcacttcagacccagatgcaagttcgtgtggggcccccaggacaagctgagaagattcaagcccagcagcctgccccaccccctggagggcagcagaaaggtggaggaggagggcagccccggcgaccccgaccacgaggccagcacccagggcagaacctgcggccccgagcacagcaagggcggcggcagagtggacgagggcccccagcccagaagcgtggagccccaggacgccggccccctggagagaagccagggcgacgaggccggcggccacggcgaggacagacccgagcccctgagccccaaggagagcaagaagagaaagctggagctgagcagaagagagcagccccccaccgagcccggcccccagagcgccagcgaggtggagaagatcgccctgaacctggagggctgcgccctgagccagggcagcctgagaaccggcacccaggaggtgggcggccaggaccccggcgaggccgtgcagccctgcagacagcccctgggcgccagagtggccgacaaggtgagaaagagaagaaaggtggacgagggcgccggcgacagcgccgccgtggccagcggcggcgcccagaccctggccctggccggcagccccgcccccagcggccaccccaaggccggccacagcgagaacggcgtggaggaggacaccgagggcagaaccggccccaaggagggcacccccggcagccccagcgagacccccggccccagccccgccggccccgccggcgacgagcccgccgagagccccagcgagacccccggccccagacccgccggccccgccggcgacgagcccgccgagagccccagcgagacccccggccccagccccgccggccccaccagagacgagcccgccgagagccccagcgagacccccggccccagacccgccggccccgccggcgacgagcccgccgagagccccagcgagacccccggccccagacccgccggccccgccggcgacgagcccgccgagagccccagcgagacccccggccccagccccgccggccccaccagagacgagcccgccaaggccggcgaggccgccgagctgcaggacgccgaggtggagagcagcgccaagagcggcaagccctag

SEQ ID NO: 10437 - DNA, 615 bp, synthetic construct; identical to SEQ ID NO: 9347
  source 1..615: mol_type = other DNA; note = Synthetic coding sequence

SEQ ID NO: 10438 - DNA, 3042 bp, synthetic construct
  source 1..3042: mol_type = other DNA; note = Synthetic coding sequence
atgggctggaagcccagcgaggccagaggccagagccagagcttccaggccagcggcctgcagcccagaagcctgaaggccgccagaagagccaccggcagacccgacagaagcagagccgccagacccaccatggaccccagcgcccacagaagcagagccgccccccccaacatggaccccgacccccaggccggcgtgcaggtgggcatgagagtggtgagaggcgtggactggaagtggggccagcaggacggcggcgagggcggcgtgggcaccgtggtggagctgggcagacacggcagccccagcacccccgacagaaccgtggtggtgcagtgggaccagggcaccagaaccaactacagagccggctaccagggcgcccacgacctgctgctgtacgacaacgcccagatcggcgtgagacaccccaacatcatctgcgactgctgcaagaagcacggcctgagaggcatgagatggaagtgcagagtgtgcctggactacgacctgtgcacccagtgctacatgcacaacaagcacgagctggcccacgccttcgacagatacgagaccgcccacagcagacccgtgaccctgagccccagacagggcctgcccagaatccccctgagaggcatcttccagggcgccaaggtggtgagaggccccgactgggagtggggcagccaggacggcggcgagggcaagcccggcagagtggtggacatcagaggctgggacgtggagaccggcagaagcgtggccagcgtgacctgggccgacggcaccaccaacgtgtacagagtgggccacaagggcaaggtggacctgaagtgcgtgggcgaggccgccggcggcttctactacaaggaccacctgcccagactgggcaagcccgccgagctgcagagaagagtgagcgccgacagccagcccttccagcacggcgacaaggtgaagtgcctgctggacaccgacgtgctgagagagatgcaggagggccacggcggctggaaccccagaatggccgagttcatcggccagaccggcaccgtgcacagaatcaccgacagaggcgacgtgagagtgcagttcaaccacgagaccagatggaccttccaccccggcgccctgaccaagcaccacagcttctgggtgggcgacgtggtgagagtgatcggcgacctggacaccgtgaagagactgcaggccggccacggcgagtggaccgacgacatggcccccgccctgggcagagtgggcaaggtggtgaaggtgttcggcgacggcaacctgagagtggccgtggccggccagagatggaccttcagccccagctgcctggtggcctacagacccgaggaggacgccaacctggacgtggccgagagagccagagagaacaagagcagcctgagcgtggccctggacaagctgagagcccagaagagcgaccccgagcaccccggcagactggtggtggaggtggccctgggcaacgccgccagagccctggacctgctgagaagaagacccgagcaggtggacaccaagaaccagggcagaaccgccctgcaggtggccgcctacctgggccaggtggagctgatcagactgctgctgcaggccagagccggcgtggacctgcccgacgacgagggcaacaccgccctgcactacgccgccctgggcaaccagcccgaggccaccagagtgctgctgagcgccggctgcagagccgacgccatcaacagcacccagagcaccgccctgcacgtggccgtgcagagaggcttcctggaggtggtgagagccctgtgcgagagaggctgcgacgtgaacctgcccgacgcccacagcgacacccccctgcacagcgccatcagcgccggcaccggcgccagcggcatcgtggaggtgctgaccgaggtgcccaacatcgacgtgaccgccaccaacagccagggcttcaccctgctgcaccacgccagcctgaagggccacgccctggccgtgagaaagatcctggccagagccagacagctggtggacgccaagaaggaggacggcttcaccgccctgcacctggccgccctgaacaaccacagagaggtggcccagatcctgatcagagagggcagatgcgacgtgaacgtgagaaacagaaagctgcagagccccctgcacctggccgtgcagcaggcccacgtgggcctggtgcccctgctggtggacgccggctgcagcgtgaacgccgaggacgaggagggcgacaccgccctgcacgtggccctgcagagacaccagctgctgcccctggtggccgacggcgccggcggcgaccccggccccctgcagctgctgagcagactgcaggccagcggcctgcccggcagcgccgagctgaccgtgggcgccgccgtggcctgcttcctggccctggagggcgccgacgtgagctacaccaaccacagaggcagaagccccctggacctggccgccgagggcagagtgctgaaggccctgcagggctgcgcccagagattcagagagagacaggccggcggcggcgccgcccccggccccagacagaccctgggcacccccaacaccgtgaccaacctgcacgtgggcgccgcccccggccccgaggccgccgagtgcctggtgtgcagcgagctggccctgctggtgctgttcagcccctgccagcacagaaccgtgtgcgaggagtgcgccagaagaatgaagaagtgcatcagatgccaggtggtggtgagcaagaagctgagacccgacggcagcgaggtggccagcgccgcccccgcccccggcccccccagacagctggtggaggagctgcagagcagatacagacagatggaggagagaatcacctgccccatctgcatcgacagccacatcagactggtgttccagtgcggccacggcgcctgcgccccctgcggcagcgccctgagcgcctgccccatctgcagacagcccatcagagacagaatccagatcttcgtgtag

SEQ ID NO: 10439 - DNA, 2055 bp, synthetic construct
  source 1..2055: mol_type = other DNA; note = Synthetic coding sequence
atgatccccccccaggaggccagcgccagaagaagagagatcgaggacaagctgaagcaggaggaggagaccctgagcttcatcagagacagcctggagaagagcgaccagctgaccaagaacatggtgagcatcctgagcagcttcgagagcagactgatgaagctggagaacagcatcatccccgtgcacaagcagaccgagaacctgcagagactgcaggagaacgtggagaagaccctgagctgcctggaccacgtgatcagctactaccacgtggccagcgacaccgagaagatcatcagagagggccccaccggcagactggaggagtacctgggcagcatggccaagatccagaaggccgtggagtacttccaggacaacagccccgacagccccgagctgaacaaggtgaagctgctgttcgagagaggcaaggaggccctggagagcgagttcagaagcctgatgaccagacacagcaaggtggtgagccccgtgctgatcctggacctgatcagcggcgacgacgacctggaggcccaggaggacgtgaccctggagcacctgcccgagagcgtgctgcaggacgtgatcagaatcagcagatggctggtggagtacggcagaaaccaggacttcatgaacgtgtactaccagatcagaagcagccagctggacagaagcatcaagggcctgaaggagcacttccacaagagcagcagcagcagcggcgtgccctacagccccgccatccccaacaagagaaaggacacccccaccaagaagcccgtgaagagacccggcaccatcagaaaggcccagaacctgctgaagcagtacagccagcacggcctggacggcaagaagggcggcagcaacctgatccccctggagggcagagacgacatgctggacgtggagaccgacgcctacatccactgcgtgagcgccttcgtgaagctggcccagagcgagtaccagctgctggccgacatcatccccgagcaccaccagaagaagaccttcgacagcctgatccaggacgccctggacggcctgatgctggagggcgagaacatcgtgagcgccgccagaaaggccatcgtgagacacgacttcagcaccgtgctgaccgtgttccccatcctgagacacctgaagcagaccaagcccgagttcgaccaggtgctgcagggcaccgccgccagcaccaagaacaagctgcccggcctgatcaccagcatggagaccatcggcgccaaggccctggaggacttcgccgacaacatcaagaacgaccccgacaaggagtacaacatgcccaaggacggcaccgtgcacgagctgaccagcaacgccatcctgttcctgcagcagctgctggacttccaggagaccgccggcgccatgctggccagccaggagaccagcagcagcgccaccagctacagcagcgagttcagcaagagactgctgagcacctacatctgcaaggtgctgggcaacctgcagctgaacctgctgagcaagagcaaggtgtacgaggaccccgccctgagcgccatcttcctgcacaacaactacaactacatcctgaagagcctggagaagagcgagctgatccagctggtggccgtgacccagaagaccgccgagagaagctacagagagcacatcgagcagcagatccagacctaccagagaagctggctgaaggtgaccgactacatcgccgagaagaacctgcccgtgttccagcccggcgtgaagctgagagacaaggagagacagatcatcaaggagagattcaagggcttcaacgacggcctggaggagctgtgcaagatccagaaggcctgggccatccccgacaccgagcagagagacagaatcagacaggcccagaagaccatcgtgaaggagacctacggcgccttcctgcagaagttcggcagcgtgcccttcaccaagaaccccgagaagtacatcaagtacggcgtggagcaggtgggcgacatgatcgacagactgttcgacaccagcgcctag

SEQ ID NO: 10440 - DNA, 3576 bp, synthetic construct
  source 1..3576: mol_type = other DNA; note = Synthetic coding sequence
atgcccgtgcaggccgcccagtggaccgagttcctgagctgccccatctgctacaacgagttcgacgagaacgtgcacaagcccatcagcctgggctgcagccacaccgtgtgcaagacctgcctgaacaagctgcacagaaaggcctgccccttcgaccagaccgccatcaacaccgacatcgacgtgctgcccgtgaacttcgccctgctgcagctggtgggcgcccaggtgcccgaccaccagagcatcaagctgagcaacctgggcgagaacaagcactacgaggtggccaagaagtgcgtggaggacctggccctgtacctgaagcccctgagcggcggcaagggcgtggccagcctgaaccagagcgccctgagcagacccatgcagagaaagctggtgaccctggtgaactgccagctggtggaggaggagggcagagtgagagccatgagagccgccagaagcctgggcgagagaaccgtgaccgagctgatcctgcagcaccagaacccccagcagctgagcgccaacctgtgggccgccgtgagagccagaggctgccagttcctgggccccgccatgcaggaggaggccctgaagctggtgctgctggccctggaggacggcagcgccctgagcagaaaggtgctggtgctgttcgtggtgcagagactggagcccagattcccccaggccagcaagaccagcatcggccacgtggtgcagctgctgtacagagccagctgcttcaaggtgaccaagagagacgaggacagcagcctgatgcagctgaaggaggagttcagaagctacgaggccctgagaagagagcacgacgcccagatcgtgcacatcgccatggaggccggcctgagaatcagccccgagcagtggagcagcctgctgtacggcgacctggcccacaagagccacatgcagagcatcatcgacaagctgcagagccccgagagcttcgccaagagcgtgcaggagctgaccatcgtgctgcagagaaccggcgaccccgccaacctgaacagactgagaccccacctggagctgctggccaacatcgaccccaaccccgacgccgtgagccccacctgggagcagctggagaacgccatggtggccgtgaagaccgtggtgcacggcctggtggacttcatccagaactacagcagaaagggccacgagaccccccagccccagcccaacagcaagtacaagaccagcatgtgcagagacctgagacagcagggcggctgccccagaggcaccaactgcaccttcgcccacagccaggaggagctggagaagtacagactgagaaacaagaagatcaacgccaccgtgagaaccttccccctgctgaacaaggtgggcgtgaacaacaccgtgaccaccaccgccggcaacgtgatcagcgtgatcggcagcaccgagaccaccggcaagatcgtgcccagcaccaacggcatcagcaacgccgagaacagcgtgagccagctgatcagcagaagcaccgacagcaccctgagagccctggagaccgtgaagaaggtgggcaaggtgggcgccaacggccagaacgccgccggccccagcgccgacagcgtgaccgagaacaagatcggcagcccccccaagacccccgtgagcaacgtggccgccaccagcgccggccccagcaacgtgggcaccgagctgaacagcgtgccccagaagagcagccccttcctgaccagagtgcccgtgtaccccccccacagcgagaacatccagtacttccaggaccccagaacccagatccccttcgaggtgccccagtacccccagaccggctactacccccccccccccaccgtgcccgccggcgtggccccctgcgtgcccagattcgtgagaagcaacaacgtgcccgagagcagcctgccccccgccagcatgccctacgccgaccactacagcaccttcagccccagagacagaatgaacagcagcccctaccagcccccccccccccagccctacggccccgtgccccccgtgcccagcggcatgtacgcccccgtgtacgacagcagaagaatctggagaccccccatgtaccagagagacgacatcatcagaagcaacagcctgccccccatggacgtgatgcacagcagcgtgtaccagaccagcctgagagagagatacaacagcctggacggctactacagcgtggcctgccagccccccagcgagcccagaaccaccgtgcccctgcccagagagccctgcggccacctgaagaccagctgcgaggagcagatcagaagaaagcccgaccagtgggcccagtaccacacccagaaggcccccctggtgagcagcaccctgcccgtggccacccagagccccaccccccccagccccctgttcagcgtggacttcagagccgacttcagcgagagcgtgagcggcaccaagttcgaggaggaccacctgagccactacagcccctggagctgcggcaccatcggcagctgcatcaacgccatcgacagcgagcccaaggacgtgatcgccaacagcaacgccgtgctgatggacctggacagcggcgacgtgaagagaagagtgcacctgttcgagacccagagaagaaccaaggaggaggaccccatcatccccttcagcgacggccccatcatcagcaagtggggcgccatcagcagaagcagcagaaccggctaccacaccaccgaccccgtgcaggccaccgccagccagggcagcgccaccaagcccatcagcgtgagcgactacgtgccctacgtgaacgccgtggacagcagatggagcagctacggcaacgaggccaccagcagcgcccactacgtggagagagacagattcatcgtgaccgacctgagcggccacagaaagcacagcagcaccggcgacctgctgagcctggagctgcagcaggccaagagcaacagcctgctgctgcagagagaggccaacgccctggccatgcagcagaagtggaacagcctggacgagggcagacacctgaccctgaacctgctgagcaaggagatcgagctgagaaacggcgagctgcagagcgactacaccgaggacgccaccgacaccaagcccgacagagacatcgagctggagctgagcgccctggacaccgacgagcccgacggccagagcgagcccatcgaggagatcctggacatccagctgggcatcagcagccagaacgaccagctgctgaacggcatggccgtggagaacggccaccccgtgcagcagcaccagaaggagccccccaagcagaagaagcagagcctgggcgaggaccacgtgatcctggaggagcagaagaccatcctgcccgtgaccagctgcttcagccagcccctgcccgtgagcatcagcaacgccagctgcctgcccatcaccaccagcgtgagcgccggcaacctgatcctgaagacccacgtgatgagcgaggacaagaacgacttcctgaagcccgtggccaacggcaagatggtgaacagctag

SEQ ID NO: 10441 - DNA, 2100 bp, synthetic construct
  source 1..2100: mol_type = other DNA; note = Synthetic coding sequence
atgtgcggcatcttcgcctacctgaactaccacgtgcccagaaccagaagagagatcctggagaccctgatcaagggcctgcagagactggagtacagaggctacgacagcgccggcgtgggcttcgacggcggcaacgacaaggactgggaggccaacgcctgcaagatccagctgatcaagaagaagggcaaggtgaaggccctggacgaggaggtgcacaagcagcaggacatggacctggacatcgagttcgacgtgcacctgggcatcgcccacaccagatgggccacccacggcgagcccagccccgtgaacagccacccccagagaagcgacaagaacaacgagttcatcgtgatccacaacggcatcatcaccaactacaaggacctgaagaagttcctggagagcaagggctacgacttcgagagcgagaccgacaccgagaccatcgccaagctggtgaagtacatgtacgacaacagagagagccaggacaccagcttcaccaccctggtggagagagtgatccagcagctggagggcgccttcgccctggtgttcaagagcgtgcacttccccggccaggccgtgggcaccagaagaggcagccccctgctgatcggcgtgagaagcgagcacaagctgagcaccgaccacatccccatcctgtacagaaccgccagaacccagatcggcagcaagttcaccagatggggcagccagggcgagagaggcaaggacaagaagggcagctgcaacctgagcagagtggacagcaccacctgcctgttccccgtggaggagaaggccgtggagtactacttcgccagcgacgccagcgccgtgatcgagcacaccaacagagtgatcttcctggaggacgacgacgtggccgccgtggtggacggcagactgagcatccacagaatcaagagaaccgccggcgaccaccccggcagagccgtgcagaccctgcagatggagctgcagcagatcatgaagggcaacttcagcagcttcatgcagaaggagatcttcgagcagcccgagagcgtggtgaacaccatgagaggcagagtgaacttcgacgactacaccgtgaacctgggcggcctgaaggaccacatcaaggagatccagagatgcagaagactgatcctgatcgcctgcggcaccagctaccacgccggcgtggccaccagacaggtgctggaggagctgaccgagctgcccgtgatggtggagctggccagcgacttcctggacagaaacacccccgtgttcagagacgacgtgtgcttcttcctgagccagagcggcgagaccgccgacaccctgatgggcctgagatactgcaaggagagaggcgccctgaccgtgggcatcaccaacaccgtgggcagcagcatcagcagagagaccgactgcggcgtgcacatcaacgccggccccgagatcggcgtggccagcaccaaggcctacaccagccagttcgtgagcctggtgatgttcgccctgatgatgtgcgacgacagaatcagcatgcaggagagaagaaaggagatcatgctgggcctgaagagactgcccgacctgatcaaggaggtgctgagcatggacgacgagatccagaagctggccaccgagctgtaccaccagaagagcgtgctgatcatgggcagaggctaccactacgccacctgcctggagggcgccctgaagatcaaggagatcacctacatgcacagcgagggcatcctggccggcgagctgaagcacggccccctggccctggtggacaagctgatgcccgtgatcatgatcatcatgagagaccacacctacgccaagtgccagaacgccctgcagcaggtggtggccagacagggcagacccgtggtgatctgcgacaaggaggacaccgagaccatcaagaacaccaagagaaccatcaaggtgccccacagcgtggactgcctgcagggcatcctgagcgtgatccccctgcagctgctggccttccacctggccgtgctgagaggctacgacgtggacttccccagaaacctggccaagagcgtgaccgtggagtag

SEQ ID NO: 10442 - DNA, 2067 bp, synthetic construct
  source 1..2067: mol_type = other DNA; note = Synthetic coding sequence
atgagcgtgaacagcgagaagagcagcagcagcgagagacccgagccccagcagaaggcccccctggtgcccccccccccccccccccccccccccccccccccccccctgcccgaccccaccccccccgagcccgaggaggagatcctgggcagcgacgacgaggagcaggaggaccccgccgactactgcaagggcggctaccaccccgtgaagatcggcgacctgttcaacggcagataccacgtgatcagaaagctgggctggggccacttcagcaccgtgtggctgtgctgggacatgcagggcaagagattcgtggccatgaaggtggtgaagagcgcccagcactacaccgagaccgccctggacgagatcaagctgctgaagtgcgtgagagagagcgaccccagcgaccccaacaaggacatggtggtgcagctgatcgacgacttcaagatcagcggcatgaacggcatccacgtgtgcatggtgttcgaggtgctgggccaccacctgctgaagtggatcatcaagagcaactaccagggcctgcccgtgagatgcgtgaagagcatcatcagacaggtgctgcagggcctggactacctgcacagcaagtgcaagatcatccacaccgacatcaagcccgagaacatcctgatgtgcgtggacgacgcctacgtgagaagaatggccgccgaggccaccgagtggcagaaggccggcgcccccccccccagcggcagcgccgtgagcaccgccccccagcagaagcccatcggcaagatcagcaagaacaagaagaagaagctgaagaagaagcagaagagacaggccgagctgctggagaagagactgcaggagatcgaggagctggagagagaggccgagagaaagatcatcgaggagaacatcaccagcgccgcccccagcaacgaccaggacggcgagtactgccccgaggtgaagctgaagaccaccggcctggaggaggccgccgaggccgagaccgccaaggacaacggcgaggccgaggaccaggaggagaaggaggacgccgagaaggagaacatcgagaaggacgaggacgacgtggaccaggagctggccaacatcgaccccacctggatcgagagccccaagaccaacggccacatcgagaacggccccttcagcctggagcagcagctggacgacgaggacgacgacgaggaggactgccccaaccccgaggagtacaacctggacgagcccaacgccgagagcgactacacctacagcagcagctacgagcagttcaacggcgagctgcccaacggcagacacaagatccccgagagccagttccccgagttcagcaccagcctgttcagcggcagcctggagcccgtggcctgcggcagcgtgctgagcgagggcagccccctgaccgagcaggaggagagcagccccagccacgacagaagcagaaccgtgagcgccagcagcaccggcgacctgcccaaggccaagaccagagccgccgacctgctggtgaaccccctggaccccagaaacgccgacaagatcagagtgaagatcgccgacctgggcaacgcctgctgggtgcacaagcacttcaccgaggacatccagaccagacagtacagaagcatcgaggtgctgatcggcgccggctacagcacccccgccgacatctggagcaccgcctgcatggccttcgagctggccaccggcgactacctgttcgagccccacagcggcgaggactacagcagagacgaggaccacatcgcccacatcatcgagctgctgggcagcatccccagacacttcgccctgagcggcaagtacagcagagagttcttcaacagaagaggcgagctgagacacatcaccaagctgaagccctggagcctgttcgacgtgctggtggagaagtacggctggccccacgaggacgccgcccagttcaccgacttcctgatccccatgctggagatggtgcccgagaagagagccagcgccggcgagtgcctgagacacccctggctgaacagctag

SEQ ID NO: 10443 - DNA, 1308 bp, synthetic construct
  source 1..1308: mol_type = other DNA; note = Synthetic coding sequence
atgagcggctaccagagaagacccggcgccacccccctgagcagagccagaagcctggccatccccgacgcccccgccttctacgagagaagaagctgcctgccccagctgaactgcgagagaccccacggcagagacctggacagccccttcttcggcatcagacccgccttcatgtgctacgtgcccagccccgtgctggccagcgtgggcgacaccgacttcggctacggcaagggcaagtgcagcaagcagagccccagcggcgcccacggcacccacttcggcgacgacagattcgaggacctggaggaggccaaccccttcagcttcagagagttcctgaagaccaagaacctgggcctgagcaaggaggaccccgccagcagaatctacgccaaggaggccagcagacacagcctgggcctggaccacaacagcccccccagccagaccggcggctacggcctggagtaccagcagcccttcttcgaggaccccaccggcgccggcgacctgctggacgaggaggaggacgaggacaccggctggagcggcgcctacctgcccagcgccatcgagcagacccaccccgagagagtgcccgccggcaccagcccctgcagcacctacctgagcttcttcagcacccccagcgagctggccggccccgagagcctgcccagctgggccctgagcgacaccgacagcagagtgagccccgccagccccgccggcagccccagcgccgacttcgccgtgcacggcgagagcctgggcgacagacacctgagaaccctgcagatcagctacgacgccctgaaggacgagaacagcaagctgagaagaaagctgaacgaggtgcagagcttcagcgaggcccagaccgagatggtgagaaccctggagagaaagctggaggccaagatgatcaaggaggagagcgactaccacgacctggagagcgtggtgcagcaggtggagcagaacctggagctgatgaccaagagagccgtgaaggccgagaaccacgtggtgaagctgaagcaggagatcagcctgctgcaggcccaggtgagcaacttccagagagagaacgaggccctgagatgcggccagggcgccagcctgaccgtggtgaagcagaacgccgacgtggccctgcagaacctgagagtggtgatgaacagcgcccaggccagcatcaagcagctggtgagcggcgccgagaccctgaacctggtggccgagatcctgaagagcatcgacagaatcagcgaggtgaaggacgaggaggaggacagctag

SEQ ID NO: 10444 - DNA, 591 bp, synthetic construct
  source 1..591: mol_type = other DNA; note = Synthetic coding sequence
atgaaggtgaagatcaagtgctggaacggcgtggccacctggctgtgggtggccaacgacgagaactgcggcatctgcagaatggccttcaacggctgctgccccgactgccccctgcacggcgagagcatcagcagatgcctgggctggtgcccccagcccgtgcccgtgctgggcggcagagcccacccccaggtgcccatcaacaccgccagccccacccccggccagcacaccggcagcctgatgagcagagaggagagcagcagaagccccgaccccaccccccccgccctggaccaggagaccagcagcctgctgagatgcaccagcccctggtgcctggaccacagctgcgacctgttcggcatcaccgaccaggtgagcgccgacggccccagagcctgcagacagggcgccagaagaagactgcccgccggcgtgggccccgtgctgcccctgctgccccacgccctgcacccccaggtggccgccagaaccgccggcgccgccgccctgccccacgtgccccccggcatggaggtgcagggcgtgagacccgacctggccctggccggcggcgccagctag

SEQ ID NO: 10445 - DNA, 5127 bp, synthetic construct
  source 1..5127: mol_type = other DNA; note = Synthetic coding sequence
atggccgccatcggcagaggcagaagcctgaagaacctgagagtgagaggcagaaacgacagcggcgaggagaacgtgcccctggacctgaccagagagcccagcgacaacctgagagagatcctgcagaacgtggccagactgcagggcgtgagcaacatgagaaagctgggccacctgaacaacttcaccaagctgctgtgcgacatcggccacagcgaggagaagctgggcttccactacgaggacatcatcatctgcctgagactggccctgctgaacgaggccaaggaggtgagagccgccggcctgagagccctgagatacctgatccaggacagcagcatcctgcagaaggtgctgaagctgaaggtggactacctgatcgccagatgcatcgacatccagcagagcaacgaggtggagagaacccaggccctgagactggtgagaaagatgatcaccgtgaacgccagcctgttccccagcagcgtgaccaacagcctgatcgccgtgggcaacgacggcctgcaggagagagacagaatggtgagagcctgcatcgccatcatctgcgagctggccctgcagaaccccgaggtggtggccctgagaggcggcctgaacaccatcctgaagaacgtgatcgactgccagctgagcagaatcaacgaggccctgatcaccaccatcctgcacctgctgaaccaccccaagaccagacagtacgtgagagccgacgtggagctggagagaatcctggccccctacaccgacttccactacagacacagccccgacaccgccgagggccagctgaaggaggacagagaggccagattcctggccagcaagatgggcatcatcgccaccttcagaagctgggccggcatcatcaacctgtgcaagcccggcaacagcggcatccagagcctgatcggcgtgctgtgcatccccaacatggagatcagaagaggcctgctggaggtgctgtacgacatcttcagactgcccctgcccgtggtgaccgaggagttcatcgaggccctgctgagcgtggaccccggcagattccaggacagctggagactgagcgacggcttcgtggccgccgaggccaagaccatcctgccccacagagccagaagcagacccgacctgatggacaactacctggccctgatcctgagcgccttcatcagaaacggcctgctggagggcctggtggaggtgatcaccaacagcgacgaccacatcagcgtgagagccaccatcctgctgggcgagctgctgcacatggccaacaccatcctgccccacagccacagccaccacctgcactgcctgcccaccctgatgaacatggccgccagcttcgacatccccaaggagaagagactgagagccagcgccgccctgaactgcctgaagagattccacgagatgaagaagagaggccccaagccctacagcctgcacctggaccacatcatccagaaggccatcgccacccaccagaagagagaccagtacctgagagtgcagaaggacatcttcatcctgaaggacaccgaggaggccctgctgatcaacctgagagacagccaggtgctgcagcacaaggagaacctggagtggaactggaacctgatcggcaccatcctgaagtggcccaacgtgaacctgagaaactacaaggacgagcagctgcacagattcgtgagaagactgctgtacttctacaagcccagcagcaagctgtacgccaacctggacctggacttcgccaaggccaagcagctgaccgtggtgggctgccagttcaccgagttcctgctggagagcgaggaggacggccagggctacctggaggacctggtgaaggacatcgtgcagtggctgaacgccagcagcggcatgaagcccgagagaagcctgcagaacaacggcctgctgaccaccctgagccagcactacttcctgttcatcggcaccctgagctgccacccccacggcgtgaagatgctggagaagtgcagcgtgttccagtgcctgctgaacctgtgcagcctgaagaaccaggaccacctgctgaagctgaccgtgagcagcctggactacagcagagacggcctggccagagtgatcctgagcaagatcctgaccgccgccaccgacgcctgcagactgtacgccaccaagcacctgagagtgctgctgagagccaacgtggagttcttcaacaactggggcatcgagctgctggtgacccagctgcacgacaagaacaagaccatcagcagcgaggccctggacatcctggacgaggcctgcgaggacaaggccaacctgcacgccctgatccagatgaagcccgccctgagccacctgggcgacaagggcctgctgctgctgctgagattcctgagcatccccaagggcttcagctacctgaacgagagaggctacgtggccaagcagctggagaagtggcacagagagtacaacagcaagtacgtggacctgatcgaggagcagctgaacgaggccctgaccacctacagaaagcccgtggacggcgacaactacgtgagaagaagcaaccagagactgcagagaccccacgtgtacctgcccatccacctgtacggccagctggtgcaccacaagaccggctgccacctgctggaggtgcagaacatcatcaccgagctgtgcagaaacgtgagaacccccgacctggacaagtgggaggagatcaagaagctgaaggccagcctgtgggccctgggcaacatcggcagcagcaactggggcctgaacctgctgcaggaggagaacgtgatccccgacatcctgaagctggccaagcagtgcgaggtgctgagcatcagaggcacctgcgtgtacgtgctgggcctgatcgccaagaccaagcagggctgcgacatcctgaagtgccacaactgggacgccgtgagacacagcagaaagcacctgtggcccgtggtgcccgacgacgtggagcagctgtgcaacgagctgagcagcatccccagcaccctgagcctgaacagcgagagcaccagcagcagacacaacagcgagagcgagagcgtgcccagcagcatgttcatcctggaggacgacagattcggcagcagcagcaccagcaccttcttcctggacatcaacgaggacaccgagcccaccttctacgacagaagcggccccatcaaggacaagaacagcttccccttcttcgccagcagcaagctggtgaagaacagaatcctgaacagcctgaccctgcccaacaagaagcacagaagcagcagcgaccccaagggcggcaagctgagcagcgagagcaagaccagcaacagaagaatcagaaccctgaccgagcccagcgtggacttcaaccacagcgacgacttcacccccatcagcaccgtgcagaagaccctgcagctggagaccagcttcatgggcaacaagcacatcgaggacaccggcagcacccccagcatcggcgagaacgacctgaagttcaccaagaacttcggcaccgagaaccacagagagaacaccagcagagagagactggtggtggagagcagcaccagcagccacatgaagatcagaagccagagcttcaacaccgacaccaccaccagcggcatcagcagcatgagcagcagccccagcagagagaccgtgggcgtggacgccaccaccatggacaccgactgcggcagcatgagcaccgtggtgagcaccaagaccatcaagaccagccactacctgaccccccagagcaaccacctgagcctgagcaagagcaacagcgtgagcctggtgccccccggcagcagccacaccctgcccagaagagcccagagcctgaaggcccccagcatcgccaccatcaagagcctggccgactgcaacttcagctacaccagcagcagagacgccttcggctacgccaccctgaagagactgcagcagcagagaatgcaccccagcctgagccacagcgaggccctggccagccccgccaaggacgtgctgttcaccgacaccatcaccatgaaggccaacagcttcgagagcagactgacccccagcagattcatgaaggccctgagctacgccagcctggacaaggaggacctgctgagccccatcaaccagaacaccctgcagagaagcagcagcgtgagaagcatggtgagcagcgccacctacggcggcagcgacgactacatcggcctggccctgcccgtggacatcaacgacatcttccaggtgaaggacatcccctacttccagaccaagaacatccccccccacgacgacagaggcgccagagccttcgcccacgacgccggcggcctgcccagcggcaccggcggcctggtgaagaacagcttccacctgctgagacagcagatgagcctgaccgagatcatgaacagcatccacagcgacgccagcctgttcctggagagcaccgaggacaccggcctgcaggagcacaccgacgacaactgcctgtactgcgtgtgcatcgagatcctgggcttccagcccagcaaccagctgagcgccatctgcagccacagcgacttccaggacatcccctacagcgactggtgcgagcagaccatccacaaccccctggaggtggtgcccagcaagttcagcggcatcagcggctgcagcgacggcgtgagccaggagggcagcgccagcagcaccaagagcaccgagctgctgctgggcgtgaagaccatccccgacgacacccccatgtgcagaatcctgctgagaaaggaggtgctgagactggtgatcaacctgagcagcagcgtgagcaccaagtgccacgagaccggcctgctgaccatcaaggagaagtacccccagaccttcgacgacatctgcctgtacagcgaggtgagccacctgctgagccactgcaccttcagactgccctgcagaagattcatccaggagctgttccaggacgtgcagttcctgcagatgcacgaggaggccgaggccgtgctggccaccccccccaagcagcccatcgtggacaccagcgccgagagctag

SEQ ID NO: 10446 - DNA, 3867 bp, synthetic construct; identical to SEQ ID NO: 10291
  source 1..3867: mol_type = other DNA; note = Synthetic coding sequence

SEQ ID NO: 10447 - DNA, 2829 bp, synthetic construct
  source 1..2829: mol_type = other DNA; note = Synthetic coding sequence
atgaccggcagcaacagccacatcaccatcctgaccctgaaggtgctgccccacttcgagagcctgggcaagcaggagaagatccccaacaagatgagcgccttcagaaaccactgcccccacctggacagcgtgggcgagatcaccaaggaggacctgatccagaagagcctgggcacctgccaggactgcaaggtgcagggccccaacctgtgggcctgcctggagaacagatgcagctacgtgggctgcggcgagagccaggtggaccacagcaccatccacagccaggagaccaagcactacctgaccgtgaacctgaccaccctgagagtgtggtgctacgcctgcagcaaggaggtgttcctggacagaaagctgggcacccagcccagcctgccccacgtgagacagccccaccagatccaggagaacagcgtgcaggacttcaagatccccagcaacaccaccctgaagacccccctggtggccgtgttcgacgacctggacatcgaggccgacgaggaggacgagctgagagccagaggcctgaccggcctgaagaacatcggcaacacctgctacatgaacgccgccctgcaggccctgagcaactgcccccccctgacccagttcttcctggactgcggcggcctggccagaaccgacaagaagcccgccatctgcaagagctacctgaagctgatgaccgagctgtggcacaagagcagacccggcagcgtggtgcccaccaccctgttccagggcatcaagaccgtgaaccccaccttcagaggctacagccagcaggacgcccaggagttcctgagatgcctgatggacctgctgcacgaggagctgaaggagcaggtgatggaggtggaggaggacccccagaccatcaccaccgaggagaccatggaggaggacaagagccagagcgacgtggacttccagagctgcgagagctgcagcaacagcgacagagccgagaacgagaacggcagcagatgcttcagcgaggacaacaacgagaccaccatgctgatccaggacgacgagaacaacagcgagatgagcaaggactggcagaaggagaagatgtgcaacaagatcaacaaggtgaacagcgagggcgagttcgacaaggacagagacagcatcagcgagaccgtggacctgaacaaccaggagaccgtgaaggtgcagatccacagcagagccagcgagtacatcaccgacgtgcacagcaacgacctgagcaccccccagatcctgcccagcaacgagggcgtgaaccccagactgagcgccagcccccccaagagcggcaacctgtggcccggcctggcccccccccacaagaaggcccagagcgccagccccaagagaaagaagcagcacaagaagtacagaagcgtgatcagcgacatcttcgacggcaccatcatcagcagcgtgcagtgcctgacctgcgacagagtgagcgtgaccctggagaccttccaggacctgagcctgcccatccccggcaaggaggacctggccaagctgcacagcagcagccaccccaccagcatcgtgaaggccggcagctgcggcgaggcctacgccccccagggctggatcgccttcttcatggagtacgtgaagagattcgtggtgagctgcgtgcccagctggttctggggccccgtggtgaccctgcaggactgcctggccgccttcttcgccagagacgagctgaagggcgacaacatgtacagctgcgagaagtgcaagaagctgagaaacggcgtgaagttctgcaaggtgcagaacttccccgagatcctgtgcatccacctgaagagattcagacacgagctgatgttcagcaccaagatcagcacccacgtgagcttccccctggagggcctggacctgcagcccttcctggccaaggacagccccgcccagatcgtgacctacgacctgctgagcgtgatctgccaccacggcaccgccagcagcggccactacatcgcctactgcagaaacaacctgaacaacctgtggtacgagttcgacgaccagagcgtgaccgaggtgagcgagagcaccgtgcagaacgccgaggcctacgtgctgttctacagaaagagcagcgaggaggcccagaaggagagaagaagaatcagcaacctgctgaacatcatggagcccagcctgctgcagttctacatcagcagacagtggctgaacaagttcaagaccttcgccgagcccggccccatcagcaacaacgacttcctgtgcatccacggcggcgtgccccccagaaaggccggctacatcgaggacctggtgctgatgctgccccagaacatctgggacaacctgtacagcagatacggcggcggccccgccgtgaaccacctgtacatctgccacacctgccagatcgaggccgagaagatcgagaagagaagaaagaccgagctggagatcttcatcagactgaacagagccttccagaaggaggacagccccgccaccttctactgcatcagcatgcagtggttcagagagtgggagagcttcgtgaagggcaaggacggcgacccccccggccccatcgacaacaccaagatcgccgtgaccaagtgcggcaacgtgatgctgagacagggcgccgacagcggccagatcagcgaggagacctggaacttcctgcagagcatctacggcggcggccccgaggtgatcctgagaccccccgtggtgcacgtggaccccgacatcctgcaggccgaggagaagatcgaggtggagaccagaagcctgtag

SEQ ID NO: 10448 - DNA, 2106 bp, synthetic construct
  source 1..2106: mol_type = other DNA; note = Synthetic coding sequence
atgatgaagagacagctgcacagaatgagacagctggcccagaccggcagcctgggcagaacccccgagaccgccgagttcctgggcgaggacctgctgcaggtggagcagagactggagcccgccaagagagccgcccacaacatccacaagagactgcaggcctgcctgcagggccagagcggcgccgacatggacaagagagtgaagaagctgcccctgatggccctgagcaccaccatggccgagagcttcaaggagctggaccccgacagcagcatgggcaaggccctggagatgagctgcgccatccagaaccagctggccagaatcctggccgagttcgagatgaccctggagagagacgtgctgcagcccctgagcagactgagcgaggaggagctgcccgccatcctgaagcacaagaagagcctgcagaagctggtgagcgactggaacaccctgaagagcagactgagccaggccaccaagaacagcggcagcagccagggcctgggcggcagccccggcagccacagccacaccaccatggccaacaaggtggagaccctgaaggaggaggaggaggagctgaagagaaaggtggagcagtgcagagacgagtacctggccgacctgtaccacttcgtgaccaaggaggacagctacgccaactacttcatcagactgctggagatccaggccgactaccacagaagaagcctgagcagcctggacaccgccctggccgagctgagagagaaccacggccaggccgaccacagccccagcatgaccgccacccacttccccagagtgtacggcgtgagcctggccacccacctgcaggagctgggcagagagatcgccctgcccatcgaggcctgcgtgatgatgctgctgagcgagggcatgaaggaggagggcctgttcagactggccgccggcgccagcgtgctgaagagactgaagcagaccatggccagcgacccccacagcctggaggagttctgcagcgacccccacgccgtggccggcgccctgaagagctacctgagagagctgcccgagcccctgatgaccttcgacctgtacgacgactggatgagagccgccagcctgaaggagcccggcgccagactgcaggccctgcaggaggtgtgcagcagactgccccccgagaacctgagcaacctgagatacctgatgaagttcctggccagactggccgaggagcaggaggtgaacaagatgacccccagcaacatcgccatcgtgctgggccccaacctgctgtggccccccgagaaggagggcgaccaggcccagctggacgccgccagcgtgagcagcatccaggtggtgggcgtggtggaggccctgatccagagcgccgacaccctgttccccggcgacatcaacttcaacgtgagcggcctgttcagcgccgtgaccctgcaggacaccgtgagcgacagactggccagcgaggagctgcccagcaccgccgtgcccacccccgccaccacccccgcccccgcccccgcccccgcccccgcccccgcccccgccctggccagcgccgccaccaaggagagaaccgagagcgaggtgccccccagacccgccagccccaaggtgaccagaagcccccccgagaccgccgcccccgtggaggacatggccagaagaaccaagagacccgcccccgccagacccaccatgccccccccccaggtgagcggcagcagaagcagcccccccgccccccccctgccccccggcagcggcagccccggcaccccccaggccctgcccagaagactggtgggcagcagcctgagagcccccaccgtgcccccccccctgccccccacccccccccagcccgccagaagacagagcagaagaagccccgccagccccagccccgccagccccggccccgccagccccagccccgtgagcctgagcaaccccgcccaggtggacctgggcgccgccaccgccgagggcggcgcccccgaggccatcagcggcgtgcccaccccccccgccatccccccccagcccagacccagaagcctggccagcgagaccaactag

SEQ ID NO: 10449 - DNA, 1818 bp, synthetic construct
  source 1..1818: mol_type = other DNA; note = Synthetic coding sequence
atggaggtgagagccagcctgcagaagatcgtgagcaacggcgacgagcagctggagaaggccatggaggagatcctgagagacagcgagaagagacccagcagcctgctggtggactgccagagcagcagcgagatcagcgaccacagcttcggcgacatccccgccagccagaccaacaagcccagcctgcagctgatcctggaccccagcaacaccgagatcagcacccccagacccagcagccccggcggcctgcccgaggaggacagcgtgctgttcaacaagctgacctacctgggctgcatgaaggtgagcagccccagaaacgaggtggaggccctgagagccatggccaccatgaagagcagcagccagtaccccttccccgtgaccctgtacgtgcccaacgtgcccgagggcagcgtgagaatcatcgaccagagcagcaacgtggagatcgccagcttccccatctacaaggtgctgttctgcgccagaggccacgacggcaccaccgagagcaactgcttcgccttcaccgagagcagccacggcagcgaggagttccagatccacgtgttcagctgcgagatcaaggaggccgtgagcagaatcctgtacagcttctgcaccgccttcaagagaagcagcagacaggtgagcgacgtgaaggacagcgtgatccccacccccgacagcgacgtgttcaccttcagcgtgagcctggaggtgaaggaggacgacggcaagggcaacttcagccccgtgcccaaggacagagacaagttctacttcaagctgaagcagggcatcgagaagaaggtggtgatcaccgtgcagcagctgagcaacaaggagctggccatcgagagatgcttcggcatgctgctgagccccggcagaaacgtgaagaacagcgacatgcacctgctggacatggagagcatgggcaagagctacgacggcagagcctacgtgatcaccggcatgtggaaccccaacgcccccgtgttcctggccctgaacgaggagacccccaaggacaagcaggtgtacatgaccgtggccgtggacatggtggtgaccgaggtggtggagcccgtgagattcctgctggagaccgtggtgagagtgtaccccgccaacgagagattctggtacttcagcagaaagaccttcaccgagaccttcttcatgagactgaagcagagcgagggcaagggccacaccaacgccggcgacgccatctacgaggtggtgagcctgcagagagagagcgacaaggaggagcccgtgacccccaccagcggcggcggccccatgagcccccaggacgacgaggccgaggaggagagcgacaacgagctgagcagcggcaccggcgacgtgagcaaggactgccccgagaagatcctgtacagctggggcgagctgctgggcaagtggcacagcaacctgggcgccagacccaagggcctgagcaccctggtgaagagcggcgtgcccgaggccctgagagccgaggtgtggcagctgctggccggctgccacgacaaccaggccatgctggacagatacagaatcctgatcaccaagcagcagatgaagttcagcctgacccccagacagaccatccacctggtgaagtacgagggcagcatgaaggtgagcatgaccccctgcaaccagctgcagttcgacatcagactggacgtgctgatcacctacaccttctgcttcagcagcttccccgagcccgagctgtacaagtacgtgctgaagcaccagctgatcaagagactgaacgcctgctag

SEQ ID NO: 10450 - DNA, 3120 bp, synthetic construct
  source 1..3120: mol_type = other DNA; note = Synthetic coding sequence
atggccgtgcagctggtgcccgacagcgccctgggcctgctgatgatgaccgagggcagaagatgccaggtgcacctgctggacgacagaaagctggagctgctggtgcagcccaagctgctggccaaggagctgctggacctggtggccagccacttcaacctgaaggagaaggagtacttcggcatcgccttcaccgacgagaccggccacctgaactggctgcagctggacagaagagtgctggagcacgacttccccaagaagagcggccccgtggtgctgtacttctgcgtgagattctacatcgagagcatcagctacctgaaggacaacgccaccatcgagctgttcttcctgaacgccaagagctgcatctacaaggagctgatcgacgtggacagcgaggtggtgttcgagctggccagctacatcctgcaggaggccaagggcgacttcagcagcaacgaggtggtgagaagcgacctgaagaagctgcccgccctgcccacccaggccctgaaggagcaccccagcctggcctactgcgaggacagagtgatcgagcactacaagaagctgaacggccagaccagaggccaggccatcgtgaactacatgagcatcgtggagagcctgcccacctacggcgtgcactactacgccgtgaaggacaagcagggcatcccctggtggctgggcctgagctacaagggcatcttccagtacgactaccacgacaaggtgaagcccagaaagatcttccagtggagacagctggagaacctgtacttcagagagaagaagttcagcgtggaggtgcacgaccccagaagagccagcgtgaccagaagaaccttcggccacagcggcatcgccgtgcacacctggtacgcctgccccgccctgatcaagagcatctgggccatggccatcagccagcaccagttctacctggacagaaagcagagcaagagcaagatccacgccgccagaagcctgagcgagatcgccatcgacctgaccgagaccggcaccctgaagaccagcaagctggccaacatgggcagcaagggcaagatcatcagcggcagcagcggcagcctgctgagcagcggcagccaggagagcgacagcagccagagcgccaagaaggacatgctggccgccctgaagagcagacaggaggccctggaggagaccctgagacagagactggaggagctgaagaagctgtgcctgagagaggccgagctgaccggcaagctgcccgtggagtaccccctggaccccggcgaggagccccccatcgtgagaagaagaatcggcaccgccttcaagctggacgagcagaagatcctgcccaagggcgaggaggccgagctggagagactggagagagagttcgccatccagagccagatcaccgaggccgccagaagactggccagcgaccccaacgtgagcaagaagctgaagaagcagagaaagaccagctacctgaacgccctgaagaagctgcaggagatcgagaacgccatcaacgagaacagaatcaagagcggcaagaagcccacccagagagccagcctgatcatcgacgacggcaacatcgccagcgaggacagcagcctgagcgacgccctggtgctggaggacgaggacagccaggtgaccagcaccatcagccccctgcacagcccccacaagggcctgccccccagaccccccagccacaacagacccccccccccccagagcctggagggcctgagacagatgcactaccacagaaacgactacgacaagagccccatcaagcccaagatgtggagcgagagcagcctggacgagccctacgagaaggtgaagaagagaagcagccacagccacagcagcagccacaagagattccccagcaccggcagctgcgccgaggccggcggcggcagcaacagcctgcagaacagccccatcagaggcctgccccactggaacagccagagcagcatgcccagcacccccgacctgagagtgagaagcccccactacgtgcacagcaccagaagcgtggacatcagccccaccagactgcacagcctggccctgcacttcagacacagaagcagcagcctggagagccagggcaagctgctgggcagcgagaacgacaccggcagccccgacttctacacccccagaaccagaagcagcaacggcagcgaccccatggacgactgcagcagctgcaccagccacagcagcagcgagcactactaccccgcccagatgaacgccaactacagcaccctggccgaggacagccccagcaaggccagacagagacagagacagagacagagagccgccggcgccctgggcagcgccagcagcggcagcatgcccaacctggccgccagaggcggcgccggcggcgccggcggcgccggcggcggcgtgtacctgcacagccagagccagcccagcagccagtacagaatcaaggagtaccccctgtacatcgagggcggcgccacccccgtggtggtgagaagcctggagagcgaccaggagggccactacagcgtgaaggcccagttcaagaccagcaacagctacaccgccggcggcctgttcaaggagagctggagaggcggcggcggcgacgagggcgacaccggcagactgacccccagcagaagccagatcctgagaacccccagcctgggcagagagggcgcccacgacaagggcgccggcagagccgccgtgagcgacgagctgagacagtggtaccagagaagcaccgccagccacaaggagcacagcagactgagccacaccagcagcaccagcagcgacagcggcagccagtacagcaccagcagccagagcaccttcgtggcccacagcagagtgaccagaatgccccagatgtgcaaggccaccagcgccgccctgccccagagccagagaagcagcacccccagcagcgagatcggcgccaccccccccagcagcccccaccacatcctgacctggcagaccggcgaggccaccgagaacagccccatcctggacggcagcgagagccccccccaccagagcaccgacgagtag

SEQ ID NO: 10451 - DNA, 3228 bp, synthetic construct
  source 1..3228: mol_type = other DNA; note = Synthetic coding sequence
atggtggtggaggtggacagcatgcccgccgccagcagcgtgaagaagcccttcggcctgagaagcaagatgggcaagtggtgctgcagatgcttcccctgctgcagagagagcggcaagagcaacgtgggcaccagcggcgaccacgacgacagcgccatgaagaccctgagaagcaagatgggcaagtggtgcagacactgcttcccctgctgcagaggcagcggcaagagcaacgtgggcgccagcggcgaccacgacgacagcgccatgaagaccctgagaaacaagatgggcaagtggtgctgccactgcttcccctgctgcagaggcagcagcaagagcaaggtgggcgcctggggcgactacgacgacagcgccttcatggagcccagataccacgtgagaggcgaggacctggacaagctgcacagagccgcctggtggggcaaggtgcccagaaaggacctgatcgtgatgctgagagacaccgacgtgaacaagcaggacaagcagaagagaaccgccctgcacctggccagcgccaacggcaacagcgaggtggtgaagctgctgctggacagaagatgccagctgaacgtgctggacaacaagaagagaaccgccctgatcaaggccgtgcagtgccaggaggacgagtgcgccctgatgctgctggagcacggcaccgaccccaacatccccgacgagtacggcaacaccaccctgcactacgccatctacaacgaggacaagctgatggccaaggccctgctgctgtacggcgccgacatcgagagcaagaacaagcacggcctgacccccctgctgctgggcgtgcacgagcagaagcagcaggtggtgaagttcctgatcaagaagaaggccaacctgaacgccctggacagatacggcagaaccgccctgatcctggccgtgtgctgcggcagcgccagcatcgtgagcctgctgctggagcagaacatcgacgtgagcagccaggacctgagcggccagaccgccagagagtacgccgtgagcagccaccaccacgtgatctgccagctgctgagcgactacaaggagaagcagatgctgaagatcagcagcgagaacagcaaccccgagcaggacctgaagctgaccagcgaggaggagagccagagattcaagggcagcgagaacagccagcccgagaagatgagccaggagcccgagatcaacaaggacggcgacagagaggtggaggaggagatgaagaagcacgagagcaacaacgtgggcctgctggagaacctgaccaacggcgtgaccgccggcaacggcgacaacggcctgatcccccagagaaagagcagaacccccgagaaccagcagttccccgacaacgagagcgaggagtaccacagaatctgcgagctgctgagcgactacaaggagaagcagatgcccaagtacagcagcgagaacagcaaccccgagcaggacctgaagctgaccagcgaggaggagagccagagactgaagggcagcgagaacggccagcccgagaagagaagccaggagcccgagatcaacaaggacggcgacagagagctggagaacttcatggccatcgaggagatgaagaagcacagaagcacccacgtgggcttccccgagaacctgaccaacggcgccaccgccggcaacggcgacgacggcctgatcccccccagaaagagcagaacccccgagagccagcagttccccgacaccgagaacgaggagtaccacagcgacgagcagaacgacacccagaagcagttctgcgaggagcagaacaccggcatcctgcacgacgagatcctgatccacgaggagaagcagatcgaggtggtggagaagatgaacagcgagctgagcctgagctgcaagaaggagaaggacatcctgcacgagaacagcaccctgagagaggagatcgccatgctgagactggagctggacaccatgaagcaccagagccagctgagagagaagaagtacctggaggacatcgagagcgtgaagaagagaaacgacaacctgctgaaggccctgcagctgaacgagctgaccatggacgacgacaccgccgtgctggtgatcgacaacggcagcggcatgtgcaaggccggcttcgccggcgacgacgcccccagagccgtgttccccagcatcgtgggcagacccagacagcagggcatgatgggcggcatgcaccagaaggagagctacgtgggcaaggaggcccagagcaagagaggcatcctgaccctgaagtaccccatggagcacggcatcatcaccaactgggacgacatggagaagatctggcaccacaccttctacaacgagctgagagtggcccccgaggagcaccccgtgctgctgaccgaggccaccctgaaccccaaggccaacagagagaagatgacccagatcatgttcgagaccttcaacacccccgccatgtacgtggccatccaggccgtgctgagcctgtacaccagcggcagaaccaccggcatcgtgatggacagcggcgacggcgtgacccacaccgtgcccatctacgagggcaacgccctgccccacgccaccctgagactggacctggccggcagagagctgcccgactacctgatgaagatcctgaccgagcacggctacagattcaccaccatggccgagagagagatcgtgagagacatcaaggagaagctgtgctacgtggccctggacttcgagcaggagatggccaccgtggccagcagcagcagcctggagaagagctacgagctgcccgacggccaggtgatcaccatcggcaacgagagattcagatgccccgaggccctgttccagccctgcttcctgggcatggagagctgcggcatccacgagaccaccttcaacagcatcatgaagagcgacgtggacatcagaaaggacctgtacaccaacaccgtgctgagcggcggcaccaccatgtaccccggcatggcccacagaatgcagaaggagatcgccgccctggcccccagcatgatgaagatcagaatcatcgccccccccaagagaaagtacagcgtgtgggtgggcggcagcatcctggccagcctgagcaccttccagcagatgtggatcagcaagcaggagtacgacgagagcggccccagcatcgtgcacagaaagtgcctgtag

SEQ ID NO: 10452 - DNA, 1752 bp, synthetic construct
  source 1..1752: mol_type = other DNA; note = Synthetic coding sequence
atgctgagcgagagcaaggagggcgaggagaaggaggaggtgaccatggacaccagcgagaacagacccgagaacgacgtgcccgagccccccatgcccatcgccgaccaggtgagcaacgacgacagacccgagggcagcgtggaggacgaggagaagaaggagagcagcctgcccaagagcttcaagagaaagatcagcgtggtgagcgccaccaagggcgtgcccgccggcaacagcgacaccgagggcggccagcccggcagaaagagaagatggggcgccagcaccgccaccacccagaagaagcccagcatcagcatcaccaccgagagcctgaagagcctgatccccgacatcaagcccctggccggccaggaggccgtggtggacctgcacgccgacgacagcagaatcagcgaggacgagaccgagagaaacggcgacgacggcacccacgacaagggcctgaagatctgcagaaccgtgacccaggtggtgcccgccgagggccaggagaacggccagagagaggaggaggaggaggagaaggagcccgaggccgagccccccgtgcccccccaggtgagcgtggaggtggccctgcccccccccgccgagcacgaggtgaagaaggtgaccctgggcgacaccctgaccagaagaagcatcagccagcagaagagcggcgtgagcatcaccatcgacgaccccgtgagaaccgcccaggtgcccagcccccccagaggcaagatcagcaacatcgtgcacatcagcaacctggtgagacccttcaccctgggccagctgaaggagctgctgggcagaaccggcaccctggtggaggaggccttctggatcgacaagatcaagagccactgcttcgtgacctacagcaccgtggaggaggccgtggccaccagaaccgccctgcacggcgtgaagtggccccagagcaaccccaagttcctgtgcgccgactacgccgagcaggacgagctggactaccacagaggcctgctggtggacagacccagcgagaccaagaccgaggagcagggcatccccagacccctgcacccccccccccccccccccgtgcagcccccccagcaccccagagccgagcagagagagcaggagagagccgtgagagagcagtgggccgagagagagagagagatggagagaagagagagaaccagaagcgagagagagtgggacagagacaaggtgagagagggccccagaagcagaagcagaagcagagacagaagaagaaaggagagagccaagagcaaggagaagaagagcgagaagaaggagaaggcccaggaggagccccccgccaagctgctggacgacctgttcagaaagaccaaggccgccccctgcatctactggctgcccctgaccgacagccagatcgtgcagaaggaggccgagagagccgagagagccaaggagagagagaagagaagaaaggagcaggaggaggaggagcagaaggagagagagaaggaggccgagagagagagaaacagacagctggagagagagaagagaagagagcacagcagagagagagacagagagagagagagagagagagagagagacagaggcgacagagacagagacagagagagagacagagagagaggcagagagagagacagaagagacaccaagagacacagcagaagcagaagcagaagcacccccgtgagagacagaggcggcagaagatag

SEQ ID NO: 10453 - DNA, 963 bp, synthetic construct; identical to SEQ ID NO: 10260
  source 1..963: mol_type = other DNA; note = Synthetic coding sequence

SEQ ID NO: 10454 - DNA, 3294 bp, synthetic construct
  source 1..3294: mol_type = other DNA; note = Synthetic coding sequence
atggccgccgccgccgccgagcagcagcagttctacctgctgctgggcaacctgctgagccccgacaacgtggtgagaaagcaggccgaggagacctacgagaacatccccggccagagcaagatcaccttcctgctgcaggccatcagaaacaccaccgccgccgaggaggccagacagatggccgccgtgctgctgagaagactgctgagcagcgccttcgacgaggtgtaccccgccctgcccagcgacgtgcagaccgccatcaagagcgagctgctgatgatcatccagatggagacccagagcagcatgagaaagaaggtgtgcgacatcgccgccgagctggccagaaacctgatcgacgaggacggcaacaaccagtggcccgagggcctgaagttcctgttcgacagcgtgagcagccagaacgtgggcctgagagaggccgccctgcacatcttctggaacttccccggcatcttcggcaaccagcagcagcactacctggacgtgatcaagagaatgctggtgcagtgcatgcaggaccaggagcaccccagcatcagaaccctgagcgccagagccaccgccgccttcatcctggccaacgagcacaacgtggccctgttcaagcacttcgccgacctgctgcccggcttcctgcaggccgtgaacgacagctgctaccagaacgacgacagcgtgctgaagagcctggtggagatcgccgacaccgtgcccaagtacctgagaccccacctggaggccaccctgcagctgagcctgaagctgtgcggcgacaccagcctgaacaacatgcagagacagctggccctggaggtgatcgtgaccctgagcgagaccgccgccgccatgctgagaaagcacaccaacatcgtggcccagaccatcccccagatgctggccatgatggtggacctggaggaggacgaggactgggccaacgccgacgagctggaggacgacgacttcgacagcaacgccgtggccggcgagagcgccctggacagaatggcctgcggcctgggcggcaagctggtgctgcccatgatcaaggagcacatcatgcagatgctgcagaaccccgactggaagtacagacacgccggcctgatggccctgagcgccatcggcgagggctgccaccagcagatggagggcatcctgaacgagatcgtgaacttcgtgctgctgttcctgcaggacccccaccccagagtgagatacgccgcctgcaacgccgtgggccagatggccaccgacttcgcccccggcttccagaagaagttccacgagaaggtgatcgccgccctgctgcagaccatggaggaccagggcaaccagagagtgcaggcccacgccgccgccgccctgatcaacttcaccgaggactgccccaagagcctgctgatcccctacctggacaacctggtgaagcacctgcacagcatcatggtgctgaagctgcaggagctgatccagaagggcaccaagctggtgctggagcaggtggtgaccagcatcgccagcgtggccgacaccgccgaggagaagttcgtgccctactacgacctgttcatgcccagcctgaagcacatcgtggagaacgccgtgcagaaggagctgagactgctgagaggcaagaccatcgagtgcatcagcctgatcggcctggccgtgggcaaggagaagttcatgcaggacgccagcgacgtgatgcagctgctgctgaagacccagaccgacttcaacgacatggaggacgacgacccccagatcagctacatgatcagcgcctgggccagaatgtgcaagatcctgggcaaggagttccagcagtacctgcccgtggtgatgggccccctgatgaagaccgccagcatcaagcccgaggtggccctgctggacacccaggacatggagaacatgagcgacgacgacggctgggagttcgtgaacctgggcgaccagcagagcttcggcatcaagaccgccggcctggaggagaagagcaccgcctgccagatgctggtgtgctacgccaaggagctgaaggagggcttcgtggagtacaccgagcaggtggtgaagctgatggtgcccctgctgaagttctacttccacgacggcgtgagagtggccgccgccgagagcatgcccctgctgctggagtgcgccagagtgagaggccccgagtacctgacccagatgtggcacttcatgtgcgacgccctgatcaaggccatcggcaccgagcccgacagcgacgtgctgagcgagatcatgcacagcttcgccaagtgcatcgaggtgatgggcgacggctgcctgaacaacgagcacttcgaggagctgggcggcatcctgaaggccaagctggaggagcacttcaagaaccaggagctgagacaggtgaagagacaggacgaggactacgacgagcaggtggaggagagcctgcaggacgaggacgacaacgacgtgtacatcctgaccaaggtgagcgacatcctgcacagcatcttcagcagctacaaggagaaggtgctgccctggttcgagcagctgctgcccctgatcgtgaacctgatctgcccccacagaccctggcccgacagacagtggggcctgtgcatcttcgacgacgtgatcgagcactgcagccccgccagcttcaagtacgccgagtacttcctgagacccatgctgcagtacgtgtgcgacaacagccccgaggtgagacaggccgccgcctacggcctgggcgtgatggcccagtacggcggcgacaactacagacccttctgcaccgaggccctgcccctgctggtgagagtgatccagagcgccgacagcaagaccaaggagaacgtgaacgccaccgagaactgcatcagcgccgtgggcaagatcatgaagttcaagcccgactgcgtgaacgtggaggaggtgctgccccactggctgagctggctgcccctgcacgaggacaaggaggaggccgtgcagaccttcaactacctgtgcgacctgatcgagagcaaccaccccatcgtgctgggccccaacaacaccaacctgcccaagatcttcagcatcatcgccgagggcgagatgcacgaggccatcaagcacgaggacccctgcgccaagagactggccaacgtggtgagacaggtgcagaccagcggcggcctgtggaccgagtgcatcgcccagctgagccccgagcagcaggccgccatccaggagctgctgaacagcgcctag

SEQ ID NO: 10455 - DNA, 2715 bp, synthetic construct
  source 1..2715: mol_type = other DNA; note = Synthetic coding sequence
atgttccccgccctggagacccacctgaagcagaccatccccgacccctacgaggacttcatgtacagacacctgcagtactacggctacttcaaggcccagagaggcagcctgcccaacagcgccacccaccagcacgtgagaaagaacaacccccagtgcctgctgaacggcagcctgggcgagaaggacgacctgatccccgacaccctgcagaaggagaagctgctgtggcccatcagcctgagcagcgccgtgcacagacagatcgaggccatcaacagagacttccacagctgcctgggctggatgcagtggagaggcctgagcagcctgcagccccccccccccagattcaaggacagccccgccagcgccttcagagtggccggcatcaccgacagccacatgctgagcctgccccacctgagaagcagacagctgctgtacgacgagctggacgaggtgaaccccagactgagagagccccaggagctgttcagcatcctgagcaccaagagacccctgcaggcccccagatggcccatcgagtgcgaggtgatcaaggagaacatccaccacatcgagtgggcccccccccagcccgagtacttctaccagcccaagggcaacgagaaggtgcccgagatcgtgggcgagaagaagggcaccgtggtgtaccagctggacagcgtgcccatcgagggcagctacttcaccagcagcagagtgggcggcaagagaggcatcgtgaaggagctggccgtgaccctgcagggccccgaggacaacaccctgctgttcgagagcagattcgagagcggcaacctgcagaaggccgtgagagtggacacctacgagtacgagctgaccctgagaaccgacctgtacaccaacaagcacacccagtggttctacttcagagtgcagaacaccagaaaggacgccacctacagattcaccatcgtgaacctgctgaagcccaagagcctgtacaccgtgggcatgaagcccctgctgtacagccagctggacgccaacaccagaaacatcggctggagaagagagggcaacgagatcaagtactacaagaacaacaccgacgacggccagcagcccttctactgcctgacctggaccatccagttcccctacgaccaggacacctgcttcttcgcccacttctacccctacacctacaccgacctgcagtgctacctgctgagcgtggccaacaaccccatccagagccagttctgcaagctgcagaccctgtgcagaagcctggccggcaacaccgtgtacctgctgaccatcaccaaccccagccagaccccccaggaggccgccgccaagaaggccgtggtgctgagcgccagagtgcaccccggcgagagcaacggcagctgggtgatgaagggcttcctggacttcatcctgagcaacagccccgacgcccagctgctgagagacatcttcgtgttcaaggtgctgcccatgctgaaccccgacggcgtgatcgtgggcaactacagatgcagcctggccggcagagacctgaacagacactacaagaccatcctgaaggagagcttcccctgcatctggtacaccagaaacatgatcaagagactgctggaggagagagaggtgctgctgtactgcgacttccacggccacagcagaaagaacaacatcttcctgtacggctgcaacaacaacaacagaaagtactggctgcacgagagagtgttccccctgatgctgtgcaagaacgcccccgacaagttcagcttccacagctgcaacttcaaggtgcagaagtgcaaggagggcaccggcagagtggtgatgtggagaatgggcatcctgaacagctacaccatggagagcaccttcggcggcagcaccctgggcaacaagagagacacccacttcaccatcgaggacctgaagagcctgggctaccacgtgtgcgacaccctgctggacttctgcgaccccgaccagatgaagttcacccagtgcctggccgagctgaaggagctgctgagacaggagatccacaagaagttccacgagctgggccaggacgtggacctggagggcagctggagcgacatcagcctgagcgacatcgagagcagaaacagcaccagcggcagcgacagcagcctgagcgacggcctgcccgtgcacctggccaacatcgccgacgagctgacccagaagaagaagatgttcaagaagaagaagaagaagagcctgcagaccagaaagcagagaaacgagcagtaccagaagaagaacctgatgcagaagctgaagctgaccgaggacaccagcgagaaggccggcttcgccagcaccctgcagaagcagcccaccttcttcaagaacagcgagaacagcagcttcctgcccatgaagaacgagaaccccagactgaacgagaccaacctgaacagaagagacaaggacacccccctggaccccagcatggccaccctgatcctgcccaagaacaagggcagaatgcagaacaagaagcccggcttcaccgtgagctgcagccccaagagaaccatcaacagcagccaggagcccgcccccggcatgaagcccaactggcccagaagcagataccccgccaccaagagaggctgcgccgccatggccgcctaccccagcctgcacatctacacctacccctag

SEQ ID NO: 10456 - DNA, 789 bp, synthetic construct
  source 1..789: mol_type = other DNA; note = Synthetic coding sequence
atggccctgagcctgggctggaaggcccacagaaaccactgcggcctgctgctgcaggccctgagaagcagcggcctgctgctgttcccctgcggccagtgcccctggagaggcgccggcagcttcctggaccccgagatcaaggccttcctggaggagaacaccgaggtgaccagcagcggcagcctgacccccgagatccagctgagactgctgacccccagatgcaagttctggtgggagagagccgacctgtggccccacagcgacccctactgggccatctactggcccggcggccaggccctgagcagatacctgctggacaaccccgacgtggtgagaggcaagagcgtgctggacctgggcagcggctgcggcgccaccgccatcgccgccaagatgagcggcgccagcagaatcctggccaacgacatcgaccccatcgccggcatggccatcaccctgaactgcgagctgaacagactgaaccccttccccatcctgatccagaacatcctgaacctggagcaggacaagtgggacctggtggtgctgggcgacatgttctacgacgaggacctggccgacagcctgcaccagtggctgaagaagtgcttctggacctacagaaccagagtgctgatcggcgaccccggcagaccccagttcagcggccacagcatccagcaccacctgcacaaggtggtggagtacagcctgctggagagcaccagacaggagaacagcggcctgaccaccagcaccgtgtggggcttccagccctag

SEQ ID NO: 10457 - DNA, 2619 bp, synthetic construct
  source 1..2619: mol_type = other DNA; note = Synthetic coding sequence
atgaactaccccggcagaggcagccccagaagccccgagcacaacggcagaggcggcggcggcggcgcctgggagctgggcagcgacgccagacccgccttcggcggcggcgtgtgctgcttcgagcacctgcccggcggcgaccccgacgacggcgacgtgcccctggccctgctgagaggcgagcccggcctgcacctggcccccggcaccgacgaccacaaccaccacctggccctggacccctgcctgagcgacgagaactacgacttcagcagcgccgagagcggcagcagcctgagatactacagcgagggcgagagcggcggcggcggcagcagcctgagcctgcaccccccccagcagccccccctggtgcccaccaacagcggcggcggcggcgccaccggcggcagccccggcgagagaaagagaaccagactgggcggccccgccgccagacacagatacgaggtggtgaccgagctgggccccgaggaggtgagatggttctacaaggaggacaagaagacctggaagcccttcatcggctacgacagcctgagaatcgagctggccttcagaaccctgctgcagaccaccggcgccagaccccagggcggcgacagagacggcgaccacgtgtgcagccccaccggccccgccagcagcagcggcgaggacgacgacgaggacagagcctgcggcttctgccagagcaccaccggccacgagcccgagatggtggagctggtgaacatcgagcccgtgtgcgtgagaggcggcctgtacgaggtggacgtgacccagggcgagtgctaccccgtgtactggaaccaggccgacaagatccccgtgatgagaggccagtggttcatcgacggcacctggcagcccctggaggaggaggagagcaacctgatcgagcaggagcacctgaactgcttcagaggccagcagatgcaggagaacttcgacatcgaggtgagcaagagcatcgacggcaaggacgccgtgcacagcttcaagctgagcagaaaccacgtggactggcacagcgtggacgaggtgtacctgtacagcgacgccaccaccagcaagatcgccagaaccgtgacccagaagctgggcttcagcaaggccagcagcagcggcaccagactgcacagaggctacgtggaggaggccaccctggaggacaagcccagccagaccacccacatcgtgttcgtggtgcacggcatcggccagaagatggaccagggcagaatcatcaagaacaccgccatgatgagagaggccgccagaaagatcgaggagagacacttcagcaaccacgccacccacgtggagttcctgcccgtggagtggagaagcaagctgaccctggacggcgacaccgtggacagcatcacccccgacaaggtgagaggcctgagagacatgctgaacagcagcgccatggacatcatgtactacaccagccccctgtacagagacgagctggtgaagggcctgcagcaggagctgaacagactgtacagcctgttctgcagcagaaaccccgacttcgaggagaagggcggcaaggtgagcatcgtgagccacagcctgggctgcgtgatcacctacgacatcatgaccggctggaaccccgtgagactgtacgagcagctgctgcagaaggaggaggagctgcccgacgagagatggatgagctacgaggagagacacctgctggacgagctgtacatcaccaagagaagactgaaggagatcgaggagagactgcacggcctgaaggccagcagcatgacccagacccccgccctgaagttcaaggtggagaacttcttctgcatgggcagccccctggccgtgttcctggccctgagaggcatcagacccggcaacaccggcagccaggaccacatcctgcccagagagatctgcaacagactgctgaacatcttccaccccaccgaccccgtggcctacagactggagcccctgatcctgaagcactacagcaacatcagccccgtgcagatccactggtacaacaccagcaaccccctgccctacgagcacatgaagcccagcttcctgaaccccgccaaggagcccaccagcgtgagcgagaacgagggcatcagcaccatccccagccccgtgaccagccccgtgctgagcagaagacactacggcgagagcatcaccaacatcggcaaggccagcatcctgggcgccgccagcatcggcaagggcctgggcggcatgctgttcagcagattcggcagaagcagcaccacccagagcagcgagaccagcaaggacagcatggaggacgagaagaagcccgtggccagccccagcgccaccaccgtgggcacccagaccctgccccacagcagcagcggcttcctggacagcgccctggagctggaccacagaatcgacttcgagctgagagagggcctggtggagagcagatactggagcgccgtgaccagccacaccgcctactggagcagcctggacgtggccctgttcctgctgaccttcatgtacaagcacgagcacgacgacgacgccaagcccaacctggaccccatctag

SEQ ID NO: 10458 - DNA, 1461 bp, synthetic construct
  source 1..1461: mol_type = other DNA; note = Synthetic coding sequence
atggtgagccacaccttccacatgagaaccgaggagagcgacgccagccaggagggcgacgacctgcccaagagcagcgccaacaccagccaccccaagcaggacgacagccccaagagcagcgaggagaccatccagcccaaggagggcgacatccccaaggcccccgaggagaccatccagagcaagaaggaggacctgcccaagagcagcgagaaggccatccagcccaaggagagcaacatccccaagagcagcgccaagcccatccagcccaagctgggcaacatccccaaggccagcgtgaagcccagccagcccaaggagggcgacatccccaaggcccccgaggagaccatccagagcaagaaggaggacctgcccaagagcagcgaggaggccatccagcccaaggagggcgacatccccaagagcagcgccaagcccatccagcccaagctgggcaacatcgccaagaccagcgtgaagcccagccagcccaaggagagcgacatccccaagagccccgaggagaccatccagcccaaggagggcgacatccccaagagcagcgccaagcccatccagcccaagctgggcaacatccccaaggccagcgtgaagcccagccagcccaaggagggcgacatcagcaagagccccgaggaggccatccagcccaaggagggcgacctgcccaagagcctggaggaggccatccagcccaaggagggcgacatccccaagagccccgaggaggccatccagcccaaggagggcgacatccccaagagcctggaggaggccatccagcccaaggagggcgacatccccaagagccccgaggagaccatccagcccaagaagggcgacatccccaagagccccgaggaggccatccagcccaaggagggcgacatccccaagagccccaagcaggccatccagcccaaggagggcgacatccccaagagcctggaggaggccatcccccccaaggagatcgacatccccaagagccccgaggagaccatccagcccaaggaggacgacagccccaagagcctggaggaggccacccccagcaaggagggcgacatcctgaagcccgaggaggagaccatggagttccccgagggcgacaaggtgaaggtgatcctgagcaaggaggacttcgaggccagcctgaaggaggccggcgagagactggtggccgtggacttcagcgccacctggtgcggcccctgcagaaccatcagacccttcttccacgccctgagcgtgaagcacgaggacgtggtgttcctggaggtggacgccgacaactgcgaggaggtggtgagagagtgcgccatcatgtgcgtgcccaccttccagttctacaagaaggaggagaaggtggacgagctgtgcggcgccctgaaggagaagctggaggccgtgatcgccgagctgaagtag

SEQ ID NO: 10459 - DNA, 1005 bp, synthetic construct
  source 1..1005: mol_type = other DNA; note = Synthetic coding sequence
atggccgccagcggcagcggcatggcccagaagacctgggagctggccaacaacatgcaggaggcccagagcatcgacgagatctacaagtacgacaagaagcagcagcaggagatcctggccgccaagccctggaccaaggaccaccactacttcaagtactgcaagatcagcgccctggccctgctgaagatggtgatgcacgccagaagcggcggcaacctggaggtgatgggcctgatgctgggcaaggtggacggcgagaccatgatcatcatggacagcttcgccctgcccgtggagggcaccgagaccagagtgaacgcccaggccgccgcctacgagtacatggccgcctacatcgagaacgccaagcaggtgggcagactggagaacgccatcggctggtaccacagccaccccggctacggctgctggctgagcggcatcgacgtgagcacccagatgctgaaccagcagttccaggagcccttcgtggccgtggtgatcgaccccaccagaaccatcagcgccggcaaggtgaacctgggcgccttcagaacctaccccaagggctacaagccccccgacgagggccccagcgagtaccagaccatccccctgaacaagatcgaggacttcggcgtgcactgcaagcagtactacgccctggaggtgagctacttcaagagcagcctggacagaaagctgctggagctgctgtggaacaagtactgggtgaacaccctgagcagcagcagcctgctgaccaacgccgactacaccaccggccaggtgttcgacctgagcgagaagctggagcagagcgaggcccagctgggcagaggcagcttcatgctgggcctggagacccacgacagaaagagcgaggacaagctggccaaggccaccagagacagctgcaagaccaccatcgaggccatccacggcctgatgagccaggtgatcaaggacaagctgttcaaccagatcaacatcagctag

SEQ ID NO: 10460 - DNA, 1350 bp, synthetic construct
  source 1..1350: mol_type = other DNA; note = Synthetic coding sequence
atggtgatggagaagcccagccccctgctggtgggcagagagttcgtgagacagtactacaccctgctgaacaaggcccccgagtacctgcacagattctacggcagaaacagcagctacgtgcacggcggcgtggacgccagcggcaagccccaggaggccgtgtacggccagaacgacatccaccacaaggtgctgagcctgaacttcagcgagtgccacaccaagatcagacacgtggacgcccacgccaccctgagcgacggcgtggtggtgcaggtgatgggcctgctgagcaacagcggccagcccgagagaaagttcatgcagaccttcgtgctggcccccgagggcagcgtgcccaacaagttctacgtgcacaacgacatgttcagatacgaggacgaggtgttcggcgacagcgagcccgagctggacgaggagagcgaggacgaggtggaggaggagcaggaggagagacagcccagccccgagcccgtgcaggagaacgccaacagcggctactacgaggcccaccccgtgaccaacggcatcgaggagcccctggaggagagcagccacgagcccgagcccgagcccgagagcgagaccaagaccgaggagctgaagccccaggtggaggagaagaacctggaggagctggaggagaagagcaccacccccccccccgccgagcccgtgagcctgccccaggagccccccaagcccagagtggaggccaagcccgaggtgcagagccagccccccagagtgagagagcagagacccagagagagacccggcttcccccccagaggccccagacccggcagaggcgacatggagcagaacgacagcgacaacagaagaatcatcagataccccgacagccaccagctgttcgtgggcaacctgccccacgacatcgacgagaacgagctgaaggagttcttcatgagcttcggcaacgtggtggagctgagaatcaacaccaagggcgtgggcggcaagctgcccaacttcggcttcgtggtgttcgacgacagcgagcccgtgcagagaatcctgatcgccaagcccatcatgttcagaggcgaggtgagactgaacgtggaggagaagaagaccagagccgccagagagagagagaccagaggcggcggcgacgacagaagagacatcagaagaaacgacagaggccccggcggccccagaggcatcgtgggcggcggcatgatgagagacagagacggcagaggccccccccccagaggcggcatggcccagaagctgggcagcggcagaggcaccggccagatggagggcagattcaccggccagagaagatag

SEQ ID NO: 10461 - DNA, 333 bp, synthetic construct
  source 1..333: mol_type = other DNA; note = Synthetic coding sequence
atggaggagatccccgcccaggaggccgccggcagccccagagtgcagttccagagcctggagacccagagcgagtgcctgagccccgagccccagttcgtgcaggacaccgacatggagcagggcctgaccggcggcatcctgctgagactgcccaccaccagaatccacagcgtgaacagctgccccgccctgagccacacccaggccagcgccttcagcggcgagaccctggccgtgctgaccgccggcatcagcaagagatggcccaagtacagactgcccatcgacatcgccagaccctgcagcgagacccccttccccagactgtag

SEQ ID NO: 10462 - DNA, 822 bp, synthetic construct; identical to SEQ ID NO: 10030
  source 1..822: mol_type = other DNA; note = Synthetic coding sequence

SEQ ID NO: 10463 - DNA, 2916 bp, synthetic construct
  source 1..2916: mol_type = other DNA; note = Synthetic coding sequence
ctgagcagaagagtgccctgcgtgagaagaggctgcagaccccccctgccccccctgcccggcagccagagcagagcctggagcagagacagagaggcccccctggaccccggcagacccgcccagagcggcagaagacccaccagcagaagcgtgagccacgcctgcagctggaacggcggcagcctggaccccctggagggcacccccgccctgctgagaagcgccgagagactgatgagaaaggtgaagaagctgagactggacaaggagaacaccggcagctggagaagcttcagcctgaacagcgagggcgccgagagaatggccaccaccggcacccccaccgccgacagaggcgacgccgccgccaccgacgaccccgccgccagattccaggtgcagaagcacagctgggacggcctgagaagcatcatccacggcagcagaaagtacagcggcctgatcgtgaacaaggccccccacgacttccagttcgtgcagaagaccgacgagagcggcccccacagccacagactgtactacctgggcatgccctacggcagcagagagaacagcctgctgtacagcgagatccccaagaaggtgagaaaggaggccctgctgctgctgagctggaagcagatgctggaccacttccaggccaccccccaccacggcgtgtacagcagagaggaggagctgctgagagagagaaagagactgggcgtgttcggcatcaccagctacgacttccacagcgagagcggcctgttcctgttccaggccagcaacagcctgttccactgcagagacggcggcaagaacggcttcatggtgagccccatgaagcccctggagatcaagacccagtgcagcggccccagaatggaccccaagatctgccccgccgaccccgccttcttcagcttcatcaacaacagcgacctgtgggtggccaacatcgagaccggcgaggagagaagactgaccttctgccaccagggcctgagcaacgtgctggacgaccccaagagcgccggcgtggccaccttcgtgatccaggaggagttcgacagattcaccggctactggtggtgccccaccgccagctgggagggcagcgagggcctgaagaccctgagaatcctgtacgaggaggtggacgagagcgaggtggaggtgatccacgtgcccagccccgccctggaggagagaaagaccgacagctacagataccccagaaccggcagcaagaaccccaagatcgccctgaagctggccgagttccagaccgacagccagggcaagatcgtgagcacccaggagaaggagctggtgcagcccttcagcagcctgttccccaaggtggagtacatcgccagagccggctggaccagagacggcaagtacgcctgggccatgttcctggacagaccccagcagtggctgcagctggtgctgctgccccccgccctgttcatccccagcaccgagaacgaggagcagagactggccagcgccagagccgtgcccagaaacgtgcagccctacgtggtgtacgaggaggtgaccaacgtgtggatcaacgtgcacgacatcttctaccccttcccccagagcgagggcgaggacgagctgtgcttcctgagagccaacgagtgcaagaccggcttctgccacctgtacaaggtgaccgccgtgctgaagagccagggctacgactggagcgagcccttcagccccggcgaggacgagttcaagtgccccatcaaggaggagatcgccctgaccagcggcgagtgggaggtgctggccagacacggcagcaagatctgggtgaacgaggagaccaagctggtgtacttccagggcaccaaggacacccccctggagcaccacctgtacgtggtgagctacgaggccgccggcgagatcgtgagactgaccacccccggcttcagccacagctgcagcatgagccagaacttcgacatgttcgtgagccactacagcagcgtgagcacccccccctgcgtgcacgtgtacaagctgagcggccccgacgacgaccccctgcacaagcagcccagattctgggccagcatgatggaggccgccagctgcccccccgactacgtgccccccgagatcttccacttccacaccagaagcgacgtgagactgtacggcatgatctacaagccccacgccctgcagcccggcaagaagcaccccaccgtgctgttcgtgtacggcggcccccaggtgcagctggtgaacaacagcttcaagggcatcaagtacctgagactgaacaccctggccagcctgggctacgccgtggtggtgatcgacggcagaggcagctgccagagaggcctgagattcgagggcgccctgaagaaccagatgggccaggtggagatcgaggaccaggtggagggcctgcagttcgtggccgagaagtacggcttcatcgacctgagcagagtggccatccacggctggagctacggcggcttcctgagcctgatgggcctgatccacaagccccaggtgttcaaggtggccatcgccggcgcccccgtgaccgtgtggatggcctacgacaccggctacaccgagagatacatggacgtgcccgagaacaaccagcacggctacgaggccggcagcgtggccctgcacgtggagaagctgcccaacgagcccaacagactgctgatcctgcacggcttcctggacgagaacgtgcacttcttccacaccaacttcctggtgagccagctgatcagagccggcaagccctaccagctgcagatctaccccaacgagagacacagcatcagatgccccgagagcggcgagcactacgaggtgaccctgctgcacttcctgcaggagtacctgtag

SEQ ID NO: 10464 - DNA, 2592 bp, synthetic construct
  source 1..2592: mol_type = other DNA; note = Synthetic coding sequence
atgggcaacagagagatggaggagctgatccccctggtgaacagactgcaggacgccttcagcgccctgggccagagctgcctgctggagctgccccagatcgccgtggtgggcggccagagcgccggcaagagcagcgtgctggagaacttcgtgggcagagacttcctgcccagaggcagcggcatcgtgaccagaagacccctggtgctgcagctggtgaccagcaaggccgagtacgccgagttcctgcactgcaagggcaagaagttcaccgacttcgacgaggtgagactggagatcgaggccgagaccgacagagtgaccggcatgaacaagggcatcagcagcatccccatcaacctgagagtgtacagcccccacgtgctgaacctgaccctgatcgacctgcccggcatcaccaaggtgcccgtgggcgaccagccccccgacatcgagtaccagatcagagagatgatcatgcagttcatcaccagagagaactgcctgatcctggccgtgacccccgccaacaccgacctggccaacagcgacgccctgaagctggccaaggaggtggacccccagggcctgagaaccatcggcgtgatcaccaagctggacctgatggacgagggcaccgacgccagagacgtgctggagaacaagctgctgcccctgagaagaggctacgtgggcgtggtgaacagaagccagaaggacatcgacggcaagaaggacatcaaggccgccatgctggccgagagaaagttcttcctgagccaccccgcctacagacacatcgccgacagaatgggcaccccccacctgcagaaggtgctgaaccagcagctgaccaaccacatcagagacaccctgcccaacttcagaaacaagctgcagggccagctgctgagcatcgagcacgaggtggaggcctacaagaacttcaagcccgaggaccccaccagaaagaccaaggccctgctgcagatggtgcagcagttcgccgtggacttcgagaagagaatcgagggcagcggcgaccaggtggacaccctggagctgagcggcggcgccaagatcaacagaatcttccacgagagattccccttcgagatcgtgaagatggagttcaacgagaaggagctgagaagagagatcagctacgccatcaagaacatccacggcatcagaaccggcctgttcacccccgacatggccttcgaggccatcgtgaagaagcagatcgtgaagctgaagggccccagcctgaagagcgtggacctggtgatccaggagctgatcaacaccgtgaagaagtgcaccaagaagctggccaacttccccagactgtgcgaggagaccgagagaatcgtggccaaccacatcagagagagagagggcaagaccaaggaccaggtgctgctgctgatcgacatccaggtgagctacatcaacaccaaccacgaggacttcatcggcttcgccaacgcccagcagagaagcagccaggtgcacaagaagaccaccgtgggcaaccaggtgatcagaaagggctggctgaccatcagcaacatcggcatcatgaagggcggcagcaagggctactggttcgtgctgaccgccgagagcctgagctggtacaaggacgacgaggagaaggagaagaagtacatgctgcccctggacaacctgaaggtgagagacgtggagaagagcttcatgagcagcaagcacatcttcgccctgttcaacaccgagcagagaaacgtgtacaaggactacagattcctggagctggcctgcgacagccaggaggacgtggacagctggaaggccagcctgctgagagccggcgtgtaccccgacaagagcgtgggcaacaacaaggccgagaacgacgagaacggccaggccgagaacttcagcatggacccccagctggagagacaggtggagaccatcagaaacctggtggacagctacatgagcatcatcaacaagtgcatcagagacctgatccccaagaccatcatgcacctgatgatcaacaacgtgaaggacttcatcaacagcgagctgctggcccagctgtacagcagcgaggaccagaacaccctgatggaggagagcgccgagcaggcccagagaagagacgagatgctgagaatgtaccaggccctgaaggaggccctgggcatcatcggcgacatcagcaccgccaccgtgagcacccccgcccccccccccgtggacgacagctggatccagcacagcagaagaagccccccccccagccccaccacccagagaagacccaccctgagcgcccccctggccagacccaccagcggcagaggccccgcccccgccatccccagccccggcccccacagcggcgccccccccgtgcccttcagacccggccccctgccccccttccccagcagcagcgacagcttcggcgcccccccccaggtgcccagcagacccaccagagccccccccagcgtgcccagcagaagacccccccccagccccaccagacccaccatcatcagacccctggagagcagcctgctggactag

SEQ ID NO: 10465 - DNA, 1263 bp, synthetic construct; identical to SEQ ID NO: 9866
  source 1..1263: mol_type = other DNA; note = Synthetic coding sequence

SEQ ID NO: 10466 - DNA, 2481 bp, synthetic construct
  source 1..2481: mol_type = other DNA; note = Synthetic coding sequence
atggtggcccccgtgctggagaccagccacgtgttctgctgccccaacagagtgagaggcgtgctgaactggagcagcggccccagaggcctgctggccttcggcaccagctgcagcgtggtgctgtacgaccccctgaagagagtggtggtgaccaacctgaacggccacaccgccagagtgaactgcatccagtggatctgcaagcaggacggcagccccagcaccgagctggtgagcggcggcagcgacaaccaggtgatccactgggagatcgaggacaaccagctgctgaaggccgtgcacctgcagggccacgagggccccgtgtacgccgtgcacgccgtgtaccagagaagaaccagcgaccccgccctgtgcaccctgatcgtgagcgccgccgccgacagcgccgtgagactgtggagcaagaagggccccgaggtgatgtgcctgcagaccctgaacttcggcaacggcttcgccctggccctgtgcctgagcttcctgcccaacaccgacgtgcccatcctggcctgcggcaacgacgactgcagaatccacatcttcgcccagcagaacgaccagttccagaaggtgctgagcctgtgcggccacgaggactggatcagaggcgtggagtgggccgccttcggcagagacctgttcctggccagctgcagccaggactgcctgatcagaatctggaagctgtacatcaagagcaccagcctggagacccaggacgacgacaacatcagactgaaggagaacaccttcaccatcgagaacgagagcgtgaagatcgccttcgccgtgaccctggagaccgtgctggccggccacgagaactgggtgaacgccgtgcactggcagcccgtgttctacaaggacggcgtgctgcagcagcccgtgagactgctgagcgccagcatggacaagaccatgatcctgtgggcccccgacgaggagagcggcgtgtggctggagcaggtgagagtgggcgaggtgggcggcaacaccctgggcttctacgactgccagttcaacgaggacggcagcatgatcatcgcccacgccttccacggcgccctgcacctgtggaagcagaacaccgtgaaccccagagagtggacccccgagatcgtgatcagcggccacttcgacggcgtgcaggacctggtgtgggaccccgagggcgagttcatcatcaccgtgggcaccgaccagaccaccagactgttcgccccctggaagagaaaggaccagagccaggtgacctggcacgagatcgccagaccccagatccacggctacgacctgaagtgcctggccatgatcaacagattccagttcgtgagcggcgccgacgagaaggtgctgagagtgttcagcgcccccagaaacttcgtggagaacttctgcgccatcaccggccagagcctgaaccacgtgctgtgcaaccaggacagcgacctgcccgagggcgccaccgtgcccgccctgggcctgagcaacaaggccgtgttccagggcgacatcgccagccagcccagcgacgaggaggagctgctgaccagcaccggcttcgagtaccagcaggtggccttccagcccagcatcctgaccgagccccccaccgaggaccacctgctgcagaacaccctgtggcccgaggtgcagaagctgtacggccacggctacgagatcttctgcgtgacctgcaacagcagcaagaccctgctggccagcgcctgcaaggccgccaagaaggagcacgccgccatcatcctgtggaacaccaccagctggaagcaggtgcagaacctggtgttccacagcctgaccgtgacccagatggccttcagccccaacgagaagttcctgctggccgtgagcagagacagaacctggagcctgtggaagaagcaggacaccatcagccccgagttcgagcccgtgttcagcctgttcgccttcaccaacaagatcaccagcgtgcacagcagaatcatctggagctgcgactggagccccgacagcaagtacttcttcaccggcagcagagacaagaaggtggtggtgtggggcgagtgcgacagcaccgacgactgcatcgagcacaacatcggcccctgcagcagcgtgctggacgtgggcggcgccgtgaccgccgtgagcgtgtgccccgtgctgcaccccagccagagatacgtggtggccgtgggcctggagtgcggcaagatctgcctgtacacctggaagaagaccgaccaggtgcccgagatcaacgactggacccactgcgtggagaccagccagagccagagccacaccctggccatcagaaagctgtgctggaagaactgcagcggcaagaccgagcagaaggaggccgagggcgccgagtggctgcacttcgccagctgcggcgaggaccacaccgtgaagatccacagagtgaacaagtgcgccctgtag

SEQ ID NO: 10467 - DNA, 1152 bp, synthetic construct
  source 1..1152: mol_type = other DNA; note = Synthetic coding sequence
atggacagaacctgcgaggagagacccgccgaggacggcagcgacgaggaggaccccgacagcatggaggcccccaccagaatcagagacacccccgaggacatcgtgctggaggcccccgccagcggcctggccttccaccccgccagagacctgctggccgccggcgacgtggacggcgacgtgttcgtgttcagctacagctgccaggagggcgagaccaaggagctgtggagcagcggccaccacctgaaggcctgcagagccgtggccttcagcgaggacggccagaagctgatcaccgtgagcaaggacaaggccatccacgtgctggacgtggagcagggccagctggagagaagagtgagcaaggcccacggcgcccccatcaacagcctgctgctggtggacgagaacgtgctggccaccggcgacgacaccggcggcatctgcctgtgggaccagagaaaggagggccccctgatggacatgagacagcacgaggagtacatcgccgacatggccctggaccccgccaagaagctgctgctgaccgccagcggcgacggctgcctgggcatcttcaacatcaagagaagaagattcgagctgctgagcgagccccagagcggcgacctgaccagcgtgaccctgatgaagtggggcaagaaggtggcctgcggcagcagcgagggcaccatctacctgttcaactggaacggcttcggcgccaccagcgacagattcgccctgagagccgagagcatcgactgcatggtgcccgtgaccgagagcctgctgtgcaccggcagcaccgacggcgtgatcagagccgtgaacatcctgcccaacagagtggtgggcagcgtgggccagcacaccggcgagcccgtggaggagctggccctgagccactgcggcagattcctggccagcagcggccacgaccagagactgaagttctgggacatggcccagctgagagccgtggtggtggacgactacagaagaagaaagaagaagggcggccccctgagagccctgagcagcaagacctggagcaccgacgacttcttcgccggcctgagagaggagggcgaggacagcatggcccaggaggagaaggaggagaccggcgacgacagcgactag

SEQ ID NO: 10468 - DNA, 999 bp, synthetic construct
  source 1..999: mol_type = other DNA; note = Synthetic coding sequence
atgagcgaggccggcgaggagcagcccatggagaccaccggcgccaccgagaacggccacgaggccgtgcccgagggcgagagccccgccggcgccggcaccggcgccgccgccggcgccggcggcgccaccgccgccccccccagcggcaaccagaacggcgccgagggcgaccagatcaacgccagcaagaacgaggaggacgccggcaagatgttcgtgggcggcctgagctgggacaccagcaagaaggacctgaaggactacttcaccaagttcggcgaggtggtggactgcaccatcaagatggaccccaacaccggcagaagcagaggcttcggcttcatcctgttcaaggacgccgccagcgtggagaaggtgctggaccagaaggagcacagactggacggcagagtgatcgaccccaagaaggccatggccatgaagaaggaccccgtgaagaagatcttcgtgggcggcctgaaccccgaggccaccgaggagaagatcagagagtacttcggcgagttcggcgagatcgaggccatcgagctgcccatggaccccaagctgaacaagagaagaggcttcgtgttcatcaccttcaaggaggaggagcccgtgaagaaggtgctggagaagaagttccacaccgtgagcggcagcaagtgcgagatcaaggtggcccagcccaaggaggtgtaccagcagcagcagtacggcagcggcggcagaggcaacagaaacagaggcaacagaggcagcggcggcggcggcggcggcggcggccagagccagagctggaaccagggctacggcaactactggaaccagggctacggctaccagcagggctacggccccggctacggcggctacgactacagcccctacggctactacggctacggccccggctacgactacagccagggcagcaccaactacggcaagagccagagaagaggcggccaccagaacaactacaagccctactag

SEQ ID NO: 10469 - DNA, 2745 bp, synthetic construct; identical to SEQ ID NO: 9882
  source 1..2745: mol_type = other DNA; note = Synthetic coding sequence

SEQ ID NO: 10470 - DNA, 2772 bp, synthetic construct
  source 1..2772: mol_type = other DNA; note = Synthetic coding sequence
atggccgccagcaccggctacgtgagactgtggggcgccgccagatgctgggtgctgagaagacccatgctggccgccgccggcggcagagtgcccaccgccgccggcgcctggctgctgagaggccagagaacctgcgacgccagccccccctgggccctgtggggcagaggccccgccatcggcggcagcgccggcgccggcgagggccccgtgatcaccgccctgacccccatgaccatccccgacgtgttcccccacctgcccctgatcgccatcaccagaaaccccgtgttccccagattcatcaagatcatcgaggtgaagaacaagaagctggtggagctgctgagaagaaaggtgagactggcccagccctacgtgggcgtgttcctgaagagagacgacagcaacgagagcgacgtggtggagagcctggacgagatctaccacaccggcaccttcgcccagatccacgagatgcaggacctgggcgacaagctgagaatgatcgtgatgggccacagaagagtgcacatcagcagacagctggaggtggagcccgaggagcccgaggccgagaacaagcacaagcccagaagaaagagcaagagaggcaagaaggaggccgaggacgagctgagcgccagacaccccgccgagctggccatggagcccacccccgagctgcccgccgaggtgctgatggtggaggtggagaacgtggtgcacgaggacttccaggtgaccgaggaggtgaaggccctgaccgccgagatcgtgaagaccatcagagacatcatcgccctgaaccccctgtacagagagagcgtgctgcagatgatgcaggccggccagagagtggtggacaaccccatctacctgagcgacatgggcgccgccctgaccggcgccgagagccacgagctgcaggacgtgctggaggagaccaacatccccaagagactgtacaaggccctgagcctgctgaagaaggagttcgagctgagcaagctgcagcagagactgggcagagaggtggaggagaagatcaagcagacccacagaaagtacctgctgcaggagcagctgaagatcatcaagaaggagctgggcctggagaaggacgacaaggacgccatcgaggagaagttcagagagagactgaaggagctggtggtgcccaagcacgtgatggacgtggtggacgaggagctgagcaagctgggcctgctggacaaccacagcagcgagttcaacgtgaccagaaactacctggactggctgaccagcatcccctggggcaagtacagcaacgagaacctggacctggccagagcccaggccgtgctggaggaggaccactacggcatggaggacgtgaagaagagaatcctggagttcatcgccgtgagccagctgagaggcagcacccagggcaagatcctgtgcttctacggcccccccggcgtgggcaagaccagcatcgccagaagcatcgccagagccctgaacagagagtacttcagattcagcgtgggcggcatgaccgacgtggccgagatcaagggccacagaagaacctacgtgggcgccatgcccggcaagatcatccagtgcctgaagaagaccaagaccgagaaccccctgatcctgatcgacgaggtggacaagatcggcagaggctaccagggcgaccccagcagcgccctgctggagctgctggaccccgagcagaacgccaacttcctggaccactacctggacgtgcccgtggacctgagcaaggtgctgttcatctgcaccgccaacgtgaccgacaccatccccgagcccctgagagacagaatggagatgatcaacgtgagcggctacgtggcccaggagaagctggccatcgccgagagatacctggtgccccaggccagagccctgtgcggcctggacgagagcaaggccaagctgagcagcgacgtgctgaccctgctgatcaagcagtactgcagagagagcggcgtgagaaacctgcagaagcaggtggagaaggtgctgagaaagagcgcctacaagatcgtgagcggcgaggccgagagcgtggaggtgacccccgagaacctgcaggacttcgtgggcaagcccgtgttcaccgtggagagaatgtacgacgtgaccccccccggcgtggtgatgggcctggcctggaccgccatgggcggcagcaccctgttcgtggagaccagcctgagaagaccccaggacaaggacgccaagggcgacaaggacggcagcctggaggtgaccggccagctgggcgaggtgatgaaggagagcgccagaatcgcctacaccttcgccagagccttcctgatgcagcacgcccccgccaacgactacctggtgaccagccacatccacctgcacgtgcccgagggcgccacccccaaggacggccccagcgccggctgcaccatcgtgaccgccctgctgagcctggccatgggcagacccgtgagacagaacctggccatgaccggcgaggtgagcctgaccggcaagatcctgcccgtgggcggcatcaaggagaagaccatcgccgccaagagagccggcgtgacctgcatcgtgctgcccgccgagaacaagaaggacttctacgacctggccgccttcatcaccgagggcctggaggtgcacttcgtggagcactacagagagatcttcgacatcgccttccccgacgagcaggccgaggccctggccgtggagagatag

SEQ ID NO: 10471 - DNA, 681 bp, synthetic construct
  source 1..681: mol_type = other DNA; note = Synthetic coding sequence
atgggccccctgcccagaaccgtggagctgttctacgacgtgctgagcccctacagctggctgggcttcgagatcctgtgcagataccagaacatctggaacatcaacctgcagctgagacccagcctgatcaccggcatcatgaaggacagcggcaacaagccccccggcctgctgcccagaaagggcctgtacatggccaacgacctgaagctgctgagacaccacctgcagatccccatccacttccccaaggacttcctgagcgtgatgctggagaagggcagcctgagcgccatgagattcctgaccgccgtgaacctggagcaccccgagatgctggagaaggccagcagagagctgtggatgagagtgtggagcagaaacgaggacatcaccgagccccagagcatcctggccgccgccgagaaggccggcatgagcgccgagcaggcccagggcctgctggagaagatcgccacccccaaggtgaagaaccagctgaaggagaccaccgaggccgcctgcagatacggcgccttcggcctgcccatcaccgtggcccacgtggacggccagacccacatgctgttcggcagcgacagaatggagctgctggcccacctgctgggcgagaagtggatgggccccatcccccccgccgtgaacgccagactgtag

SEQ ID NO: 10472 - DNA, 2055 bp, synthetic construct
  source 1..2055: mol_type = other DNA; note = Synthetic coding sequence
atggaggccaaccacagcgagcagctgagcgccgagagacagagcaccccccccggcgacagcagcagcctgcccagccacaacggcctggagaaggaggacggccaggacagccccacccccgtgcagccccccgagaaggaggccagcgtgcaccccgacatcagcgaggagctgaacagacagctggaggacatcatcaacacctacggcagcgccgccagcaccgccggcaaggagggcagcgccagagccagcgagcagcccgagaacgccgagagccccgacaacgaggacggcgactgcgaggagaccaccgaggaggccggcagagagcccgtggccagcggcgagccccccaccgtgaaggagcccgtgagcaacaaggagcagaagctggagaagaagatcctgaagggcctgggcaaggaggccaacctgctgatgcagaacctgaacaagctgcagacccccgaggagaagttcgacttcctgttcaagaagtacgccgagctgctggacgagcacagaaccgagcagaagaagctgaagctgctgcagaagaagcaggtgcagatccagaaggagaaggaccagctgcagggcgagcacagcagagccatcctggccagaagcaagctggagagcctgtgcagagagctgcagagacacaacaagaccctgaaggaggaggccctgcagagagccagagaggaggaggagaagagaaaggagatcaccagccacttccagagcaccctgaccgacatccagggccagatcgagcagcagagcgagagaaacatgaagctgtgccaggagaacaccgagctggccgagaagctgaagagcatcatcgaccagtacgagctgagagaggagcacctggacaagatcttcaagcacagagagctgcagcagaagctggtggacgccaagctggagcaggcccaggagatgatgaaggaggccgaggagagacacaagagagagaaggagtacctgctgaaccaggccgccgagtggaagctgcaggccaaggtgctgaaggagcaggagaccgtgctgcaggcccagctgaccctgtacagcggcagattcgaggagttccagagcaccctgaccaagagcaacgaggtgttcgccaccttcaagcaggagatggacaagaccaccaagaagatgaagaagctggagaaggacaccgccacctggaaggccagattcgagaactgcaacaaggccctgctggacatgatcgaggagaaggccctgagagccaaggagtacgagtgcttcgtgatgaagatcggcagactggagaacctgtgcagagccctgcaggaggagagaaacgagctgcacaagaagatcagagacgccgagatcagcgagaaggacgaccagagccagcacaacagcgacgaggagcccgagagcaacgtgagcgtggaccaggagatcgacgccgaggaggtgaacagcgtgcagaccgccgtgaagaacctggccaccgccttcatgatcatccaccaccccgagagcaccccccaccagagcaaggagacccagcccgagatcggcagcagccaggagagcgccgacgccgccctgaaggagcccgagcagccccccctgatccccagcagagacagcgagagccccctgccccccctgaccccccaggccgaggccgagggcggcagcgacgccgagccccccagcaaggccagcaacagccccgccggcctgggcgccgagacccagtgcgagggcctgcccgtgggcgcccaggccgaccaggccagctggaagcccgaggccgaggccagcggccaggccccccaggcccccaccgaggccagcctgcagaagatggaggccgacgtgcccgcccccgcctgcgccgccgaggagcacgtggccgccatggtgcccgcctgcgagcccagcagacagccccccagagccgccgccgaggagctgcccgtgggcgccagcgccggcccccagcccagaaacgtggccgacaccaacctggagggcgtggactag

SEQ ID NO: 10473 - DNA, 1461 bp, synthetic construct
  source 1..1461: mol_type = other DNA; note = Synthetic coding sequence
atgaacggcaccctggaccaccccgaccagcccgacctggacgccatcaagatgttcgtgggccaggtgcccagaacctggagcgagaaggacctgagagagctgttcgagcagtacggcgccgtgtacgagatcaacgtgctgagagacagaagccagaaccccccccagagcaagggctgctgcttcgtgaccttctacaccagaaaggccgccctggaggcccagaacgccctgcacaacatgaaggtgctgcccggcatgcaccaccccatccagatgaagcccgccgacagcgagaagaacaacgccgtggaggacagaaagctgttcatcggcatgatcagcaagaagtgcaccgagaacgacatcagagtgatgttcagcagcttcggccagatcgaggagtgcagaatcctgagaggccccgacggcctgagcagaggctgcgccttcgtgaccttcaccaccagagccatggcccagaccgccatcaaggccatgcaccaggcccagaccatggagggctgcagcagccccatggtggtgaagttcgccgacacccagaaggacaaggagcagaagagaatggcccagcagctgcagcagcagatgcagcagatcagcgccgccagcgtgtggggcaacctggccggcctgaacaccctgggcccccagtacctggccctgtacctgcagctgctgcagcagaccgccagcagcggcaacctgaacaccctgagcagcctgcaccccatgggcggcctgaacgccatgcagctgcagaacctggccgccctggccgccgccgccagcgccgcccagaacacccccagcggcaccaacgccctgaccaccagcagcagccccctgagcgtgctgaccagcagcggcagcagccccagcagcagcagcagcaacagcgtgaaccccatcgccagcctgggcgccctgcagaccctggccggcgccaccgccggcctgaacgtgggcagcctggccggcatggccgccctgaacggcggcctgggcagcagcggcctgagcaacggcaccggcagcaccatggaggccctgacccaggcctacagcggcatccagcagtacgccgccgccgccctgcccaccctgtacaaccagaacctgctgacccagcagagcatcggcgccgccggcagccagaaggagggccccgagggcgccaacctgttcatctaccacctgccccaggagttcggcgaccaggacctgctgcagatgttcatgcccttcggcaacgtggtgagcgccaaggtgttcatcgacaagcagaccaacctgagcaagtgcttcggcttcgtgagctacgacaaccccgtgagcgcccaggccgccatccagagcatgaacggcttccagatcggcatgaagagactgaaggtgcagctgaagagaagcaagaacgacagcaagccctactag

SEQ ID NO: 10474 - DNA, 7812 bp, synthetic construct
  source 1..7812: mol_type = other DNA; note = Synthetic coding sequence
atggagaaggccaccgtgcccgtggccgccgccaccgccgccgagggcgagggcagcccccccgccgtggccgccgtggccggcccccccgccgccgccgaggtgggcggcggcgtgggcggcagcagcagagccagaagcgccagcagccccagaggcatggtgagagtgtgcgacctgctgctgaagaagaagcccccccagcagcagcaccacaaggccaagagaaacagaacctgcagaccccccagcagcagcgagagcagcagcgacagcgacaacagcggcggcggcggcggcggcggcggcggcggcggcggcggcggcggcaccagcagcaacaacagcgaggaggaggaggacgacgacgacgaggaggaggaggtgagcgaggtggagagcttcatcctggaccaggacgacctggagaaccccatgctggagaccgccagcaagctgctgctgagcggcaccgccgacggcgccgacctgagaaccgtggaccccgagacccaggccagactggaggccctgctggaggccgccggcatcggcaagctgagcaccgccgacggcaaggccttcgccgaccccgaggtgctgagaagactgaccagcagcgtgagctgcgccctggacgaggccgccgccgccctgaccagaatgagagccgagagcaccgccaacgccggccagagcgacaacagaagcctggccgaggcctgcagcgagggcgacgtgaacgccgtgagaaagctgctgatcgagggcagaagcgtgaacgagcacaccgaggagggcgagagcctgctgtgcctggcctgcagcgccggctactacgagctggcccaggtgctgctggccatgcacgccaacgtggaggacagaggcatcaagggcgacatcacccccctgatggccgccgccaacggcggccacgtgaagatcgtgaagctgctgctggcccacaaggccgacgtgaacgcccagagcagcaccggcaacaccgccctgacctacgcctgcgccggcggctacgtggacgtggtgaaggtgctgctggagagcggcgccagcatcgaggaccacaacgagaacggccacacccccctgatggaggccggcagcgccggccacgtggaggtggccagactgctgctggagaacggcgccggcatcaacacccacagcaacgagttcaaggagagcgccctgaccctggcctgctacaagggccacctggagatggtgagattcctgctggaggccggcgccgaccaggagcacaagaccgacgagatgcacaccgccctgatggaggcctgcatggacggccacgtggaggtggccagactgctgctggacagcggcgcccaggtgaacatgcccgccgacagcttcgagagccccctgaccctggccgcctgcggcggccacgtggagctggccgccctgctgatcgagagaggcgccagcctggaggaggtgaacgacgagggctacacccccctgatggaggccgccagagagggccacgaggagatggtggccctgctgctgggccagggcgccaacatcaacgcccagaccgaggagacccaggagaccgccctgaccctggcctgctgcggcggcttcctggaggtggccgacttcctgatcaaggccggcgccgacatcgagctgggctgcagcacccccctgatggaggccgcccaggagggccacctggagctggtgaagtacctgctggccgccggcgccaacgtgcacgccaccaccgccaccggcgacaccgccctgacctacgcctgcgagaacggccacaccgacgtggccgacgtgctgctgcaggccggcgccgacctggagcacgagagcgagggcggcagaacccccctgatgaaggccgccagagccggccacgtgtgcaccgtgcagttcctgatcagcaagggcgccaacgtgaacagaaccaccgccaacaacgaccacaccgtgctgagcctggcctgcgccggcggccacctggccgtggtggagctgctgctggcccacggcgccgaccccacccacagactgaaggacggcagcaccatgctgatcgaggccgccaagggcggccacaccagcgtggtgtgctacctgctggactaccccaacaacctgctgagcgcccccccccccgacgtgacccagctgaccccccccagccacgacctgaacagagcccccagagtgcccgtgcaggccctgcccatggtggtgcccccccaggagcccgacaagccccccgccaacgtggccaccaccctgcccatcagaaacaaggccgccagcaagcagaagagcagcagccacctgcccgccaacagccaggacgtgcagggctacatcaccaaccagagccccgagagcatcgtggaggaggcccagggcaagctgaccgagctggagcagagaatcaaggaggccatcgagaagaacgcccagctgcagagcctggagctggcccacgccgaccagctgaccaaggagaagatcgaggagctgaacaagaccagagaggagcagatccagaagaagcagaagatcctggaggagctgcagaaggtggagagagagctgcagctgaagacccagcagcagctgaagaagcagtacctggaggtgaaggcccagagaatccagctgcagcagcagcagcagcagagctgccagcacctgggcctgctgacccccgtgggcgtgggcgagcagctgagcgagggcgactacgccagactgcagcaggtggaccccgtgctgctgaaggacgagccccagcagaccgccgcccagatgggcttcgcccccatccagcccctggccatgccccaggccctgcccctggccgccggccccctgccccccggcagcatcgccaacctgaccgagctgcagggcgtgatcgtgggccagcccgtgctgggccaggcccagctggccggcctgggccagggcatcctgaccgagacccagcagggcctgatggtggccagccccgcccagaccctgaacgacaccctggacgacatcatggccgccgtgagcggcagagccagcgccatgagcaacacccccacccacagcatcgccgccagcatcagccagccccagacccccacccccagccccatcatcagccccagcgccatgctgcccatctaccccgccatcgacatcgacgcccagaccgagagcaaccacgacaccgccctgaccctggcctgcgccggcggccacgaggagctggtgcagaccctgctggagagaggcgccagcatcgagcacagagacaagaagggcttcacccccctgatcctggccgccaccgccggccacgtgggcgtggtggagatcctgctggacaacggcgccgacatcgaggcccagagcgagagaaccaaggacacccccctgagcctggcctgcagcggcggcagacaggaggtggtggagctgctgctggccagaggcgccaacaaggagcacagaaacgtgagcgactacacccccctgagcctggccgccagcggcggctacgtgaacatcatcaagatcctgctgaacgccggcgccgagatcaacagcagaaccggcagcaagctgggcatcagccccctgatgctggccgccatgaacggccacaccgccgccgtgaagctgctgctggacatgggcagcgacatcaacgcccagatcgagaccaacagaaacaccgccctgaccctggcctgcttccagggcagaaccgaggtggtgagcctgctgctggacagaaaggccaacgtggagcacagagccaagaccggcctgacccccctgatggaggccgccagcggcggctacgccgaggtgggcagagtgctgctggacaagggcgccgacgtgaacgccccccccgtgcccagcagcagagacaccgccctgaccatcgccgccgacaagggccactacaagttctgcgagctgctgatcggcagaggcgcccacatcgacgtgagaaacaagaagggcaacacccccctgtggctggccgccaacggcggccacctggacgtggtgcagctgctggtgcaggccggcgccgacgtggacgccgccgacaacagaaagatcacccccctgatggccgccttcagaaagggccacgtgaaggtggtgagatacctggtgaaggaggtgaaccagttccccagcgacagcgagtgcatgagatacatcgccaccatcaccgacaaggagatgctgaagaagtgccacctgtgcatggagagcatcgtgcaggccaaggacagacaggccgccgaggccaacaagaacgccagcatcctgctggaggagctggacctggagaagctgagagaggagagcagaagactggccctggccgccaagagagagaagagaaaggagaagagaagaaagaagaaggaggagcagagaagaaagctggaggagatcgaggccaagaacaaggagaacttcgagctgcaggccgcccaggagaaggagaagctgaaggtggaggacgagcccgaggtgctgaccgagccccccagcgccaccaccaccaccaccatcggcatcagcgccacctggaccaccctggccggcagccacggcaagagaaacaacaccatcaccaccaccagcagcaagagaaagaacagaaagaacaagatcacccccgagaacgtgcagatcatcttcgacgaccccctgcccatcagctacagccagcccgagaaggtgaacggcgagagcaagagcagcagcaccagcgagagcggcgacagcgacaacatgagaatcagcagctgcagcgacgagagcagcaacagcaacagcagcagaaagagcgacaaccacagccccgccgtggtgaccaccaccgtgagcagcaagaagcagcccagcgtgctggtgaccttccccaaggaggagagaaagagcgtgagcggcaaggccagcatcaagctgagcgagaccatcagcgagggcaccagcaacagcctgagcacctgcaccaagagcggccccagccccctgagcagccccaacggcaagctgaccgtggccagccccaagagaggccagaagagagaggagggctggaaggaggtggtgagaagaagcaagaaggtgagcgtgcccagcaccgtgatcagcagagtgatcggcagaggcggctgcaacatcaacgccatcagagagttcaccggcgcccacatcgacatcgacaagcagaaggacaagaccggcgacagaatcatcaccatcagaggcggcaccgagagcaccagacaggccacccagctgatcaacgccctgatcaaggaccccgacaaggagatcgacgagctgatccccaagaacagactgaagagcagcagcgccaacagcaagatcggcagcagcgcccccaccaccaccgccgccaacaccagcctgatgggcatcaagatgaccaccgtggccctgagcagcaccagccagaccgccaccgccctgaccgtgcccgccatcagcagcgccagcacccacaagaccatcaagaaccccgtgaacaacgtgagacccggcttccccgtgagcctgcccctggcctacccccccccccagttcgcccacgccctgctggccgcccagaccttccagcagatcagaccccccagactgcccatgacccacttcggcggcaccttcccccccgcccagagcacctggggccccttccccgtgagacccctgagccccgccagagccaccaacagccccaagccccacatggtgcccagacacagcaaccagaacagcagcggcagccaggtgaacagcgccggcagcctgaccagcagccccaccaccaccaccagcagcagcgccagcaccgtgcccggcaccagcaccaacggcagccccagcagccccagcgtgagaagacagctgttcgtgaccgtggtgaagaccagcaacgccaccaccaccaccgtgaccaccaccgccagcaacaacaacaccgcccccaccaacgccacctaccccatgcccaccgccaaggagcactaccccgtgagcagccccagcagccccagcccccccgcccagcccggcggcgtgagcagaaacagccccctggactgcggcagcgccagccccaacaaggtggccagcagcagcgagcaggaggccggcagcccccccgtggtggagaccaccaacaccagaccccccaacagcagcagcagcagcggcagcagcagcgcccacagcaaccagcagcagccccccggcagcgtgagccaggagcccagaccccccctgcagcagagccaggtgcccccccccgaggtgagaatgaccgtgccccccctggccaccagcagcgcccccgtggccgtgcccagcaccgcccccgtgacctaccccatgccccagacccccatgggctgcccccagcccacccccaagatggagacccccgccatcagaccccccccccacggcaccaccgccccccacaagaacagcgccagcgtgcagaacagcagcgtggccgtgctgagcgtgaaccacatcaagagaccccacagcgtgcccagcagcgtgcagctgcccagcaccctgagcacccagagcgcctgccagaacagcgtgcaccccgccaacaagcccatcgcccccaacttcagcgcccccctgcccttcggccccttcagcaccctgttcgagaacagccccaccagcgcccacgccttctggggcggcagcgtggtgagcagccagagcacccccgagagcatgctgagcggcaagagcagctacctgcccaacagcgaccccctgcaccagagcgacaccagcaaggcccccggcttcagaccccccctgcagagacccgcccccagccccagcggcatcgtgaacatggacagcccctacggcagcgtgacccccagcagcacccacctgggcaacttcgccagcaacatcagcggcggccagatgtacggccccggcgcccccctgggcggcgcccccgccgccgccaacttcaacagacagcacttcagccccctgagcctgctgaccccctgcagcagcgccagcaacgacagcagcgcccagagcgtgagcagcggcgtgagagcccccagccccgcccccagcagcgtgcccctgggcagcgagaagcccagcaacgtgagccaggacagaaaggtgcccgtgcccatcggcaccgagagaagcgccagaatcagacagaccggcaccagcgcccccagcgtgatcggcagcaacctgagcaccagcgtgggccacagcggcatctggagcttcgagggcatcggcggcaaccaggacaaggtggactggtgcaaccccggcatgggcaaccccatgatccacagacccatgagcgaccccggcgtgttcagccagcaccaggccatggagagagacagcaccggcatcgtgacccccagcggcaccttccaccagcacgtgcccgccggctacatggacttccccaaggtgggcggcatgcccttcagcgtgtacggcaacgccatgatcccccccgtggcccccatccccgacggcgccggcggccccatcttcaacggcccccacgccgccgaccccagctggaacagcctgatcaagatggtgagcagcagcaccgagaacaacggcccccagaccgtgtggaccggcccctgggccccccacatgaacagcgtgcacatgaaccagctgggctag

SEQ ID NO: 10475 - DNA, 3075 bp, synthetic construct
  source 1..3075: mol_type = other DNA; note = Synthetic coding sequence
atgaccgagggcagaagatgccaggtgcacctgctggacgacagaaagctggagctgctggtgcagcccaagctgctggccaaggagctgctggacctggtggccagccacttcaacctgaaggagaaggagtacttcggcatcgccttcaccgacgagaccggccacctgaactggctgcagctggacagaagagtgctggagcacgacttccccaagaagagcggccccgtggtgctgtacttctgcgtgagattctacatcgagagcatcagctacctgaaggacaacgccaccatcgagctgttcttcctgaacgccaagagctgcatctacaaggagctgatcgacgtggacagcgaggtggtgttcgagctggccagctacatcctgcaggaggccaagggcgacttcagcagcaacgaggtggtgagaagcgacctgaagaagctgcccgccctgcccacccaggccctgaaggagcaccccagcctggcctactgcgaggacagagtgatcgagcactacaagaagctgaacggccagaccagaggccaggccatcgtgaactacatgagcatcgtggagagcctgcccacctacggcgtgcactactacgccgtgaaggacaagcagggcatcccctggtggctgggcctgagctacaagggcatcttccagtacgactaccacgacaaggtgaagcccagaaagatcttccagtggagacagctggagaacctgtacttcagagagaagaagttcagcgtggaggtgcacgaccccagaagagccagcgtgaccagaagaaccttcggccacagcggcatcgccgtgcacacctggtacgcctgccccgccctgatcaagagcatctgggccatggccatcagccagcaccagttctacctggacagaaagcagagcaagagcaagatccacgccgccagaagcctgagcgagatcgccatcgacctgaccgagaccggcaccctgaagaccagcaagctggccaacatgggcagcaagggcaagatcatcagcggcagcagcggcagcctgctgagcagcggcagccaggagagcgacagcagccagagcgccaagaaggacatgctggccgccctgaagagcagacaggaggccctggaggagaccctgagacagagactggaggagctgaagaagctgtgcctgagagaggccgagctgaccggcaagctgcccgtggagtaccccctggaccccggcgaggagccccccatcgtgagaagaagaatcggcaccgccttcaagctggacgagcagaagatcctgcccaagggcgaggaggccgagctggagagactggagagagagttcgccatccagagccagatcaccgaggccgccagaagactggccagcgaccccaacgtgagcaagaagctgaagaagcagagaaagaccagctacctgaacgccctgaagaagctgcaggagatcgagaacgccatcaacgagaacagaatcaagagcggcaagaagcccacccagagagccagcctgatcatcgacgacggcaacatcgccagcgaggacagcagcctgagcgacgccctggtgctggaggacgaggacagccaggtgaccagcaccatcagccccctgcacagcccccacaagggcctgccccccagaccccccagccacaacagacccccccccccccagagcctggagggcctgagacagatgcactaccacagaaacgactacgacaagagccccatcaagcccaagatgtggagcgagagcagcctggacgagccctacgagaaggtgaagaagagaagcagccacagccacagcagcagccacaagagattccccagcaccggcagctgcgccgaggccggcggcggcagcaacagcctgcagaacagccccatcagaggcctgccccactggaacagccagagcagcatgcccagcacccccgacctgagagtgagaagcccccactacgtgcacagcaccagaagcgtggacatcagccccaccagactgcacagcctggccctgcacttcagacacagaagcagcagcctggagagccagggcaagctgctgggcagcgagaacgacaccggcagccccgacttctacacccccagaaccagaagcagcaacggcagcgaccccatggacgactgcagcagctgcaccagccacagcagcagcgagcactactaccccgcccagatgaacgccaactacagcaccctggccgaggacagccccagcaaggccagacagagacagagacagagacagagagccgccggcgccctgggcagcgccagcagcggcagcatgcccaacctggccgccagaggcggcgccggcggcgccggcggcgccggcggcggcgtgtacctgcacagccagagccagcccagcagccagtacagaatcaaggagtaccccctgtacatcgagggcggcgccacccccgtggtggtgagaagcctggagagcgaccaggagggccactacagcgtgaaggcccagttcaagaccagcaacagctacaccgccggcggcctgttcaaggagagctggagaggcggcggcggcgacgagggcgacaccggcagactgacccccagcagaagccagatcctgagaacccccagcctgggcagagagggcgcccacgacaagggcgccggcagagccgccgtgagcgacgagctgagacagtggtaccagagaagcaccgccagccacaaggagcacagcagactgagccacaccagcagcaccagcagcgacagcggcagccagtacagcaccagcagccagagcaccttcgtggcccacagcagagtgaccagaatgccccagatgtgcaaggccaccagcgccgccctgccccagagccagagaagcagcacccccagcagcgagatcggcgccaccccccccagcagcccccaccacatcctgacctggcagaccggcgaggccaccgagaacagccccatcctggacggcagcgagagccccccccaccagagcaccgacgagtag

SEQ ID NO: 10476 - DNA, 864 bp, synthetic construct
  source 1..864: mol_type = other DNA; note = Synthetic coding sequence
atgagccaggcctggtggcacaccagcgtgagccccgccacccaggaggccaaggccggcggcctgctgcagcccagaagacagagactgtggctgaagagatgcagaatcagcagcagcgcctgcgaggacctgagcgccgccctgatcgccaacaagaacctgaccagaatggacctgagcggcaacggcgtgggcttccccggcatgatgctgctgtgcgagggcctgagacacccccagtgcagactgcagatgatccagctgagaaagtgccagctggagagcggcgcctgccaggagatggccagcgtgctgggcaccaacccccacctggtggagctggacctgaccggcaacgccctggaggacctgggcctgagactgctgtgccagggcctgagacaccccgtgtgcagactgagaaccctgtggctgaagatctgcagactgaccgccgccgcctgcgacgagctggccagcaccctgagcgtgaaccagagcctgagagagctggacctgagcctgaacgagctgggcgacctgggcgtgctgctgctgtgcgagggcctgagacaccccacctgcaagctgcagaccctgagactggacagctgcggcctgaccgccaaggcctgcgagaacctgtacttcaccctgggcatcaaccagaccctgaccgacctgtacctgaccaacaacgccctgggcgacaccggcgtgagactgctgtgcaagagactgagccaccccggctgcaagctgagagtgctgtggctgttcggcatggacctgaacaagatgacccacagcagactggccgccctgagagtgaccaagccctacctggacatcggctgctag

SEQ ID NO: 10477 - DNA, 615 bp, synthetic construct
  source 1..615: mol_type = other DNA; note = Synthetic coding sequence
atggccggctacctgagcgagagcgacttcgtgatggtggaggagggcttcagcaccagagacctgctgaaggagctgaccctgggcgccagccaggccaccaccgacgaggtggccgccttcttcgtggccgacctgggcgccatcgtgagaaagcacttctgcttcctgaagtgcctgcccagagtgagacccttctacgccgtgaagtgcaacagcagccccggcgtgctgaaggtgctggcccagctgggcctgggcttcagctgcgccaacaagatcgccagcgtgatcaacagcgccctggacctgtacttccccgagggctgcggcgtggacatcttcgccgagctgggcagatactacgtgaccagcgccttcaccgtggccgtgagcatcatcgccaagaaggaggtgctgctggaccagcccggcagagaggaggagaacggcagcaccagcaagaccatcgtgtaccacctggacgagggcgtgtacggcatcttcaacagcgtgctgttcgacaacatctgccccacccccatcctgcagaagagcaagaaccacagcccctgctacatgagcctggagagcatccacttcatcgccgtgtag

SEQ ID NO: 10478 - DNA, 519 bp, synthetic construct
  source 1..519: mol_type = other DNA; note = Synthetic coding sequence
atgatgaagctgaagagcaaccagaccagaacctacgacggcgacggctacaagaagagagccgcctgcctgtgcttcagaagcgagagcgaggaggaggtgctgctggtgagcagcagcagacaccccgacagatggatcgtgcccggcggcggcatggagcccgaggaggagcccagcgtggccgccgtgagagaggtgtgcgaggaggccggcgtgaagggcaccctgggcagactggtgggcatcttcgagaaccaggagagaaagcacagaacctacgtgtacgtgctgatcgtgaccgaggtgctggaggactgggaggacagcgtgaacatcggcagaaagagagagtggttcaagatcgaggacgccatcaaggtgctgcagtaccacaagcccgtgcaggccagctacttcgagaccctgagacagggctacagcgccaacaacggcacccccgtggtggccaccacctacagcgtgagcgcccagagcagcatgagcggcatcagatag

SEQ ID NO: 10479 - DNA, 4284 bp, synthetic construct; identical to SEQ ID NO: 9740
  source 1..4284: mol_type = other DNA; note = Synthetic coding sequence

SEQ ID NO: 10480 - DNA, 1179 bp, synthetic construct
  source 1..1179: mol_type = other DNA; note = Synthetic coding sequence
atgggcgacagctgccccgccgtgaccttcagaagccagaaggagaacagagccggcctgcaggagaagctgagatacctgcagcagcagctgcaggacgagacccccagaagacaggaggccgagctgcaggagcccgaggagaagcaggagcccgaggagaagcaggagcccgaggagaagcagaagcccgaggccggcctgagctggaacagcctgggccccgccgccaccagccagggctgccccggcccccccggcagccccgacaagcccagcagaccccacggcctggtgcccgccggctggggcatgggccccagagccggcgagggcccctacgtgagcgagcaggagctgcagaagctgttcaccggcatcgaggagctgagaagagaggtgagcagcctgaccgccagatggcaccaggaggagggcgccgtgcaggaggccctgagactgctgggcggcctgggcggcagagtggacggcttcctgggccagtgggagagagcccagagagagcaggcccagaccgccagagacctgcaggagctgagaggcagagccgacgagctgtgcaccatggtggagagaagcgccgtgagcgtggccagcctgagaagcgagctggagggcctgggccccctgaagcccatcctggaggagttcggcagacagttccagaacagcagaagaggccccgacctgagcatgaacctggacagaagccaccagggcaactgcgccagatgcgccagccagggcagccagctgagcaccgagagcctgcagcagctgctggacagagccctgaccagcctggtggacgaggtgaagcagagaggcctgacccccgcctgccccagctgccagagactgcacaagaagatcctggagctggagagacaggccctggccaagcacgtgagagccgaggccctgagcagcaccctgagactggcccaggacgaggccctgagagccaagaacctgctgctgaccgacaagatgaagcccgaggagaagatggccaccctggaccacctgcacctgaagatgtgcagcctgcacgaccacctgagcaacctgcccctggagggcagcaccggcaccatgggcggcggcagcagcgccggcaccccccccaagcagggcggcagcgcccccgagcagtag

SEQ ID NO: 10481 - DNA, 1692 bp, synthetic construct
  source 1..1692: mol_type = other DNA; note = Synthetic coding sequence
atgagcgacgacgccggcgacaccctggccaccggcgacaaggccgaggtgaccgagatgcccaacagcgacagcctgcccgaggacgccgaggtgcactgcgacagcgccgccgtgagccacgagcccacccccgccgaccccagaggcgagggccacgagaacgccgccgtgcagggcgccggcgccgccgccatcggcccccccgtgcagccccaggacgccaacgccctggagccccccctgaacggcgacgtgaccgaggacaccctggccgagtgcatcgacagcgtgagcctggaggccgagcccagaagcgagatccccctgcaggagcagaactacctggccgtggacagcccccccagcggcggcggctgggccggctggggcagctggggcaagagcctgctgagcagcgccagcgccaccgtgggccacggcctgaccgccgtgaaggagaaggccggcgccaccctgagaatccacggcgtgaacagcggcagcagcgagggcgcccagcccaacaccgagaacggcgtgcccgagatcaccgacgccgccaccgaccagggccccgccgagagcccccccaccagccccagcagcgccagcagaggcatgctgagcgccatcaccaacgtggtgcagaacaccggcaagagcgtgctgaccggcggcctggacgccctggagttcatcggcaagaagaccatgaacgtgctggccgagagcgaccccggcttcaagagaaccaagaccctgatggagagaaccgtgagcctgagccagatgctgagagaggccaaggagaaggagaagcagagactggcccagcagctgaccatggagagaaccgcccactacggcatgctgttcgacgagtaccagggcctgagccacctggaggccctggagatcctgagcaacgagagcgagagcaaggtgcagagcttcctggccagcctggacggcgagaagctggagctgctgaagaacgacctgatcagcatcaaggacatcttcgccgccaaggagctggagaacgaggagaaccaggaggagcagggcctggaggagaagggcgaggagttcgccagaatgctgaccgagctgctgttcgagctgcacgtggccgccacccccgacaagctgaacaaggccatgaagagagcccacgactgggtggaggaggaccagaccgtggtgagcgtggacgtggccaaggtgagcgaggaggagaccaagaaggaggagaaggaggagaagagccaggacccccaggaggacaagaaggaggagaagaagaccaagaccatcgaggaggtgtacatgagcagcatcgagagcctggccgaggtgaccgccagatgcatcgagcagctgcacaaggtggccgagctgatcctgcacggccaggaggaggagaagcccgcccaggaccaggccaaggtgctgatcaagctgaccaccgccatgtgcaacgaggtggccagcctgagcaagaagttcaccaacagcctgaccaccgtgggcagcaacaagaaggccgaggtgctgaaccccatgatcagcagcgtgctgctggagggctgcaacagcaccacctacatccaggacgccttccagctgctgctgcccgtgctgcaggtgagccacatccagaccagctgcctgaaggcccagccctag

SEQ ID NO: 10482 - DNA, 1257 bp, synthetic construct
  source 1..1257: mol_type = other DNA; note = Synthetic coding sequence
atgttcagccccgaccaggagaaccaccccagcaaggcccccgtgaagtacggcgagctgatcgtgctgggctacaacggcagcctgcccaacggcgacagaggcagaagaaagagcagattcgccctgttcaagagacccaaggccaacggcgtgaagcccagcaccgtgcacatcgcctgcaccccccaggccgccaaggccatcagcaacaaggaccagcacagcatcagctacaccctgagcagagcccagaccgtggtggtggagtacacccacgacagcaacaccgacatgttccagatcggcagaagcaccgagagccccatcgacttcgtggtgaccgacaccgtgcccggcagccagagcaacagcgacacccagagcgtgcagagcaccatcagcagattcgcctgcagaatcatctgcgagagaaacccccccttcaccgccagaatctacgccgccggcttcgacagcagcaagaacatcttcctgggcgagaaggccgccaagtggaagaccagcgacggccagatggacggcctgaccaccaacggcgtgctggtgatgcaccccagaaacggcttcaccgaggacagcaagcccggcatctggagagagatcagcgtgtgcggcaacgtgttcagcctgagagagaccagaagcgcccagcagagaggcaagatggtggagatcgagaccaaccagctgcaggacggcagcctgatcgacctgtgcggcgccaccctgctgtggagaaccgccgagggcctgagccacacccccaccgtgaagcacctggaggccctgagacaggagatcaacgccgccagaccccagtgccccgtgggcttcaacaccctggccttccccagcatgaagagaaaggacgtggtggacgagaagcagccctgggtgtacctgaactgcggccacgtgcacggctaccacaactggggcaacaaggaggagagagacggcaaggacagagagtgccccatgtgcagaagcgtgggcccctacgtgcccctgtggctgggctgcgaggccggcttctacgtggacgccggcccccccacccacgccttcagcccctgcggccacgtgtgcagcgagaagaccaccgcctactggagccagatccccctgccccacggcacccacaccttccacgccgcctgccccttctgcgcccaccagctggccggcgagcagggctacatcagactgatcttccagggccccctggactag

SEQ ID NO: 10483 - DNA, 3963 bp, synthetic construct
  source 1..3963: mol_type = other DNA; note = Synthetic coding sequence
atgcaggacgacagcatcgaggccagcaccagcatcagccagctgctgagagagagctacctggccgagaccagacacagaggcaacaacgagagaagcagagccgagcccagcagcaacccctgccacttcggcagccccagcggcgccgccgagggcggcggcggccaggacgacctgcccgacctgagcgccttcctgagccaggaggagctggacgagagcgtgaacctggccagactggccatcaactacgaccccctggagaaggccgacgagacccaggccagaaagagactgagccccgaccagatgaagcacagccccaacctgagcttcgagcccaacttctgccaggacaaccccagaagccccaccagcagcaaggagagcccccaggaggccaagagaccccagtactgcagcgagacccagagcaagaaggtgttcctgaacaaggccgccgacttcatcgaggagctgagcagcctgttcaagagccacagcagcaagagaatcagacccagagcctgcaagaaccacaagagcaagctggagagccagaacaaggtgatgcaggagaacagcagcagcttcagcgacctgagcgagagaagagagagaagcagcgtgcccatccccatccccgccgacaccagagacaacgaggtgaaccacgccctggagcagcaggaggccaagagaagagaggccgagcaggccgccagcgaggccgccggcggcgacaccacccccggcagcagccccagcagcctgtactacgaggagcccctgggccagccccccagattcacccagaagctgagaagcagagaggtgcccgagggcaccagagtgcagctggactgcatcgtggtgggcatcccccccccccaggtgagatggtactgcgagggcaaggagctggagaacagccccgacatccacatcgtgcaggccggcaacctgcacagcctgaccatcgccgaggccttcgaggaggacaccggcagatacagctgcttcgccagcaacatctacggcaccgacagcaccagcgccgagatctacatcgagggcgtgagcagcagcgacagcgagggcgaccccaacaaggaggagatgaacagaatccagaagcccaacgaggtgagcagcccccccaccaccagcgccgtgatcccccccgccgtgccccaggcccagcacctggtggcccagcccagagtggccaccatccagcagtgccagagccccaccaactacctgcagggcctggacggcaagcccatcatcgccgcccccgtgttcaccaagatgctgcagaacctgagcgccagcgagggccagctggtggtgttcgagtgcagagtgaagggcgcccccagccccaaggtggagtggtacagagagggcaccctgatcgaggacagccccgacttcagaatcctgcagaagaagcccagaagcatggccgagcccgaggagatctgcaccctggtgatcgccgaggtgttcgccgaggacagcggctgcttcacctgcaccgccagcaacaagtacggcaccgtgagcagcatcgcccagctgcacgtgagaggcaacgaggacctgagcaacaacggcagcctgcacagcgccaacagcaccaccaacctggccgccatcgagccccagcccagccccccccacagcgagccccccagcgtggagcagccccccaagcccaagctggagggcgtgctggtgaaccacaacgagcccagaagcagcagcagaatcggcctgagagtgcacttcaacctgcccgaggacgacaagggcagcgaggccagcagcgaggccggcgtggtgaccaccagacagaccagacccgacagcttccaggagagattcaacggccaggccaccaagacccccgagcccagcagccccgtgaaggagcccccccccgtgctggccaagcccaagctggacagcacccagctgcagcagctgcacaaccaggtgctgctggagcagcaccagctgcagaaccccccccccagcagccccaaggagttccccttcagcatgaccgtgctgaacagcaacgccccccccgccgtgaccaccagcagcaagcaggtgaaggcccccagcagccagaccttcagcctggccagacccaagtacttcttccccagcaccaacaccaccgccgccaccgtggcccccagcagcagccccgtgttcaccctgagcagcaccccccagaccatccagagaaccgtgagcaaggagagcctgctggtgagccaccccagcgtgcagaccaagagccccggcggcctgagcatccagaacgagcccctgccccccggccccaccgagcccacccccccccccttcaccttcagcatccccagcggcaaccagttccagcccagatgcgtgagccccatccccgtgagccccaccagcagaatccagaaccccgtggccttcctgagcagcgtgctgcccagcctgcccgccatcccccccaccaacgccatgggcctgcccagaagcgcccccagcatgcccagccagggcctggccaagaagaacaccaagagcccccagcccgtgaacgacgacaacatcagagagaccaagaacgccgtgatcagagacctgggcaagaagatcaccttcagcgacgtgagacccaaccagcaggagtacaagatcagcagcttcgagcagagactgatgaacgagatcgagttcagactggagagaacccccgtggacgagagcgacgacgagatccagcacgacgagatccccaccggcaagtgcatcgcccccatcttcgacaagagactgaagcacttcagagtgaccgagggcagccccgtgaccttcacctgcaagatcgtgggcatccccgtgcccaaggtgtactggttcaaggacggcaagcagatcagcaagagaaacgagcactgcaagatgagaagagagggcgacggcacctgcagcctgcacatcgagagcaccaccagcgacgacgacggcaactacaccatcatggccgccaacccccagggcagaatcagctgcagcggccacctgatggtgcagagcctgcccatcagaagcagactgaccagcgccggccagagccacagaggcagaagcagagtgcaggagagagacaaggagcccctgcaggagagattcttcagaccccacttcctgcaggcccccggcgacatggtggcccacgagggcagactgtgcagactggactgcaaggtgagcggcctgcccccccccgagctgacctggctgctgaacggccagcccgtgctgcccgacgccagccacaagatgctggtgagagagaccggcgtgcacagcctgctgatcgaccccctgacccagagagacgccggcacctacaagtgcatcgccaccaacaagaccggccagaacagcttcagcctggagctgagcgtggtggccaaggaggtgaagaaggcccccgtgatcctggagaagctgcagaactgcggcgtgcccgagggccaccccgtgagactggagtgcagagtgatcggcatgcccccccccgtgttctactggaagaaggacaacgagaccatcccctgcaccagagagagaatcagcatgcaccaggacaccaccggctacgcctgcctgctgatccagcccgccaagaagagcgacgccggctggtacaccctgagcgccaagaacgaggccggcatcgtgagctgcaccgccagactggacatctacgcccagtggcaccaccagatccccccccccatgagcgtgagacccagcggcagcagatacggcagcctgaccagcaagggcctggacatcttcagcgccttcagcagcatggagagcaccatggtgtacagctgcagcagcagaagcgtggtggagagcgacgagctgtag

SEQ ID NO: 10484 - DNA, 4206 bp, synthetic construct
  source 1..4206: mol_type = other DNA; note = Synthetic coding sequence
atggccagctgcgccagcatcgacatcgaggacgccacccagcacctgagagacatcctgaagctggacagacccgccggcggccccagcgccgagagccccagacccagcagcgcctacaacggcgacctgaacggcctgctggtgcccgaccccctgtgcagcggcgacagcaccagcgccaacaagaccggcctgagaaccatgccccccatcaacctgcaggagaagcaggtgatctgcctgagcggcgacgacagcagcacctgcatcggcatcctggccaaggaggtggagatcgtggccagcagcgacagcagcatcagcagcaaggccagaggcagcaacaaggtgaagatccagcccgtggccaagtacgactgggagcagaagtactactacggcaacctgatcgccgtgagcaacagcttcctggcctacgccatcagagccgccaacaacggcagcgccatggtgagagtgatcagcgtgagcaccagcgagagaaccctgctgaagggcttcaccggcagcgtggccgacctggccttcgcccacctgaacagcccccagctggcctgcctggacgaggccggcaacctgttcgtgtggagactggccctggtgaacggcaagatccaggaggagatcctggtgcacatcagacagcccgagggcacccccctgaaccacttcagaagaatcatctggtgccccttcatccccgaggagagcgaggactgctgcgaggagagcagccccaccgtggccctgctgcacgaggacagagccgaggtgtgggacctggacatgctgagaagcagccacagcacctggcccgtggacgtgagccagatcaagcagggcttcatcgtggtgaagggccacagcacctgcctgagcgagggcgccctgagccccgacggcaccgtgctggccaccgccagccacgacggctacgtgaagttctggcagatctacatcgagggccaggacgagcccagatgcctgcacgagtggaagccccacgacggcagacccctgagctgcctgctgttctgcgacaaccacaagaagcaggaccccgacgtgcccttctggagattcctgatcaccggcgccgaccagaacagagagctgaagatgtggtgcaccgtgagctggacctgcctgcagaccatcagattcagccccgacatcttcagcagcgtgagcgtgccccccagcctgaaggtgtgcctggacctgagcgccgagtacctgatcctgagcgacgtgcagagaaaggtgctgtacgtgatggagctgctgcagaaccaggaggagggccacgcctgcttcagcagcatcagcgagttcctgctgacccaccccgtgctgagcttcggcatccaggtggtgagcagatgcagactgagacacaccgaggtgctgcccgccgaggaggagaacgacagcctgggcgccgacggcacccacggcgccggcgccatggagagcgccgccggcgtgctgatcaagctgttctgcgtgcacaccaaggccctgcaggacgtgcagatcagattccagccccagctgaaccccgacgtggtggcccccctgcccacccacaccgcccacgaggacttcaccttcggcgagagcagacccgagctgggcagcgagggcctgggcagcgccgcccacggcagccagcccgacctgagaagaatcgtggagctgcccgcccccgccgacttcctgagcctgagcagcgagaccaagcccaagctgatgacccccgacgccttcatgacccccagcgccagcctgcagcagatcaccgccagccccagcagcagcagcagcggcagcagcagcagcagcagcagcagcagcagcagcctgaccgccgtgagcgccatgagcagcaccagcgccgtggaccccagcctgaccagaccccccgaggagctgaccctgagccccaagctgcagctggacggcagcctgaccatgagcagcagcggcagcctgcaggccagccccagaggcctgctgcccggcctgctgcccgcccccgccgacaagctgacccccaagggccccggccaggtgcccaccgccaccagcgccctgagcctggagctgcaggaggtggagcccctgggcctgccccaggccagccccagcagaaccagaagccccgacgtgatcagcagcgccagcaccgccctgagccaggacatccccgagatcgccagcgaggccctgagcagaggcttcggcagcagcgcccccgagggcctggagcccgacagcatggccagcgccgccagcgccctgcacctgctgagccccagacccagacccggccccgagctgggcccccagctgggcctggacggcggccccggcgacggcgacagacacaacacccccagcctgctggaggccgccctgacccaggaggccagcacccccgacagccaggtgtggcccaccgcccccgacatcaccagagagacctgcagcaccctggccgagagccccagaaacggcctgcaggagaagcacaagagcctggccttccacagacccccctaccacctgctgcagcagagagacagccaggacgccagcgccgagcagagcgaccacgacgacgaggtggccagcctggccagcgccagcggcggcttcggcaccaaggtgcccgcccccagactgcccgccaaggactggaagaccaagggcagccccagaaccagccccaagctgaagagaaagagcaagaaggacgacggcgacgccgccatgggcagcagactgaccgagcaccaggtggccgagccccccgaggactggcccgccctgatctggcagcagcagagagagctggccgagctgagacacagccaggaggagctgctgcagagactgtgcacccagctggagggcctgcagagcaccgtgaccggccacgtggagagagccctggagaccagacacgagcaggagcagagaagactggagagagccctggccgagggccagcagagaggcggccagctgcaggagcagctgacccagcagctgagccaggccctgagcagcgccgtggccggcagactggagagaagcatcagagacgagatcaagaagaccgtgcccccctgcgtgagcagaagcctggagcccatggccggccagctgagcaacagcgtggccaccaagctgaccgccgtggagggcagcatgaaggagaacatcagcaagctgctgaagagcaagaacctgaccgacgccatcgccagagccgccgccgacaccctgcagggccccatgcaggccgcctacagagaggccttccagagcgtggtgctgcccgccttcgagaagagctgccaggccatgttccagcagatcaacgacagcttcagactgggcacccaggagtacctgcagcagctggagagccacatgaagagcagaaaggccagagagcaggaggccagagagcccgtgctggcccagctgagaggcctggtgagcaccctgcagagcgccaccgagcagatggccgccaccgtggccggcagcgtgagagccgaggtgcagcaccagctgcacgtggccgtgggcagcctgcaggagagcatcctggcccaggtgcagagaatcgtgaagggcgaggtgagcgtggccctgaaggagcagcaggccgccgtgaccagcagcatcatgcaggccatgagaagcgccgccggcacccccgtgcccagcgcccacctggactgccaggcccagcaggcccacatcctgcagctgctgcagcagggccacctgaaccaggccttccagcaggccctgaccgccgccgacctgaacctggtgctgtacgtgtgcgagaccgtggaccccgcccaggtgttcggccagcccccctgccccctgagccagcccgtgctgctgagcctgatccagcagctggccagcgacctgggcaccagaaccgacctgaagctgagctacctggaggaggccgtgatgcacctggaccacagcgaccccatcaccagagaccacatgggcagcgtgatggcccaggtgagacagaagctgttccagttcctgcaggccgagccccacaacagcctgggcaaggccgccagaagactgagcctgatgctgcacggcctggtgacccccagcctgccctag

SEQ ID NO: 10485 - DNA, 576 bp, synthetic construct
  source 1..576: mol_type = other DNA; note = Synthetic coding sequence
atgagcagcggcgccgacggcggcggcggcgccgccgtggccgccagaagcgacaagggcagccccggcgaggacggcttcgtgcccagcgccctgggcaccagagagcactgggacgccgtgtacgagagagagctgcagaccttcagagagtacggcgacaccggcgagatctggttcggcgaggagagcatgaacagactgatcagatggatgcagaagcacaagatccccctggacgccagcgtgctggacatcggcaccggcaacggcgtgttcctggtggagctggccaagttcggcttcagcaacatcaccggcatcgactacagccccagcgccatccagctgagcggcagcatcatcgagaaggagggcctgagcaacatcaagctgaaggtggaggacttcctgaacctgagcacccagctgagcggcttccacatctgcatcgacaagggcaccttcgacgccatcagcctgaaccccgacaacgccatcgagaagagaaagcagtacgtgaagagcctgagcagagtgctgaaggtgaagggcttcttcaacaacgtgatgtag

SEQ ID NO: 10486 - DNA, 2622 bp, synthetic construct
  source 1..2622: mol_type = other DNA; note = Synthetic coding sequence
atgggcaacagagagatggaggagctgatccccctggtgaacagactgcaggacgccttcagcgccctgggccagagctgcctgctggagctgccccagatcgccgtggtgggcggccagagcgccggcaagagcagcgtgctggagaacttcgtgggcagagacttcctgcccagaggcagcggcatcgtgaccagaagacccctggtgctgcagctggtgaccagcaaggccgagtacgccgagttcctgcactgcaagggcaagaagttcaccgacttcgacgaggtgagactggagatcgaggccgagaccgacagagtgaccggcatgaacaagggcatcagcagcatccccatcaacctgagagtgtacagcccccacgtgctgaacctgaccctgatcgacctgcccggcatcaccaaggtgcccgtgggcgaccagccccccgacatcgagtaccagatcagagagatgatcatgcagttcatcaccagagagaactgcctgatcctggccgtgacccccgccaacaccgacctggccaacagcgacgccctgaagctggccaaggaggtggacccccagggcctgagaaccatcggcgtgatcaccaagctggacctgatggacgagggcaccgacgccagagacgtgctggagaacaagctgctgcccctgagaagaggctacgtgggcgtggtgaacagaagccagaaggacatcgacggcaagaaggacatcaaggccgccatgctggccgagagaaagttcttcctgagccaccccgcctacagacacatcgccgacagaatgggcaccccccacctgcagaaggtgctgaaccagcagctgaccaaccacatcagagacaccctgcccaacttcagaaacaagctgcagggccagctgctgagcatcgagcacgaggtggaggcctacaagaacttcaagcccgaggaccccaccagaaagaccaaggccctgctgcagatggtgcagcagttcgccgtggacttcgagaagagaatcgagggcagcggcgaccaggtggacaccctggagctgagcggcggcgccaagatcaacagaatcttccacgagagattccccttcgagatcgtgaagatggagttcaacgagaaggagctgagaagagagatcagctacgccatcaagaacatccacggcatcagaaccggcctgttcacccccgacatggccttcgaggccatcgtgaagaagcagatcgtgaagctgaagggccccagcctgaagagcgtggacctggtgatccaggagctgatcaacaccgtgaagaagtgcaccaagaagctggccaacttccccagactgtgcgaggagaccgagagaatcgtggccaaccacatcagagagagagagggcaagaccaaggaccaggtgctgctgctgatcgacatccaggtgagctacatcaacaccaaccacgaggacttcatcggcttcgccaacgcccagcagagaagcagccaggtgcacaagaagaccaccgtgggcaaccagggcaccaacctgccccccagcagacagatcgtgatcagaaagggctggctgaccatcagcaacatcggcatcatgaagggcggcagcaagggctactggttcgtgctgaccgccgagagcctgagctggtacaaggacgacgaggagaaggagaagaagtacatgctgcccctggacaacctgaaggtgagagacgtggagaagagcttcatgagcagcaagcacatcttcgccctgttcaacaccgagcagagaaacgtgtacaaggactacagattcctggagctggcctgcgacagccaggaggacgtggacagctggaaggccagcctgctgagagccggcgtgtaccccgacaagagcgtgatgaacaagaaggccgagaacgacgagaacggccaggccgagaacttcagcatggacccccagctggagagacaggtggagaccatcagaaacctggtggacagctacatgagcatcatcaacaagtgcatcagagacctgatccccaagaccatcatgcacctgatgatcaacaacgtgaaggacttcatcaacagcgagctgctggcccagctgtacagcagcgaggaccagaacaccctgatggaggagagcgccgagcaggcccagagaagagacgagatgctgagaatgtaccaggccctgaaggaggccctgggcatcatcggcgacatcagcaccgccaccgtgagcacccccgcccccccccccgtggacgacagctggatccagcacagcagaagaagccccccccccagccccaccacccagagaagacccaccctgagcgcccccctggccagacccaccagcggcagaggccccgcccccgccatccccagccccggcccccacagcggcgccccccccgtgcccttcagacccggccccctgccccccttccccagcagcagcgacagcttcggcgcccccccccaggtgcccagcagacccaccagagccccccccagcgtgcccagcagaagacccccccccagccccaccagacccaccatcatcagacccctggagagcagcctgctggactag

SEQ ID NO: 10487 - DNA, 3111 bp, synthetic construct
  source 1..3111: mol_type = other DNA; note = Synthetic coding sequence
atgagaaagcaggaggtgagaaccggcagagaggccggccagggccacggcaccggcagccccgccgagcaggtgaaggccctgatggacctgctggccggcaagggcagccagggcagccaggccccccaggccctggacagaacccccgacgcccccctgggcccctgcagcaacgacagcagaatccagagacacagaaaggccctgctgagcaaggtgggcggcggccccgagctgggcggcccctggcacagactggccagcctgctgctggtggagggcctgaccgacctgcagctgagagagcacgacttcacccaggtggaggccaccagaggcggcggccaccccgccagaaccgtggccctggacagactgttcctgcccctgagcagagtgagcgtgccccccagagtgagcatcaccatcggcgtggccggcatgggcaagaccaccctggtgagacacttcgtgagactgtgggcccacggccaggtgggcaaggacttcagcctggtgctgcccctgaccttcagagacctgaacacccacgagaagctgtgcgccgacagactgatctgcagcgtgttcccccacgtgggcgagcccagcctggccgtggccgtgcccgccagagccctgctgatcctggacggcctggacgagtgcagaacccccctggacttcagcaacaccgtggcctgcaccgaccccaagaaggagatccccgtggaccacctgatcaccaacatcatcagaggcaacctgttccccgaggtgagcatctggatcaccagcagacccagcgccagcggccagatccccggcggcctggtggacagaatgaccgagatcagaggcttcaacgaggaggagatcaaggtgtgcctggagcagatgttccccgaggaccaggccctgctgggctggatgctgagccaggtgcaggccgacagagccctgtacctgatgtgcaccgtgcccgccttctgcagactgaccggcatggccctgggccacctgtggagaagcagaaccggcccccaggacgccgagctgtggccccccagaaccctgtgcgagctgtacagctggtacttcagaatggccctgagcggcgagggccaggagaagggcaaggccagccccagaatcgagcaggtggcccacggcggcagaaagatggtgggcaccctgggcagactggccttccacggcctgctgaagaagaagtacgtgttctacgagcaggacatgaaggccttcggcgtggacctggccctgctgcagggcgccccctgcagctgcttcctgcagagagaggagaccctggccagcagcgtggcctactgcttcacccacctgagcctgcaggagttcgtggccgccgcctactactacggcgccagcagaagagccatcttcgacctgttcaccgagagcggcgtgagctggcccagactgggcttcctgacccacttcagaagcgccgcccagagagccatgcaggccgaggacggcagactggacgtgttcctgagattcctgagcggcctgctgagccccagagtgaacgccctgctggccggcagcctgctggcccagggcgagcaccaggcctacagaacccaggtggccgagctgctgcagggctgcctgagacccgacgccgccgtgtgcgccagagccatcaacgtgctgcactgcctgcacgagctgcagcacaccgagctggccagaagcgtggaggaggccatggagagcggcgccctggccagactgaccggccccgcccacagagccgccctggcctacctgctgcaggtgagcgacgcctgcgcccaggaggccaacctgagcctgagcctgagccagggcgtgctgcagagcctgctgccccagctgctgtactgcagaaagctgagactggacaccaaccagttccaggaccccgtgatggagctgctgggcagcgtgctgagcggcaaggactgcagaatccagaagatcagcctggccgagaaccagatcagcaacaagggcgccaaggccctggccagaagcctgctggtgaacagaagcctgaccagcctggacctgagaggcaacagcatcggcccccagggcgccaaggccctggccgacgccctgaagatcaacagaaccctgaccagcctgagcctgcagggcaacaccgtgagagacgacggcgccagaagcatggccgaggccctggccagcaacagaaccctgagcatgctgcacctgcagaagaacagcatcggccccatgggcgcccagagaatggccgacctgaagcagaacagaagcctgaaggagctgatgttcagcagcaacagcatcggcgacggcggcgccaaggccctggccgaggccctgaaggtgaaccagggcctggagagcctggacctgcagagcaacagcatcagcgacgccggcgtggccgccctgatgggcgccctgtgcaccaaccagaccctgctgagcctgagcctgagagagaacagcatcagccccgagggcgcccaggccatcgcccacgccctgtgcgccaacagcaccctgaagaacctggacctgcagtggaacttcatccaggccggcgccgcccaggccctgggccaggccctgcagctgaacagaagcctgaccagcctggacctgcaggagaacgccatcggcgacgacggcgcctgcgccgtggccagagccctgaaggtgaacaccgccctgaccgccctgtacctgcaggtggccagcatcggcgccagcggcgcccaggtgctgggcgaggccctggccgtgaacagaaccctggagatcctggacctgagaggcaacgccatcggcgtggccggcgccaaggccctggccaacgccctgaaggtgaacagcagcctgagaagactgaacctgcaggagaacagcctgggcatggacggcgccatctgcatcgccaccgccctgagcggcaaccacagactgcagcacatcaacctgcagggcaaccacatcggcgacagcggcgccagaatgatcagcgaggccatcaagaccaacgcccccacctgcaccgtggagatgtag

SEQ ID NO: 10488 - DNA, 2784 bp, synthetic construct
  source 1..2784: mol_type = other DNA; note = Synthetic coding sequence
atgttctggaagttcgacctgaacaccaccagccacgtggacaagctgctggacaaggagcacgtgaccctgcaggagctgatggacgaggacgacatcctgcaggagtgcaaggcccagaaccagaagctgctggacttcctgtgcagacagcagtgcatggaggagctggtgagcctgatcacccaggacccccccctggacatggaggagaaggtgagattcaagtaccccaacaccgcctgcgagctgctgacctgcgacgtgccccagatcagcgacagactgggcggcgacgagagcctgctgagcctgctgtacgacttcctggaccacgagccccccctgaaccccctgctggccagcttcttcagcaagaccatcggcaacctgatcgccagaaagaccgagcaggtgatcaccttcctgaagaagaaggacaagttcatcagcctggtgctgaagcacatcggcaccagcgccctgatggacctgctgctgagactggtgagctgcgtggagcccgccggcctgagacaggacgtgctgcactggctgaacgaggagaaggtgatccagagactggtggagctgatccaccccagccaggacgaggacagacagagcaacgccagccagaccctgtgcgacatcgtgagactgggcagagaccagggcagccagctgcaggaggccctggagcccgaccccctgctgaccgccctggagagccaggactgcgtggagcagctgctgaagaacatgttcgacggcgacagaaccgagagctgcctggtgagcggcacccaggtgctgctgaccctgctggagaccagaagagtgggcaccgagggcctggtggacagcttcagccagggcctggagagaagctacgccgtgagcagcagcgtgctgcacggcatcgagcccagactgaaggacttccaccagctgctgctgaacccccccaagaagaaggccatcctgaccaccatcggcgtgctggaggagcccctgggcaacgccagactgcacggcgccagactgatggccgccctgctgcacaccaacacccccagcatcaaccaggagctgtgcagactgaacaccatggacctgctgctggacctgttcttcaagtacacctggaacaacttcctgcacttccaggtggagctgtgcatcgccgccatcctgagccacgccgccagagaggagagaaccgaggccagcggcagcgagagcagagtggagcccccccacgagaacggcaacagaagcctggagaccccccagcccgccgccagcctgcccgacaacaccatggtgacccacctgttccagaagtgctgcctggtgcagagaatcctggaggcctgggaggccaacgaccacacccaggccgccggcggcatgagaagaggcaacatgggccacctgaccagaatcgccaacgccgtggtgcagaacctggagagaggccccgtgcagacccacatcagcgaggtgatcagaggcctgcccgccgactgcagaggcagatgggagagcttcgtggaggagaccctgaccgagaccaacagaagaaacaccgtggacctggccttcagcgactaccagatccagcagatgaccgccaacttcgtggaccagttcggcttcaacgacgaggagttcgccgaccaggacgacaacatcaacgcccccttcgacagaatcgccgagatcaacttcaacatcgacgccgacgaggacagccccagcgccgccctgttcgaggcctgctgcagcgacagaatccagcccttcgacgacgacgaggacgaggacatctgggaggacagcgacaccagatgcgccgccagagtgatggccagacccagattcggcgccccccacgccagcgagagctgcagcaagaacggccccgagagaggcggccaggacggcaaggccagcctggaggcccacagagacgcccccggcgccggcgccccccccgcccccggcaagaaggaggccccccccgtggagggcgacagcgaggccggcgccatgtggaccgccgtgttcgacgagcccgccaacagcacccccaccgcccccggcgtggtgagagacgtgggcagcagcgtgtgggccgccggcaccagcgcccccgaggagaagggctgggccaagttcaccgacttccagcccttctgctgcagcgagagcggccccagatgcagcagccccgtggacaccgagtgcagccacgccgagggcagcagaagccagggccccgagaaggccttcagccccgccagcccctgcgcctggaacgtgtgcgtgaccagaaaggcccccctgctggccagcgacagcagcagcagcggcggcagccacagcgaggacggcgaccagaaggccgccagcgccatggacgccgtgagcagaggccccggcagagaggccccccccctgcccaccgtggccagaaccgaggaggccgtgggcagagtgggctgcgccgacagcagactgctgagccccgcctgccccgcccccaaggaggtgaccgccgcccccgccgtggccgtgccccccgaggccaccgtggccatcaccaccgccctgagcaaggccggccccgccatccccacccccgccgtgagcagcgccctggccgtggccgtgcccctgggccccatcatggccgtgaccgccgcccccgccatggtggccaccctgggcaccgtgaccaaggacggccagatgcccagacagaaggagctgccctag

SEQ ID NO: 10489 - DNA, 2220 bp, synthetic construct
  source 1..2220: mol_type = other DNA; note = Synthetic coding sequence
atgggcttcagcaacatggaggacgacggccccgaggaggaggagagagtggccgagccccaggccaacttcaacaccccccaggccctgagattcgaggagctgctggccaacctgctgaacgagcagcaccagatcgccaaggagctgttcgagcagctgaagatgaagaagcccagcgccaagcagcagaaggaggtggagaaggtgaagccccagtgcaaggaggtgcaccagaccctgatcctggaccccgcccagagaaagagactgcagcagcagatgcagcagcacgtgcagctgctgacccagatccacctgctggccacctgcaaccccaacctgaaccccgaggccagcagcaccagaatctgcctgaaggagctgggcaccttcgcccagagcagcatcgccctgcaccaccagtacaaccccaagttccagaccctgttccagccctgcaacctgatgggcgccatgcagctgatcgaggacttcagcacccacgtgagcatcgactgcagcccccacaagaccgtgaagaagaccgccaacgagttcccctgcctgcccaagcaggtggcctggatcctggccaccagcaaggtgttcatgtaccccgagctgctgcccgtgtgcagcctgaaggccaagaacccccaggacaagatcctgttcaccaaggccgaggacaacctgctggccctgggcctgaagcacttcgagggcaccgagttcctgaaccccctgatcagcaagtacctgctgacctgcaagaccgccagacagctgaccgtgagaatcaagaacctgaacatgaacagagcccccgacaacatcatcaagttctacaagaagaccaagcagctgcccgtgctgggcaagtgctgcgaggagatccagccccaccagtggaagccccccatcgagagagaggagcacagactgcccttctggctgaaggccagcctgcccagcatccaggaggagctgagacacatggccgacggcgccagagaggtgggcaacatgaccggcaccaccgagatcaacagcgaccagggcctggagaaggacaacagcgagctgggcagcgagaccagataccccctgctgctgcccaagggcgtggtgctgaagctgaagcccgtggccgacagattccccaagaaggcctggagacagaagagaagcagcgtgctgaagcccctgctgatccagcccagccccagcctgcagcccagcttcaaccccggcaagacccccgcccagagcacccacagcgaggccccccccagcaagatggtgctgagaatcccccaccccatccagcccgccaccgtgctgcagaccgtgcccggcgtgccccccctgggcgtgagcggcggcgagagcttcgagagccccgccgccctgcccgccatgccccccgaggccagaaccagcttccccctgagcgagagccagaccctgctgagcagcgcccccgtgcccaaggtgatgatgcccagccccgccagcagcatgttcagaaagccctacgtgagaagaagacccagcaagagaagaggcgccagagccttcagatgcatcaagcccgcccccgtgatccaccccgccagcgtgatcttcaccgtgcccgccaccaccgtgaagatcgtgagcctgggcggcggctgcaacatgatccagcccgtgaacgccgccgtggcccagagcccccagaccatccccatcgccaccctgctggtgaaccccaccagcttcccctgccccctgaaccagcccctggtggccagcagcgtgagccccctgatcgtgagcggcaacagcgtgaacctgcccatccccagcacccccgaggacaaggcccacatgaacgtggacatcgcctgcgccgtggccgacggcgagaacgccttccagggcctggagcccaagctggagccccaggagctgagccccctgagcgccaccgtgttccccaaggtggagcacagccccggccccccccccgtggacaagcagtgccaggagggcctgagcgagaacagcgcctacagatggaccgtggtgaagaccgaggagggcagacaggccctggagcccctgccccagggcatccaggagagcctgaacaacagcagccccggcgacctggaggaggtggtgaagatggagcccgaggacgccaccgaggagatcagcggcttcctgtag

SEQ ID NO: 10490 - DNA, 1911 bp, synthetic construct
  source 1..1911: mol_type = other DNA; note = Synthetic coding sequence
atggagaaggccgtgaacgacggcagccacagcgaggagctgttctgccacctgaagaccatcagcgagaaggaggacctgcccagatgcaccagcgagagccacctgagctgcctgaagcaggacatcctgaacgagaagaccgagctggaggccaccctgaaggaggccgagctggtgacccacagcgtggagctgctgctgcccctgttcaaggacaccatcgagaagatcaacttcgagaacgccaacctgagcgccctgaacctgaagatcagcgagcagaaggagatcctgatcaaggagctggacaccttcaagagcgtgaagctggccctggagcacctgctgagaaagagagactacaagcagaccggcgacaacctgagcagcatgctgctggagaacctgaccgacaacgagagcgagaacaccaacctgaagaagaaggtgttcgagaaggaggcccacatccaggagctgagctgcctgttccagagcgagaaggccaacaccctgaaggccaacagattcagccagagcgtgaaggtggtgcacgagagactgcagatccagatccacaagagagaggccgagaacgacaagctgaaggagtacgtgaagagcctggagaccaagatcgccaagtggaacctgcagagcagaatgaacaagaacgaggccatcgtgatgaaggaggccagcagacagaagaccgtggccctgaagaaggccagcaaggtgtacaagcagagactggaccacttcaccggcgccatcgagaagctgaccagccagatcagagaccaggaggccaagctgagcgagaccatcagcgccagcaacgcctggaagagccactacgagaagatcgtgatcgagaagaccgagctggaggtgcagatcgagaccatgaagaagcagatcatcaacctgctggaggacctgaagaagatggaggaccacggcaagaacagctgcgaggagatcctgagaaaggtgcacagcatcgagtacgagaacgagaccctgaacctggagaacaccaagctgaagctgagattcccctgcagaatcaccgagagcaagaacatgaacatcctgatcgtgctggacatgctgtgctacatcagcagcgagaagaccaccctggccgccctgaaggacgaggtggtgagcgtggagaacgagctgagcgagctgcaggaggtggagaagaagcagaagaccctgatcgagatgtacaagacccaggtgcagaagctgcaggaggccgccgagatcgtgaagagcagatgcgagaacctgctgcacaagaacaaccagatcaccaagaccaagaacaagaacgtggagaagatgagaggccagatggagagccacctgaaggagctggagagagtgtgcgacagcctgaccgccgccgagagaagactgcacgagtgccaggagagcctgcagtgctgcaagggcaagtgcgccgaccaggagcacaccatcagagagctgcagggccaggtggacggcaaccacaacctgctgaccaagctgagcctggaggaggagaactgcctgatccagctgaagtgcgagaacctgcagcagaagctggagcagatggacgccgagaacaaggagctggagaagaagctggccaaccaggaggagtgcctgaagcacagcaacctgaagttcaaggagaagagcgccgagtacaccgccctggccagacagctggaggccgccctggaggagggcagacagaaggtggccgaggagatcgagaagatgagcagcagagagagcgccctgcagatcaagatcctggacctggagaccgagctgagaaagaagaacgaggagcagaaccagctggtgtgcaagatgaacagcgaccccgagaccccctag

SEQ ID NO: 10491 - DNA, 873 bp, synthetic construct
  source 1..873: mol_type = other DNA; note = Synthetic coding sequence
atggccgccgtggagaagagaagacaggccgtgcccccccccgccggcttcaccgacagcggcagacagagcgtgagcagagccgccggcgccgccgagagcgaggaggacttcctgagacaggtgggcgtgaccgagatgctgagagccgccctgctgaaggtgctggaggccagacccgaggagcccatcgccttcctggcccactacttcgagaacatgggcctgagaagccccgtgaacggcggcgccggcgagccccccggccagctgctgctgcagcagcagagactgggcagagccctgtggcacctgagactggcccaccacagccagagagccgccttcaacaacaacgtgagcgtggcctacgagtgcctgagcgccggcggcagaagaaagagacccggcctggacggcagaacctacagcgagctgctgagaagaatctgcagagacggccaggcccccgaggaggtggtggcccccctgctgagaaaggtgcagtgcagagaccacgaggccgtgcccctgagcgtgttcagagccggcaccctgacctgcttcgtgctgctggagttcgtggccagagccggcgccctgttccagctgctggaggacagcgccgccgccgtggccgacagaagagtgggccaggccgtgctggacaccctggagggcgccctgcaggccagcgacgccgccgcccccgccagattcctggaggccggcagcagactgggccccgacagcctggccctggccctggacagagccgtgggcggcagaagacccagcgcccccatgaccagagaggagttcctggagagagccgccgccctgttcatcgccaaggtgaagcccgtgggctag

SEQ ID NO: 10492 - DNA, 1221 bp, synthetic construct
  source 1..1221: mol_type = other DNA; note = Synthetic coding sequence
atggccgacagccagctgttctgcgtggccgaggagagaagcggccactgcgccgtggtggacggcaacttcctgtacgtgtggggcggctacgtgagcatcgaggacaacgaggtgtacctgcccaacgacgagatctggacctacgacatcgacagcggcctgtggagaatgcacctgatggagggcgagctgcccgccagcatgagcggcagctgcggcgcctgcatcaacggcaagctgtacatcttcggcggctacgacgacaagggctacagcaacagactgtacttcgtgaacctgagaaccagagacgagacctacatctgggagaagatcaccgacttcgagggccagccccccacccccagagacaagctgagctgctgggtgtacaaggacagactgatctacttcggcggctacggctgcagaagacacagcgagctgcaggactgcttcgacgtgcacgacgccagctgggaggagcagatcttctggggctggcacaacgacgtgcacatcttcgacaccaagacccagacctggttccagcccgagatcaagggcggcgtgcccccccagcccagagccgcccacacctgcgccgtgctgggcaacaagggctacatcttcggcggcagagtgctgcagaccagaatgaacgacctgcactacctgaacctggacacctggacctggagcggcagaatcaccatcaacggcgagagccccaagcacagaagctggcacaccctgacccccatcgccgacgacaagctgttcctgtgcggcggcctgagcgccgacaacatccccctgagcgacggctggatccacaacgtgaccaccaactgctggaagcagctgacccacctgcccaagaccagacccagactgtggcacaccgcctgcctgggcaaggagaacgagatcatggtgttcggcggcagcaaggacgacctgctggccctggacaccggccactgcaacgacctgctgatcttccagacccagccctacagcctgctgagaagctgcctggactgcatcggcaagaacagcatcatgctggagagccagatcagcctgctgccccccaagctgctgcagcaggtgctgaagaagatcaccttctgggccgccgccaaccacagagaggagcagagagtgcagaaggaggagaccgagaacaagtaccagtggatcagcagcaactag

SEQ ID NO: 10493 - DNA, 1113 bp, synthetic construct
  source 1..1113: mol_type = other DNA; note = Synthetic coding sequence
atggtgcagcccttcaccaccatccccttccccccccccccccagaacggcatccccaccgagtacggcgtgccccacacccaggactacgccggccagaccggcgagcacaacctgaccctgtacggcagcacccaggcccacggcgagcagagcagcaacagccccagcacccagaacggcagcctgaccaccgagggcggcgcccagaccgacggccagcagagccagacccagagcagcgagaacagcgagagcaagagcacccccaagagactgcacgtgagcaacatccccttcagattcagagaccccgacctgagacagatgttcggccagttcggcaagatcctggacgtggagatcatcttcaacgagagaggcagcaagggcttcggcttcgtgaccttcgagaacagcgccgacgccgacagagccagagagaagctgcacggcaccgtggtggagggcagaaagatcgaggtgaacaacgccaccgccagagtgatgaccaacaagaagatggtgaccccctacgccaacggctggaagctgagccccgtggtgggcgccgtgtacggccccgagctgtacgccgccagcagcttccaggccgacgtgagcctgggcaacgacgccgccgtgcccctgagcggcagaggcggcatcaacacctacatccccctgatcatccccggcttcccctaccccaccgccgccaccaccgccgccgccttcagaggcgcccacctgagaggcagaggcagaaccgtgtacggcgccgtgagagccgtgccccccaccgccatccccgcctaccccggcgtggtgtaccaggacggcttctacggcgccgacctgtacatcgagagcgccaactgcttcagaagcaacagagtggacatgcagcccaccgacatgcacagcctgctgctgcagccccagccccccctgctgcagcccctgcagcccctgaccgtgaccgtgatggccggctgcacccagcccacccccaccatgcccctgcccctgcccctggccatggagctggccctgtggagagtgtacaccgaggtggccaccgccgacctgccccccaccgaggtgacctag

SEQ ID NO: 10494 - DNA, 534 bp, synthetic construct
  source 1..534: mol_type = other DNA; note = Synthetic coding sequence
atgagcgaggacagcgagaaggaggactacagcgacagaaccatcagcgacgaggacgagagcgacgaggacatgttcatgaagttcgtgagcgaggacctgcacagatgcgccctgctgaccgccgacagcttcggcgaccccttcttccccagaaccacccagatcctgctggagtaccagctgggcagatgggtgcccagactgagagagcccagagacctgtacggcgtgagcagcagcggccccctgagccccaccagatggccctaccactgcgaggtgatcgacgagaaggtgcagcacatcgacggcgtgagctgctggagcgagagccaccaggccggcgcccagtggtgcgacctgggcagcctgcagccccccccccccagattcaagagattcgcctgcttcagcctgctgagcagcagagactacagaagagtgccccccagaagcgccaacttcgtgttcctggtggagaccggcttccaccacgtgggccaggacggcctgagactgctgaccagctag

SEQ ID NO: 10495 - DNA, 1827 bp, synthetic construct
  source 1..1827: mol_type = other DNA; note = Synthetic coding sequence
atgagcgacaagagcgacctgaaggccgagctggagagaaagaagcagagactggcccagatcagagaggagaagaagagaaaggaggaggagagaaagaagaaggaggccgacatgcagcagaagaaggagcccgtgcaggacgacagcgacctggacagaaagagaagagagaccgaggccctgctgcagagcatcggcatcagccccgagccccccctggtgcccacccccatgagccccagcagcaagagcgtgagcacccccagcgaggccggcagccaggacagcggcgacctgggccccctgaccagaagaagactgcacaagctgggcgtgagcaaggtgacccaggtggacttcctgcccagagaggtggtgagctacagcaaggagacccagacccccctggccacccaccagagcgaggaggacgaggaggacgaggagatggtggagagcaaggtgggccaggacagcgagctggagaaccaggacaagaagcaggaggtgaaggaggccccccccagagagctgaccgaggaggagaagcagcagatcctgcacagcgaggagttcctgatcttcttcgacagaaccatcagagtgatcgagagagccctggccgaggacagcgacatcttcttcgactacagcggcagagagctggaggagaaggacggcgacgtgcaggccggcgccaacctgagcttcaacagacagttctacgacgagcactggagcaagcacagagtggtgacctgcatggactggagcctgcagtaccccgagctgatggtggccagctacaacaacaacgaggacgccccccacgagcccgacggcgtggccctggtgtggaacatgaagttcaagaagaccacccccgagtacgtgttccactgccagagcagcgtgatgagcgtgtgcttcgccagattccaccccaacctggtggtgggcggcacctacagcggccagatcgtgctgtgggacaacagaagccacagaagaacccccgtgcagagaacccccctgagcgccgccgcccacacccaccccgtgtactgcgtgaacgtggtgggcacccagaacgcccacaacctgatcaccgtgagcaccgacggcaagatgtgcagctggagcctggacatgctgagcaccccccaggagagcatggagctggtgtacaacaagagcaagcccgtggccgtgaccggcatggccttccccaccggcgacgtgaacaacttcgtggtgggcagcgaggagggcaccgtgtacaccgcctgcagacacggcagcaaggccggcatcggcgaggtgttcgagggccaccagggccccgtgaccggcatcaactgccacatggccgtgggccccatcgacttcagccacctgttcgtgaccagcagcttcgactggaccgtgaagctgtggaccaccaagcacaacaagcccctgtacagcttcgaggacaacgccgactacgtgtacgacgtgatgtggagccccgtgcaccccgccctgttcgcctgcgtggacggcatgggcagactggacctgtggaacctgaacaacgacaccgaggtgcccaccgccagcgtggccatcgagggcgccagcgccctgaacagagtgagatgggcccaggccggcaaggaggtggccgtgggcgacagcgagggcagaatctgggtgtacgacgtgggcgagctggccgtgccccacaacgacgagtggaccagattcgccagaaccctggtggagatcagagccaacagagccgacagcgaggaggagggcaccgtggagctgagcgcctag

SEQ ID NO: 10496 - DNA, 627 bp, synthetic construct
  source 1..627: mol_type = other DNA; note = Synthetic coding sequence
atggagggcgccgccgcccccgtggccggcgacagacccgacctgggcctgggcgcccccggcagccccagagaggccgtggccggcgccaccgccgccctggagcccagaaagccccacggcgtgaagagacaccaccacaagcacaacctgaagcacagatacgagctgcaggagaccctgggcaagggcacctacggcaaggtgaagagagccaccgagagattcagcggcagagtggtggccatcaagagcatcagaaaggacaagatcaaggacgagcaggacatggtgcacatcagaagagagatcgagatcatgagcagcctgaaccacccccacatcatcagcatctacgaggtgttcgagaacaaggacaagatcgtgatcatcatggagtacgccagcaagggcgagctgtacgactacatcagcgagagaagaagactgagcgagagagagaccagacacttcttcagacagatcgtgagcgccgtgcactactgccacaagaacggcgtggtgcacagagacctgaagctgaagagacccagcagagagaaccaggtgaccaccctgccccagagcgccgtgagcctgagaagctgctggaccgtgatgatgtag

SEQ ID NO: 10497 - DNA, 990 bp, synthetic construct
  source 1..990: mol_type = other DNA; note = Synthetic coding sequence
atggaggtggccgagcccagcagccccaccgaggaggaggaggaggaggaggagcacagcgccgagcccagacccagaaccagaagcaaccccgagggcgccgaggacagagccgtgggcgcccaggccagcgtgggcagcagaagcgagggcgagggcgaggccgccagcgccgacgacggcagcctgaacaccagcggcgccggccccaagagctggcaggtgcccccccccgcccccgaggtgcagatcagaacccccagagtgaactgccccgagaaggtgatcatctgcctggacctgagcgaggagatgagcctgcccaagctggagagcttcaacggcagcaagaccaacgccctgaacgtgagccagaagatgatcgagatgttcgtgagaaccaagcacaagatcgacaagagccacgagttcgccctggtggtggtgaacgacgacaccgcctggctgagcggcctgaccagcgaccccagagagctgtgcagctgcctgtacgacctggagaccgccagctgcagcaccttcaacctggagggcctgttcagcctgatccagcagaagaccgagctgcccgtgaccgagaacgtgcagaccatcccccccccctacgtggtgagaaccatcctggtgtacagcagacccccctgccagccccagttcagcctgaccgagcccatgaagaagatgttccagtgcccctacttcttcttcgacgtggtgtacatccacaacggcaccgaggagaaggaggaggagatgagctggaaggacatgttcgccttcatgggcagcctggacaccaagggcaccagctacaagtacgaggtggccctggccggccccgccctggagctgcacaactgcatggccaagctgctggcccaccccctgcagagaccctgccagagccacgccagctacagcctgctggaggaggaggacgaggccatcgaggtggaggccaccgtgtag

SEQ ID NO: 10498 - DNA, 885 bp, synthetic construct
  source 1..885: mol_type = other DNA; note = Synthetic coding sequence
atgagccagcccgccggcggcagaagaaagcccagaaccctgggcccccccgtgtgcagcatcagacccttcaagagcagcgagcagtacctggaggccatgaaggaggacctggccgagtggctgagagacctgtacggcctggacatcgacgccgccaacttcctgcaggtgctggagaccggcctggtgctgtgccagcacgccaacgtggtgaccgacgccgccctggccttcctggccgaggcccccgcccaggcccagaagatccccatgcccagagtgggcgtgagctgcaacggcgccgcccagcccggcaccttccaggccagagacaacgtgagcaacttcatccagtggtgcagaaaggagatgggcatccaggaggtgctgatgttcgagaccgaggacctggtgctgagaaagaacgtgaagaacgtggtgctgtgcctgctggagctgggcagaagagcctggagattcggcgtggccgcccccaccctggtgcagctggaggaggagatcgaggaggaggtgagaagagagctggccctgccccccctgccccagcccggccccgacggcgccgagccctgcgagcccctgcacgtgcccagcgccgtgctgcacggccagagcgtgtacgtgttcctgggccccgccagacagccccccaaggacagactgctgagagccgtgctgggcagcaagggcggcgaggccagcagagtggacggcgccagcgtgggcgaggaggaggaggagggcaaggaggagaaggagcccgccgcccccctggagagcagcccccagccccccgagggcctgcagccccactggctgaaccaggcccccctgccccccgaggaggagagctgggtgtag

SEQ ID NO: 10499 - DNA, 1554 bp, synthetic construct; identical to SEQ ID NO: 9849
  source 1..1554: mol_type = other DNA; note = Synthetic coding sequence

SEQ ID NO: 10500 - DNA, 951 bp, synthetic construct
  source 1..951: mol_type = other DNA; note = Synthetic coding sequence
atggccaccttcgtggagctgagcaccaaggccaagatgcccatcgtgggcctgggcacctggaagagccccctgggcaaggtgaaggaggccgtgaaggtggccatcgacgccggctacagacacatcgactgcgcctacgtgtaccagaacgagcacgaggtgggcgaggccatccaggagaagatccaggagaaggccgtgaagagagaggacctgttcatcgtgagcaagctgtggcccaccttcttcgagagacccctggtgagaaaggccttcgagaagaccctgaaggacctgaagctgagctacctggacgtgtacctgatccactggccccagggcttcaagagcggcgacgacctgttccccaaggacgacaagggcaacgccatcggcggcaaggccaccttcctggacgcctgggaggccatggaggagctggtggacgagggcctggtgaaggccctgggcgtgagcaacttcagccacttccagatcgagaagctgctgaacaagcccggcctgaagtacaagcccgtgaccaaccaggtggagtgccacccctacctgacccaggagaagctgatccagtactgccacagcaagggcatcaccgtgaccgcctacagccccctgggcagccccgacagaccctgggccaagcccgaggaccccagcctgctggaggaccccaagatcaaggagatcgccgccaagcacaagaagaccgccgcccaggtgctgatcagattccacatccagagaaacgtgatcgtgatccccaagagcgtgacccccgccagaatcgtggagaacatccaggtgttcgacttcaagctgagcgacgaggagatggccaccatcctgagcttcaacagaaactggagagcctgcaacgtgctgcagagcagccacctggaggactaccccttcaacgccgagtactag

SEQ ID NO: 10501 - DNA, 8274 bp, synthetic construct
  source 1..8274: mol_type = other DNA; note = Synthetic coding sequence
gagcccaaggtggtgttcgccaaggagcagcccgtgcacagagaggtgcaggcccaggccggcgccagcaccaccctgagctgcgaggtggcccaggcccagaccgaggtgatgtggtacaaggacggcaagaagctgagcttcagcagcaaggtgagaatggaggccgtgggctgcaccagaagactggtggtgcagcaggccggccaggccgtggccggcgagtacagctgcgaggccggcagccagagactgagcttccacctgcacgtggccgagcccaaggccgtgttcgccaaggagcagcccgcccacagagaggtgcaggccgaggccggcgccagcgccaccctgagctgcgaggtggcccaggcccagaccgaggtgacctggtacaaggacggcaagaagctgagcagcagcctgaaggtgcacgtggaggccgccggctgcaccagaagactggtggtgcagcaggccggccaggccgacaccggcgagtacagctgcgaggccggcggccagcagctgagcttcagactgcaggtggccgagcccaaggccgtgttcgccaaggagcagcccgccagcagagaggtgcaggccgaggccggcaccagcgccaccctgagctgcgaggtggcccaggcccagaccgaggtgacctggtacaaggacggcaagaagctgagcagcagcagcaaggtgagaatggaggccgtgggctgcaccagaagactggtggtgcaggaggccggccaggccgacgccggcgagtacagctgcaaggccggcgaccagagactgagcttccacctgcacgtggccgagcccaaggtggtgttcgccaaggagcagcccgcccacagagaggtgcaggccgaggccggcgccagcgccaccctgagctgcgaggtggcccaggcccagaccgaggtgacctggtacaaggacggcaagaagctgagcagcagcagcaaggtgagagtggaggccgtgggctgcaccagaagactggtggtgcagcaggccggccaggccgaggccggcgagtacagctgcgaggccggcggccagcagctgagcttcagactgcaggtggccgagcccaaggccgtgttcgccaaggagcaggtggtgttcgccaaggaccagcccgtgcacagagaggtgcaggccgaggccggcaccagcaccatgctgagctgcgaggtggcccaggcccagaccgaggtgatgtggtacaaggacggcaagaagctgagcagcagcagcaagatgagagtggaggccgtgggctgcaccagaagactggtggtgcaggaggccggccaggccgacgccggcgagtacagctgcgaggccggcggccagagactgagcttccacctgcacgtggccgagcccaaggtggtgttcgccaaggagcagcccgcctgcagagaggtgcaggccgaggccggcgccagcgccaccctgagctgcgaggtggcccagggccagatggaggtgacctggtacaaggacggcaagaagctgagcagcagcagcaaggtgcacatggaggccagcggctacaccagaagactggtggtgcagcaggccggccaggccgacgccggcgagtacagctgcgaggccggcggccagagactgagcttcagactgcacgtggccgagctggagccccagatcagcgagagaccctgcagaagagagcccctggtggtgaaggagcacgaggacatcatcctgaccgccaccctggccacccccagcgccgccaccgtgacctggctgaaggacggcgtggagatcagaagaagcaagagacacgagaccgccagccagggcgacacccacaccctgaccgtgcacggcgcccaggtgctggacagcgccatctacagctgcagagtgggcgccgagggccaggacttccccgtgcaggtggaggaggtggccgccaagttctgcagactgctggagcccgtgtgcggcgagctgggcggcaccgtgaccctggcctgcgagctgagccccgcctgcgccgaggtggtgtggagatgcggcaacacccagctgagagtgggcaagagattccagatggtggccgagggccccgtgagaagcctgaccgtgctgggcctgagagccgaggacgccggcgagtacgtgtgcgagagcagagacgaccacaccagcgcccagctgaccgtgagcgtgcccagagtggtgaagttcatgagcggcctgagcaccgtggtggccgaggagggcggcgaggccaccttccagtgcgtggtgagccccagcgacgtggccgtggtgtggttcagagacggcgccctgctgcagcccagcgagaagttcgccatcagccagagcggcgccagccacagcctgaccatcagcgacctggtgctggaggacgccggccagatcaccgtggaggccgagggcgccagcagcagcgccgccctgagagtgagagaggcccccgtgctgttcaagaagaagctggagccccagaccgtggaggagagaagcagcgtgaccctggaggtggagctgaccagaccctggcccgagctgagatggaccagaaacgccaccgccctggcccccggcaagaacgtggagatccacgccgagggcgccagacacagactggtgctgcacaacgtgggcttcgccgacagaggcttcttcggctgcgagacccccgacgacaagacccaggccaagctgaccgtggagatgagacaggtgagactggtgagaggcctgcaggccgtggaggccagagagcagggcaccgccaccatggaggtgcagctgagccacgccgacgtggacggcagctggaccagagacggcctgagattccagcagggccccacctgccacctggccgtgagaggccccatgcacaccctgaccctgagcggcctgagacccgaggacagcggcctgatggtgttcaaggccgagggcgtgcacaccagcgccagactggtggtgaccgagctgcccgtgagcttcagcagacccctgcaggacgtggtgaccaccgagaaggagaaggtgaccctggagtgcgagctgagcagacccaacgtggacgtgagatggctgaaggacggcgtggagctgagagccggcaagaccatggccatcgccgcccagggcgcctgcagaagcctgaccatctacagatgcgagttcgccgaccagggcgtgtacgtgtgcgacgcccacgacgcccagagcagcgccagcgtgaaggtgcagggcagaacctacaccctgatctacagaagagtgctggccgaggacgccggcgagatccagttcgtggccgagaacgccgagagcagagcccagctgagagtgaaggagctgcccgtgaccctggtgagacccctgagagacaagatcgccatggagaagcacagaggcgtgctggagtgccaggtgagcagagccagcgcccaggtgagatggttcaagggcagccaggagctgcagcccggccccaagtacgagctggtgagcgacggcctgtacagaaagctgatcatcagcgacgtgcacgccgaggacgaggacacctacacctgcgacgccggcgacgtgaagaccagcgcccagttcttcgtggaggagcagagcatcaccatcgtgagaggcctgcaggacgtgaccgtgatggagcccgcccccgcctggttcgagtgcgagaccagcatccccagcgtgagaccccccaagtggctgctgggcaagaccgtgctgcaggccggcggcaacgtgggcctggagcaggagggcaccgtgcacagactgatgctgagaagaacctgcagcaccatgaccggccccgtgcacttcaccgtgggcaagagcagaagcagcgccagactggtggtgagcgacatccccgtggtgctgaccagacccctggagcccaagaccggcagagagctgcagagcgtggtgctgagctgcgacttcagacccgcccccaaggccgtgcagtggtacaaggacgacacccccctgagccccagcgagaagttcaagatgagcctggagggccagatggccgagctgagaatcctgagactgatgcccgccgacgccggcgtgtacagatgccaggccggcagcgcccacagcagcaccgaggtgaccgtggaggccagagaggtgaccgtgaccggccccctgcaggacgccgaggccaccgaggagggctgggccagcttcagctgcgagctgagccacgaggacgaggaggtggagtggagcctgaacggcatgcccctgtacaacgacagcttccacgagatcagccacaagggcagaagacacaccctggtgctgaagagcatccagagagccgacgccggcatcgtgagagccagcagcctgaaggtgagcaccagcgccagactggaggtgagagtgaagcccgtggtgttcctgaaggccctggacgacctgagcgccgaggagagaggcaccctggccctgcagtgcgaggtgagcgaccccgaggcccacgtggtgtggagaaaggacggcgtgcagctgggccccagcgacaagtacgacttcctgcacaccgccggcaccagaggcctggtggtgcacgacgtgagccccgaggacgccggcctgtacacctgccacgtgggcagcgaggagaccagagccagagtgagagtgcacgacctgcacgtgggcatcaccaagagactgaagaccatggaggtgctggagggcgagagctgcagcttcgagtgcgtgctgagccacgagagcgccagcgaccccgccatgtggaccgtgggcggcaagaccgtgggcagcagcagcagattccaggccaccagacagggcagaaagtacatcctggtggtgagagaggccgcccccagcgacgccggcgaggtggtgttcagcgtgagaggcctgaccagcaaggccagcctgatcgtgagagagagacccgccgccatcatcaagcccctggaggaccagtgggtggcccccggcgaggacgtggagctgagatgcgagctgagcagagccggcacccccgtgcactggctgaaggacagaaaggccatcagaaagagccagaagtacgacgtggtgtgcgagggcaccatggccatgctggtgatcagaggcgccagcctgaaggacgccggcgagtacacctgcgaggtggaggccagcaagagcaccgccagcctgcacgtggaggagaaggccaactgcttcaccgaggagctgaccaacctgcaggtggaggagaagggcaccgccgtgttcacctgcaagaccgagcaccccgccgccaccgtgacctggagaaagggcctgctggagctgagagccagcggcaagcaccagcccagccaggagggcctgaccctgagactgaccatcagcgccctggagaaggccgacagcgacacctacacctgcgacatcggccaggcccagagcagagcccagctgctggtgcagggcagaagagtgcacatcatcgaggacctggaggacgtggacgtgcaggagggcagcagcgccaccttcagatgcagaatcagccccgccaactacgagcccgtgcactggttcctggacaagacccccctgcacgccaacgagctgaacgagatcgacgcccagcccggcggctaccacgtgctgaccctgagacagctggccctgaaggacagcggcaccatctacttcgaggccggcgaccagagagccagcgccgccctgagagtgaccgagaagcccagcgtgttcagcagagagctgaccgacgccaccatcaccgagggcgaggacctgaccctggtgtgcgagaccagcacctgcgacatccccgtgtgctggaccaaggacggcaagaccctgagaggcagcgccagatgccagctgagccacgagggccacagagcccagctgctgatcaccggcgccaccctgcaggacagcggcagatacaagtgcgaggccggcggcgcctgcagcagcagcatcgtgagagtgcacgccagacccgtgagattccaggaggccctgaaggacctggaggtgctggagggcggcgccgccaccctgagatgcgtgctgagcagcgtggccgcccccgtgaagtggtgctacggcaacaacgtgctgagacccggcgacaagtacagcctgagacaggagggcgccatgctggagctggtggtgagaaacctgagaccccaggacagcggcagatacagctgcagcttcggcgaccagaccaccagcgccaccctgaccgtgaccgccctgcccgcccagttcatcggcaagctgagaaacaaggaggccaccgagggcgccaccgccaccctgagatgcgagctgagcaaggccgcccccgtggagtggagaaagggcagcgagaccctgagagacggcgacagatactgcctgagacaggacggcgccatgtgcgagctgcagatcagaggcctggccatggtggacgccgccgagtacagctgcgtgtgcggcgaggagagaaccagcgccagcctgaccatcagacccatgcccgcccacttcatcggcagactgagacaccaggagagcatcgagggcgccaccgccaccctgagatgcgagctgagcaaggccgcccccgtggagtggagaaagggcagagagagcctgagagacggcgacagacacagcctgagacaggacggcgccgtgtgcgagctgcagatctgcggcctggccgtggccgacgccggcgagtacagctgcgtgtgcggcgaggagagaaccagcgccaccctgaccgtgaaggccctgcccgccaagttcaccgagggcctgagaaacgaggaggccgtggagggcgccaccgccatgctgtggtgcgagctgagcaaggtggcccccgtggagtggagaaagggccccgagaacctgagagacggcgacagatacatcctgagacaggagggcaccagatgcgagctgcagatctgcggcctggccatggccgacgccggcgagtacctgtgcgtgtgcggccaggagagaaccagcgccaccctgaccatcagagccctgcccgccagattcatcgaggacgtgaagaaccaggaggccagagagggcgccaccgccgtgctgcagtgcgagctgaacagcgccgcccccgtggagtggagaaagggcagcgagaccctgagagacggcgacagatacagcctgagacaggacggcaccaagtgcgagctgcagatcagaggcctggccatggccgacaccggcgagtacagctgcgtgtgcggccaggagagaaccagcgccatgctgaccgtgagagccctgcccatcaagttcaccgagggcctgagaaacgaggaggccaccgagggcgccaccgccgtgctgagatgcgagctgagcaagatggcccccgtggagtggtggaagggccacgagaccctgagagacggcgacagacacagcctgagacaggacggcgccagatgcgagctgcagatcagaggcctggtggccgaggacgccggcgagtacctgtgcatgtgcggcaaggagagaaccagcgccatgctgaccgtgagagccatgcccagcaagttcatcgagggcctgagaaacgaggaggccaccgagggcgacaccgccaccctgtggtgcgagctgagcaaggccgcccccgtggagtggagaaagggccacgagaccctgagagacggcgacagacacagcctgagacaggacggcagcagatgcgagctgcagatcagaggcctggccgtggtggacgccggcgagtacagctgcgtgtgcggccaggagagaaccagcgccaccctgaccgtgagagccctgcccgccagattcatcgaggacgtgaagaaccaggaggccagagagggcgccaccgccgtgctgcagtgcgagctgagcaaggccgcccccgtggagtggagaaagggcagcgagaccctgagaggcggcgacagatacagcctgagacaggacggcaccagatgcgagctgcagatccacggcctgagcgtggccgacaccggcgagtacagctgcgtgtgcggccaggagagaaccagcgccaccctgaccgtgagagccctgcccgccagacacagcagaagcgaggaccagggcggcctgagaagaggccacagctacaccgccgtgtag

SEQ ID NO: 10502 - DNA, 1449 bp, synthetic construct
  source 1..1449: mol_type = other DNA; note = Synthetic coding sequence
atggtgatggagaagcccagccccctgctggtgggcagagagttcgtgagacagtactacaccctgctgaacaaggcccccgagtacctgcacagattctacggcagaaacagcagctacgtgcacggcggcgtggacgccagcggcaagccccaggaggccgtgtacggccagaacgacatccaccacaaggtgctgagcctgaacttcagcgagtgccacaccaagatcagacacgtggacgcccacgccaccctgagcgacggcgtggtggtgcaggtgatgggcctgctgagcaacagcggccagcccgagagaaagttcatgcagaccttcgtgctggcccccgagggcagcgtgcccaacaagttctacgtgcacaacgacatgttcagatacgaggacgaggtgttcggcgacagcgagcccgagctggacgaggagagcgaggacgaggtggaggaggagcaggaggagagacagcccagccccgagcccgtgcaggagaacgccaacagcggctactacgaggcccaccccgtgaccaacggcatcgaggagcccctggaggagagcagccacgagcccgagcccgagcccgagagcgagaccaagaccgaggagctgaagccccaggtggaggagaagaacctggaggagctggaggagaagagcaccacccccccccccgccgagcccgtgagcctgccccaggagccccccaaggccttcagctgggccagcgtgaccagcaagaacctgccccccagcggcaccgtgagcagcagcggcatccccccccacgtgaaggcccccgtgagccagcccagagtggaggccaagcccgaggtgcagagccagccccccagagtgagagagcagagacccagagagagacccggcttcccccccagaggccccagacccggcagaggcgacatggagcagaacgacagcgacaacagaagaatcatcagataccccgacagccaccagctgttcgtgggcaacctgccccacgacatcgacgagaacgagctgaaggagttcttcatgagcttcggcaacgtggtggagctgagaatcaacaccaagggcgtgggcggcaagctgcccaacttcggcttcgtggtgttcgacgacagcgagcccgtgcagagaatcctgatcgccaagcccatcatgttcagaggcgaggtgagactgaacgtggaggagaagaagaccagagccgccagagagagagagaccagaggcggcggcgacgacagaagagacatcagaagaaacgacagaggccccggcggccccagaggcatcgtgggcggcggcatgatgagagacagagacggcagaggccccccccccagaggcggcatggcccagaagctgggcagcggcagaggcaccggccagatggagggcagattcaccggccagagaagatag

SEQ ID NO: 10503 - DNA, 807 bp, synthetic construct
  source 1..807: mol_type = other DNA; note = Synthetic coding sequence
atgagcggcagaaagagaagcttcaccttcggcgcctacggcggcgtggacaagagcttcaccagcagaagaagcgtgtggagaagcgacggccagaaccagcacttcccccaggccctggacctgagcagagtgaacctggtgcccagctacacccccagcctgtaccccaagaacaccgacctgttcgagatgatcgagaagatgcagggcagcagaatggacgagcagagatgcagcttccccccccccctgaagaccgaggaggactacatcccctaccccagcgtgcacgaggtgctgggcagagagggccccttccccctgatcctgctgccccagttcggcggctactggatcgagggcaccaaccacgagatcaccagcatccccgagaccgagcccctgcagagccccaccaccaaggtgaagctggagtgcaaccccaccgccagaatctacagaaagcacttcctgggcaaggagcacttcaactactacagcctggacgccgccctgggccacctggtgttcagcctgaagtacgacgtgatcggcgaccaggagcacctgagactgctgctgagaaccaagtgcagaacctaccacgacgtgatccccatcagctgcctgaccgagttccccaacgtggtgcagatggccaagctggtgtgcgaggacgtgaacgtggacagattctaccccgtgctgtaccccaaggccagcagactgatcgtgaccttcgacgagcacgtgatcagcaacaacttcaagttcggcgtgatctaccagaagctgggccagtag

SEQ ID NO: 10504 - DNA, 606 bp, synthetic construct; identical to SEQ ID NO: 9982
  source 1..606: mol_type = other DNA; note = Synthetic coding sequence

SEQ ID NO: 10505 - DNA, 1707 bp, synthetic construct
  source 1..1707: mol_type = other DNA; note = Synthetic coding sequence
atgggcctgctgaccttcagagacgtggccatcgagttcagcctggaggagtggcagtgcctggacaccgcccagagaaacctgtacaagaacgtgatcctggagaactacagaaacctggtgttcctgggcatcgccgtgagcaagcaggacctgatcacctgcctggagcaggagaaggagcccctgaccgtgaagagacacgagatggtgaacgagccccccgtgatgtgcagccacttcgcccaggagttctggcccgagcagaacatcaaggacagcttcgagaaggtgaccctgagaagatacgagaagtgcggcaacgacaacttccagctgaagggctgcaagagcgtggacgagtgcaagctgcacaagggcggctacaacggcctgaaccagtgcctgcccaccatgcagagcaagatgttccagtgcgacaagtacgtgaaggtgttcaacaagttcagccacagcgacagacacaagatcaagcacatggagaacaagcccttcaagtgcaaggagtgcggcagaagcttctgcatgctgagccacctgaccagacacgagagaaactacaccaaggtgaacttctgcaagtgcgaggagtgcgagaaggccgtgaaccagagcagcaagctgaccaagcacaagagaatctacacctgcgagaagctgtacaagtgccaggagtgcgacagaaccttcaaccagttcagcaacctgaccgagtacaagaaggactacgccagagagaagccctacaagtgcgaggagtgcggcaaggccttcaaccagagcagccacctgaccacccacaagatcatccacaccggcgagaagccctacaagtgcgaggagtgcggcaaggccttcaaccagttcagcaacctgaccacccacaagaagatccacaccggcgagcagccctacatctgcgaggagtgcggcaaggccttcacccagagcagcaccctgaccacccacaagagaatccacaccggcgagaagccctacaagtgcgaggagtgcggcaaggccttcaacagaagcagcaagctgaccgagcacaagaacatccacaccggcgagcagccctacaagtgcgaggagtgcggcaaggccttcaacagaagcagcaacctgaccgagcacagaaagatccacaccgaggagaagccctacaagtgcaaggagtgcggcaaggccttcaagcacagcagcgccctgaccacccacaagagaatccacaccggcgagaagccctacaagtgcgaggagtgcggcaaggccttcaacagaagcagcaagctgaccgagcacaagaagctgcacaccggcaagaagccctacaagtgcgaggagtgcggcaaggccttcatccagagcagcaagctgaccgagcacaagaagatccacagcggcgagatcccctacaagtgcgaggagtgcggcaaggccttcaagcacagcagcagcctgaccacccacaagagaatccacaccggcgagaagccctacaagtgcgaggagtgcggcaaggccttcagcagaagcagcaagctgaccgagcacaagatcatccacaccggcgagaagccctacaagtgcgagagatgcgacaaggccttcaaccagagcgccaacctgaccaagcacaagaagatccacaccggcgagaagctgcagaactggaacgtgtag

SEQ ID NO: 10506 - DNA, 1383 bp, synthetic construct
  source 1..1383: mol_type = other DNA; note = Synthetic coding sequence
atggacagcgagctgatgcacagcatcgtgggcagctaccacaagccccccgagagagtgttcgtgcccagcttcacccagaacgagcccagccagaactgccaccccgccaacctggaggtgaccagccccaagatcctgcacagccccaacagccaggccctgatcctggccctgaagaccctgcaggagaagatccacagactggagctggagagaacccaggccgaggacaacctgaacatcctgagcagagaggccgcccagtacaagaaggccctggagaacgagaccaacgagagaaacctggcccaccaggagctgatcaagcagaagaaggacatcagcatccagctgagcagcgcccagagcagatgcaccctgctggagaagcagctggagtacaccaagagaatggtgctgaacgtggagagagagaagaacatgatcctggagcagcaggcccagctgcagagagagaaggagcaggaccagatgaagctgtacgccaagctggagaagctggacgtgctggagaaggagtgcttcagactgaccaccacccagaagaccgccgaggacaagatcaagcacctggaggagaagctgaaggaggaggagcaccagagaaagctgttccaggacaaggccagcgagctgcagaccggcctggagatcagcaagatcatcatgagcagcgtgagcaacctgaagcacagcaaggagaagaagaagagcagcaagaagaccaagtgcatcaagagaagacccccctggcagatctgcagcaagttcggcgccctgcccttcgtggccgagaagatgagacagcacagagacccccacatcctgcagaagcccttcaacgtgaccgagaccagatgcctgcccaagcccagcagaaccaccagctggtgcaaggccatcccccccgacagcgagaagagcatcagcatctgcgacaacctgagcgagctgctgatggccatgcaggacgagctggaccagatgagcatggagcaccaggagctgctgaagcagatgaaggagaccgagagccacagcgtgtgcgacgacatcgagtgcgagctggagtgcctgctgaagaagatggagatcaagggcgagcagatcagcaagctgaagaagcaccaggacagcgtgtgcaagctgcagcagaaggtgcagaacagcaagatgagcgaggccagcggcatccagcaggaggacagctaccccaagggcagcaagaacatcaagaacagccccagaaagtgcctgaccgacaccaacctgttccagaagaacagcagcttccaccccatcagagtgcacaacctgcagatgaagctgagaagagacgacatcatgtgggagcagtag

SEQ ID NO: 10507 - DNA, 1833 bp, synthetic construct
  source 1..1833: mol_type = other DNA; note = Synthetic coding sequence
atgagccagaccagcctgaagcagaagaagaacgagcccggcatgagaagcagcaaggagagcctggaggccgagaagagaaaggagagcgacaagaccggcgtgagactgagcaaccagatgagaagagccgtgaaccccaaccacagcctgagatgctgccccttccagggccacagcagctgcagaagatgcctgtgcgccgccgagggcaccgccctgggcccctgccacaccatcagaatctacatccacatgtgcctgctgtgggagcagggccagcagatcaccatgatgagaggcagccaggagagcagcctgagaaagaccgacagcagaggctacctggtgagaagccagtggagcagaatcagcagaagccccagcaccaaggcccccagcatcgacgagcccagaagcagaaacaccagcgccaagctgcccagcagcagcaccagcagcagaacccccagcaccagccccagcctgcacgacagcagccccccccccctgagcggccagcccagcctgcagccccccgccagcccccagctgcccagaagcctggacagcagaccccccaccccccccgagcccgaccccggcagcagaagaagcaccaagatgcaggagaaccccgaggcctgggcccagggcatcgtgagagagatcagacagaccagagacagccagcccctggagtacagcagaaccagccccaccgagtggaagagcagcagccagagaagaggcatctaccccgccagcacccagctggacagaaacagcctgagcgagcagcagcagcagcagagagaggacgaggacgactacgaggccgcctactgggccagcatgagaagcttctacgagaagaaccccagctgcagcagaccctggccccccaagcccaagaacgccatcaccatcgccctgagcagctgcgccctgttcaacatggtggacggcagaaagatctacgagcaggagggcctggagaagtacatggagtaccagctgaccaacgagaacgtgatcctgacccccggccccgccttcagattcgtgaaggccctgcagtacgtgaacgccagactgagagacctgtaccccgacgagcaggacctgttcgacatcgtgctgatgaccaacaaccacgcccaggtgggcgtgagactgatcaacagcgtgaaccactacggcctgctgatcgacagattctgcctgaccggcggcaaggaccccatcggctacctgaaggcctacctgaccaacctgtacatcgccgccgacagcgagaaggtgcaggaggccatccaggagggcatcgccagcgccaccatgttcgacggcgccaaggacatggcctactgcgacacccagctgagagtggccttcgacggcgacgccgtgctgttcagcgacgagagcgagcacttcaccaaggagcacggcctggacaagttcttccagtacgacaccctgtgcgagagcaagcccctggcccagggccccctgaagggcttcctggaggacctgggcagactgcagaagaagttctacgccaagaacgagagactgctgtgccccatcagaacctacctggtgaccgccagaagcgccgccagcagcggcgccagagtgctgaagaccctgagaagatggggcctggagatcgacgaggccctgttcctggccggcgcccccaagagccccatcctggtgaagatcagaccccacatcttcttcgacgaccacatgttccacatcgagggcgcccagagactgggcagcatcgccgcctacggcttcaacaagaagttcagcagctag

SEQ ID NO: 10508 - DNA, 456 bp, synthetic construct
  source 1..456: mol_type = other DNA; note = Synthetic coding sequence
atgagcaagaacaccgtgagcagcgccagattcagaaaggtggacgtggacgagtacgacgagaacaagttcgtggacgaggaggacggcggcgacggccaggccggccccgacgagggcgaggtggacagctgcctgagacagggcaacatgaccgccgccctgcaggccgccctgaagaacccccccatcaacaccaagagccaggccgtgaaggacagagccggcagcatcgtgctgaaggtgctgatcagcttcaaggccaacgacatcgagaaggccgtgcagagcctggacaagaacggcgtggacctgctgatgaagtacatctacaagggcttcgagagccccagcgacaacagcagcgccatgctgctgcagtggcacgagaaggccctggccgccggcggcgtgggcagcatcgtgagagtgctgaccgccagaaagaccgtgtag

SEQ ID NO: 10509 - DNA, 3522 bp, synthetic construct
  source 1..3522: mol_type = other DNA; note = Synthetic coding sequence
atggtgaccgtgggcaccaacatcctgcccagcagacccgccgccagcgccaacaccgccagagaggacgccgccctgttcagcagaagaatcccccccagacacaagaacggcgccgcccagcccggcgccgcccccggccccggcgcccccggcgccaacatgggcaacgcccacagcaagagcggcgacagacacagcgccctgcccggcagacccgagctgagcttctacggcagcttccccagaaagtggagcgagaacgtgttcctggacaacgagctgctgaccagcaagatcctgagcgtgctgagaccccagagcgagagaggcttcagagccggcgacctgagataccccacccacttcctgagcaccaacagcgtgctggccagcgtgaccgccagcctgaaggagcaccccagaggcaccctgctgagcgacggcagccccgccctgagcagaaacgtgggcatgaccgtgagccagaagggcggcccccagcccacccccagccccgccggccccggcacccagctgggccccatcaccggcgagatggacgaggccgacagcgccttcctgaagttcaagcagaccgccgacgacagcctgagcctgaccagccccaacaccgagagcatcttcgtggaggacccctacaccgccagcctgagaagcgagatcgagagcgacggccacgagttcgaggccgagagctggagcctggccgtggacgccgcctacgccaagaagcagaagagagaggtggtgaagagacaggacgtgctgtacgagctgatgcagaccgaggtgcaccacgtgagaaccctgaagatcatgctgaaggtgtacagcagagccctgcaggaggagctgcagttcagcagcaaggccatcggcagactgttcccctgcgccgacgacctgctggagacccacagccacttcctggccagactgaaggagagaagacaggagagcctggaggagggcagcgacagaaactacgtgatccagaagatcggcgacctgctggtgcagcagttcagcggcgagaacggcgagagaatgaaggagaagtacggcgtgttctgcagcggccacaacgaggccgtgagccactacaagctgctgctgcagcagaacaagaagttccagaacctgatcaagaagatcggcaacttcagcatcgtgagaagactgggcgtgcaggagtgcatcctgctggtgacccagagaatcaccaagtaccccgtgctggtggagagaatcatccagaacaccgaggccggcaccgaggactacgaggacctgacccaggccctgaacctgatcaaggacatcatcagccaggtggacgccaaggtgagcgagtgcgagaagggccagagactgagagagatcgccggcaagatggacctgaagagcagcagcaagctgaagaacggcctgaccttcagaaaggaggacatgctgcagagacagctgcacctggagggcatgctgtgctggaagaccaccagcggcagactgaaggacatcctggccatcctgctgaccgacgtgctgctgctgctgcaggagaaggaccagaagtacgtgttcgccagcgtggacagcaagccccccgtgatcagcctgcagaagctgatcgtgagagaggtggccaacgaggagaaggccatgttcctgatcagcgccagcctgcagggccccgagatgtacgagatctacaccagcagcaaggaggacagaaacgcctggatggcccacatccagagagccgtggagagctgccccgacgaggaggagggccccttcagcctgcccgaggaggagagaaaggtggtggaggccagagccaccagactgagagacttccaggagagactgagcatgaaggaccagctgatcgcccagagcctgctggagaagcagcagatctacctggagatggccgagatgggcggcctggaggacctgccccagcccagaggcctgttcagaggcggcgaccccagcgagaccctgcagggcgagctgatcctgaagagcgccatgagcgagatcgagggcatccagagcctgatctgcagacagctgggcagcgccaacggccaggccgaggacggcggcagcagcaccggcccccccagaagagccgagaccttcgccggctacgactgcaccaacagccccaccaagaacggcagcttcaagaagaaggtgagcagcaccgaccccagacccagagactggagaggcccccccaacagccccgacctgaagctgagcgacagcgacatccccggcagcagcgaggagagcccccaggtggtggaggcccccggcaccgagagcgaccccagactgcccaccgtgctggagagcgagctggtgcagagaatccagaccctgagccagctgctgctgaacctgcaggccgtgatcgcccaccaggacagctacgtggagacccagagagccgccatccaggagagagagaagcagttcagactgcagagcaccagaggcaacctgctgctggagcaggagagacagagaaacttcgagaagcagagagaggagagagccgccctggagaagctgcagagccagctgagacacgagcagcagagatgggagagagagagacagtggcagcaccaggagctggagagagccggcgccagactgcaggagagagagggcgaggccagacagctgagagagagactggagcaggagagagccgagctggagagacagagacaggcctaccagcacgacctggagagactgagagaggcccagagagccgtggagagagagagagagagactggagctgctgagaagactgaagaagcagaacaccgcccccggcgccctgccccccgacaccctggccgaggcccagccccccagccacccccccagcttcaacggcgagggcctggagggccccagagtgagcatgctgcccagcggcgtgggccccgagtacgccgagagacccgaggtggccagaagagacagcgcccccaccgagaacagactggccaagagcgacgtgcccatccagctgctgagcgccaccaaccagttccagagacaggccgccgtgcagcagcagatccccaccaagctggccgccagcaccaagggcggcaaggacaagggcggcaagagcagaggcagccagagatgggagagcagcgccagcttcgacctgaagcagcagctgctgctgaacaagctgatgggcaaggacgagagcaccagcagaaacagaagaagcctgagccccatcctgcccggcagacacagccccgcccccccccccgaccccggcttccccgcccccagccccccccccgccgacagccccagcgagggcttcagcctgaaggccggcggcaccgccctgctgcccggcccccccgcccccagccccctgcccgccacccccctgagcgccaaggaggacgccagcaaggaggacgtgatcttcttctag

SEQ ID NO: 10510 - DNA, 1674 bp, synthetic construct
  source 1..1674: mol_type = other DNA; note = Synthetic coding sequence
atggacagcaccgtgcccagcgccctggagctgccccagagactggccctgaaccccagagagagccccagaagccccgaggaggaggagccccacctgctgagcagcctggccgccgtgcagaccctggccagcgtgatcagaccctgctacggcccccacggcagacagaagttcctggtgaccatgaagggcgagaccgtgtgcaccggctgcgccaccgccatcctgagagccctggagctggagcaccccgccgcctggctgctgagagaggccggccagacccaggccgagaacagcggcgacggcaccgccttcgtggtgctgctgaccgaggccctgctggagcaggccgagcagctgctgaaggccggcctgcccagaccccagctgagagaggcctacgccaccgccaccgccgaggtgctggccaccctgcccagcctggccatccagagcctgggccccctggaggaccccagctgggccctgcacagcgtgatgaacacccacaccctgagccccatggaccacctgaccaagctggtggcccacgcctgctgggccatcaaggagctggacggcagcttcaagcccgagagagtgggcgtgtgcgccctgcccggcggcaccctggaggacagctgcctgctgcccggcctggccatcagcggcaagctgtgcggccagatggccaccgtgctgagcggcgccagagtggccctgttcgcctgccccttcggccccgcccaccccaacgcccccgccaccgccagactgagcagccccgccgacctggcccagttcagcaagggcagcgaccagctgctggagaagcaggtgggccagctggccgccgccggcatcaacgtggccgtggtgctgggcgaggtggacgaggagaccctgaccctggccgacaagtacggcatcgtggtgatccaggccagaagctggatggagatcatctacctgagcgaggtgctggacacccccctgctgcccagactgctgcccccccagagacccggcaagtgccagagagtgtacagacaggagctgggcgacggcctggccgtggtgttcgagtgggagtgcaccggcacccccgccctgaccgtggtgctgagaggcgccaccacccagggcctgagaagcgccgagcaggccgtgtaccacggcatcgacgcctacttccagctgtgccaggaccccagactgatccccggcgccggcgccaccgagatggccctggccaagatgctgagcgacaagggcagcagactggagggccccagcggccccgccttcctggccttcgcctgggccctgaagtacctgcccaagaccctggccgagaacgccggcctggccgtgagcgacgtgatggccgagatgagcggcgtgcaccagggcggcaacctgctgatgggcgtgggcaccgagggcatcatcaacgtggcccaggagggcgtgtgggacaccctgatcgtgaaggcccagggcttcagagccgtggccgaggtggtgctgcagctggtgaccgtggacgagatcgtggtggccaagaagagccccacccaccaggagatctggaaccccgacagcaagaagaccaagaagcaccccccccccgtggagaccaagaagatcctgggcctgaacaactag

SEQ ID NO: 10511 - DNA, 939 bp, synthetic construct
  source 1..939: mol_type = other DNA; note = Synthetic coding sequence
atgaccagaagcctgttcaagggcaacttctggagcgccgacatcctgagcaccatcggctacgacaacatcatccagcacctgaacaacggcagaaagaactgcaaggagttcgaggacttcctgaaggagagagccgccatcgaggagagatacggcaaggacctgctgaacctgagcagaaagaagccctgcggccagagcgagatcaacaccctgaagagagccctggaggtgttcaagcagcaggtggacaacgtggcccagtgccacatccagctggcccagagcctgagagaggaggccagaaagatggaggagttcagagagaagcagaagctgcagagaaagaagaccgagctgatcatggacgccatccacaagcagaagagcctgcagttcaagaagaccatggacgccaagaagaactacgagcagaagtgcagagacaaggacgaggccgagcaggccgtgagcagaagcgccaacctggtgaaccccaagcagcaggagaagctgttcgtgaagctggccaccagcaagaccgccgtggaggacagcgacaaggcctacatgctgcacatcggcaccctggacaaggtgagagaggagtggcagagcgagcacatcaaggcctgcgaggccttcgaggcccaggagtgcgagagaatcaacttcttcagaaacgccctgtggctgcacgtgaaccagctgagccagcagtgcgtgaccagcgacgagcaccccagctgcatgagaatcagcaccccccccagaagaatgcagagccagcaggagagactgcagggcctgacctggcagggcgaggaccccagccagttcctgaaggcccaccagatgatccccatcaccctgtggctgatgaccaccgtgtgcagcatcagcaagatcaacgagaccagagccttcagcggctag

SEQ ID NO: 10512 - DNA, 3693 bp, synthetic construct
  source 1..3693: mol_type = other DNA; note = Synthetic coding sequence
atgcccagaaagggcacccagcccagcaccgccagaagaagagaggagggcccccccccccccagccccgacggcgccagcagcgacgccgagcccgagccccccagcggcagaaccgagagccccgccaccgccgccgagaccgccagcgaggagctggacaacagaagcctggaggagatcctgaacagcatcccccccccccccccccccgccatgaccaacgaggccggcgcccccagactgatgatcacccacatcgtgaaccagaacttcaagagctacgccggcgagaagatcctgggccccttccacaagagattcagctgcatcatcggccccaacggcagcggcaagagcaacgtgatcgacagcatgctgttcgtgttcggctacagagcccagaagatcagaagcaagaagctgagcgtgctgatccacaacagcgacgagcacaaggacatccagagctgcaccgtggaggtgcacttccagaagatcatcgacaaggagggcgacgactacgaggtgatccccaacagcaacttctacgtgagcagaaccgcctgcagagacaacaccagcgtgtaccacatcagcggcaagaagaagaccttcaaggacgtgggcaacctgctgagaagccacggcatcgacctggaccacaacagattcctgatcctgcagggcgaggtggagcagatcgccatgatgaagcccaagggccagaccgagcacgacgagggcatgctggagtacctggaggacatcatcggctgcggcagactgaacgagcccatcaaggtgctgtgcagaagagtggagatcctgaacgagcacagaggcgagaagctgaacagagtgaagatggtggagaaggagaaggacgccctggagggcgagaagaacatcgccatcgagttcctgaccctggagaacgagatcttcagaaagaagaaccacgtgtgccagtactacatctacgagctgcagaagagaatcgccgagatggagacccagaaggagaagatccacgaggacaccaaggagatcaacgagaagagcaacatcctgagcaacgagatgaaggccaagaacaaggacgtgaaggacaccgagaagaagctgaacaagatcaccaagttcatcgaggagaacaaggagaagttcacccagctggacctggaggacgtgcaggtgagagagaagctgaagcacgccaccagcaaggccaagaagctggagaagcagctgcagaaggacaaggagaaggtggaggagttcaagagcatccccgccaagagcaacaacatcatcaacgagaccaccaccagaaacaacgccctggagaaggagaaggagaaggaggagaagaagctgaaggaggtgatggacagcctgaagcaggagacccagggcctgcagaaggagaaggagagcagagagaaggagctgatgggcttcagcaagagcgtgaacgaggccagaagcaagatggacgtggcccagagcgagctggacatctacctgagcagacacaacaccgccgtgagccagctgaccaaggccaaggaggccctgatcgccgccagcgagaccctgaaggagagaaaggccgccatcagagacatcgagggcaagctgccccagaccgagcaggagctgaaggagaaggagaaggagctgcagaagctgacccaggaggagaccaacttcaagagcctggtgcacgacctgttccagaaggtggaggaggccaagagcagcctggccatgaacagaagcagaggcaaggtgctggacgccatcatccaggagaagaagagcggcagaatccccggcatctacggcagactgggcgacctgggcgccatcgacgagaagtacgacgtggccatcagcagctgctgccacgccctggactacatcgtggtggacagcatcgacatcgcccaggagtgcgtgaacttcctgaagagacagaacatcggcgtggccaccttcatcggcctggacaagatggccgtgtgggccaagaagatgaccgagatccagacccccgagaacacccccagactgttcgacctggtgaaggtgaaggacgagaagatcagacaggccttctacttcgccctgagagacaccctggtggccgacaacctggaccaggccaccagagtggcctaccagaaggacagaagatggagagtggtgaccctgcagggccagatcatcgagcagagcggcaccatgaccggcggcggcagcaaggtgatgaagggcagaatgggcagcagcctggtgatcgagatcagcgaggaggaggtgaacaagatggagagccagctgcagaacgacagcaagaaggccatgcagatccaggagcagaaggtgcagctggaggagagagtggtgaagctgagacacagcgagagagagatgagaaacaccctggagaagttcaccgccagcatccagagactgatcgagcaggaggagtacctgaacgtgcaggtgaaggagctggaggccaacgtgctggccaccgcccccgacaagaagaagcagaagctgctggaggagaacgtgagcgccttcaagaccgagtacgacgccgtggccgagaaggccggcaaggtggaggccgaggtgaagagactgcacaacaccatcgtggagatcaacaaccacaagctgaaggcccagcaggacaagctggacaagatcaacaagcagctggacgagtgcgccagcgccatcaccaaggcccaggtggccatcaagaccgccgacagaaacctgcagaaggcccaggacagcgtgctgagaaccgagaaggagatcaaggacaccgagaaggaggtggacgacctgaccgccgagctgaagagcctggaggacaaggccgccgaggtggtgaagaacaccaacgccgccgagatcagcaagatcagcctgcaccccatcgaggacaaccccatcgaggagatcagcgtgctgagccccgaggacctggaggccatcaagaaccccgacagcatcaccaaccagatcgccctgctggaggccagatgccacgagatgaagcccaacctgggcgccatcgccgagtacaagaagaaggaggagctgtacctgcagagagtggccgagctggacaagatcacctacgagagagacagcttcagacaggcctacgaggacctgagaaagcagagactgaacgagttcatggccggcttctacatcatcaccaacaagctgaaggagaactaccagatgctgaccctgggcggcgacgccgagctggagctggtggacagcctggaccccttcagcgagggcatcatgttcagcgtgagaccccccaagaagagctggaagaagatcttcaacctgagcggcggcgagaagaccctgagcagcctggccctggtgttcgccctgcaccactacaagcccacccccctgtacttcatggacgagatcgacgccgccctggacttcaagaacgtgagcatcgtggccttctacatctacgagcagaccaagaacgcccagttcatcatcatcagcctgagaaacaacatgttcgagatcagcgacagactgatcggcatctacaagacctacaacatcaccaagagcgtggccgtgaaccccaaggagatcgccagcaagggcctgtgctag

SEQ ID NO: 10513 - DNA, 2661 bp, synthetic construct
  source 1..2661: mol_type = other DNA; note = Synthetic coding sequence
atggagctgagatgcggcggcctgctgttcagcagcagattcgacagcggcaacctggcccacgtggagaaggtggagagcctgagcagcgacggcgagggcgtgggcggcggcgccagcgccctgaccagcggcatcgccagcagccccgactacgagttcaacgtgtggaccagacccgactgcgccgagaccgagttcgagaacggcaacagaagctggttctacttcagcgtgagaggcggcatgcccggcaagctgatcaagatcaacatcatgaacatgaacaagcagagcaagctgtacagccagggcatggcccccttcgtgagaaccctgcccaccagacccagatgggagagaatcagagacagacccaccttcgagatgaccgagacccagttcgtgctgagcttcgtgcacagattcgtggagggcagaggcgccaccaccttcttcgccttctgctaccccttcagctacagcgactgccaggagctgctgaaccagctggaccagagattccccgagaaccaccccacccacagcagccccctggacaccatctactaccacagagagctgctgtgctacagcctggacggcctgagagtggacctgctgaccatcaccagctgccacggcctgagagaggacagagagcccagactggagcagctgttccccgacaccagcacccccagacccttcagattcgccggcaagagaatcttcttcctgagcagcagagtgcaccccggcgagacccccagcagcttcgtgttcaacggcttcctggacttcatcctgagacccgacgaccccagagcccagaccctgagaagactgttcgtgttcaagctgatccccatgctgaaccccgacggcgtggtgagaggccactacagaaccgacagcagaggcgtgaacctgaacagacagtacctgaagcccgacgccgtgctgcaccccgccatctacggcgccaaggccgtgctgctgtaccaccacgtgcacagcagactgaacagccagagcagcagcgagcaccagcccagcagctgcctgccccccgacgcccccgtgagcgacctggagaaggccaacaacctgcagaacgaggcccagtgcggccacagcgccgacagacacaacgccgaggcctggaagcagaccgagcccgccgagcagaagctgaacagcgtgtggatcatgccccagcagagcgccggcctggaggagagcgcccccgacaccatcccccccaaggagagcggcgtggcctactacgtggacctgcacggccacgccagcaagagaggctgcttcatgtacggcaacagcttcagcgacgagagcacccaggtggagaacatgctgtaccccaagctgatcagcctgaacagcgcccacttcgacttccagggctgcaacttcagcgagaagaacatgtacgccagagacagaagagacggccagagcaaggagggcagcggcagagtggccatctacaaggccagcggcatcatccacagctacaccctggagtgcaactacaacaccggcagaagcgtgaacagcatccccgccgcctgccacgacaacggcagagccagccccccccccccccccgccttccccagcagatacaccgtggagctgttcgagcaggtgggcagagccatggccatcgccgccctggacatggccgagtgcaacccctggcccagaatcgtgctgagcgagcacagcagcctgaccaacctgagagcctggatgctgaagcacgtgagaaacagcagaggcctgagcagcaccctgaacgtgggcgtgaacaagaagagaggcctgagaaccccccccaagagccacaacggcctgcccgtgagctgcagcgagaacaccctgagcagagccagaagcttcagcaccggcaccagcgccggcggcagcagcagcagccagcagaacagcccccagatgaagaacagccccagcttccccttccacggcagcagacccgccggcctgcccggcctgggcagcagcacccagaaggtgacccacagagtgctgggccccgtgagagagcccagaagccaggacagaagaagacagcagcagcccctgaaccacagacccgccggcagcctggcccccagccccgcccccaccagcagcggccccgccagcagccacaagctgggcagctgcctgctgcccgacagcttcaacatccccggcagcagctgcagcctgctgagcagcggcgacaagcccgaggccgtgatggtgatcggcaagggcctgctgggcaccggcgccagaatgccctgcatcaagaccagactgcaggccagacccagactgggcagaggcagcccccccaccagaagaggcatgaagggcagcagcggccccaccagccccacccccagaaccagagagagcagcgagctggagctgggcagctgcagcgccacccccggcctgccccaggccagaccccccagacccagaagcgcccccgccttcagccccatcagctgcagcctgagcgacagccccagctggaactgctacagcagaggccccctgggccagcccgaggtgtgcttcgtgcccaagagcccccccctgaccgtgagccccagagtgtag

SEQ ID NO: 10514 - DNA, 4221 bp, synthetic construct; identical to SEQ ID NO: 10332
  source 1..4221: mol_type = other DNA; note = Synthetic coding sequence

SEQ ID NO: 10515 - DNA, 1308 bp, synthetic construct
  source 1..1308: mol_type = other DNA; note = Synthetic coding sequence
atgggcgacctggagctgctgctgcccggcgaggccgaggtgctggtgagaggcctgagaagcttccccctgagagagatgggcagcgagggctggaaccagcagcacgagaacctggagaagctgaacatgcaggccatcctggacgccaccgtgagccagggcgagcccatccaggagctgctggtgacccacggcaaggtgcccaccctggtggaggagctgatcgccgtggagatgtggaagcagaaggtgttccccgtgttctgcagagtggaggacttcaagccccagaacaccttccccatctacatggtggtgcaccacgaggccagcatcatcaacctgctggagaccgtgttcttccacaaggaggtgtgcgagagcgccgaggacaccgtgctggacctggtggactactgccacagaaagctgaccctgctggtggcccagagcggctgcggcggcccccccgagggcgagggcagccaggacagcaaccccatgcaggagctgcagaagcaggccgagctgatggagttcgagatcgccctgaaggccctgagcgtgctgagatacatcaccgactgcgtggacagacagtggagcgtgagccagcccccccagctggcccacctgaagagaatccagagactgcaccccgtgtgctggttcctgagccccggcaagctgcagcagttcgagggcagcagatggcacaccgtggcccccagcgagcagcagaagctgagcaagctggacggccaggtgtggatcgccctgtacaacctgctgctgagccccgaggcccaggccagatactgcctgaccagcttcgccaagggcagactgctgaagctgagagccttcctgaccgacaccctgctggaccagctgcccaacctggcccacctgcagagcttcctggcccacctgaccctgaccgagacccagccccccaagaaggacctggtgctggagcagatccccgagatctgggagagactggagagagagaacagaggcaagtggcaggccatcgccaagcaccagctgcagcacgtgttcagccccagcgagcaggacctgagactgcaggccagaagatgggccgagacctacagactggacgtgctggaggccgtggcccccgagagacccagatgcgcctactgcagcgccgaggccagcaagagatgcagcagatgccagaacgagtggtactgctgcagagagtgccaggtgaagcactgggagaagcacggcaagacctgcgtgctggccgcccagggcgacagagccaagtag

SEQ ID NO: 10516 - DNA, 1377 bp, synthetic construct
  source 1..1377: mol_type = other DNA; note = Synthetic coding sequence
atgaacgaggccatggccaccgacagccccagaagacccagcagatgcaccggcggcgtggtggtgagaccccaggccgtgaccgagcagagctacatggagagcgtggtgaccttcctgcaggacgtggtgccccaggtgtactgctgcggcgacaacatccagagctacaccgccaccgtgatcagcgccgccaagaccctgaagagcggcctgaccatggtgggcaaggtggtgacccagctgaccggcaccctgcccagcggcgtgaccgaggacgacgtggccatccacagcaacagcagaagaagccccctggtgcccggcatcatcaccgtgatcgacaccgagaccgtgggcgagggccaggtgctggtgagcgaggacagcgacagcgacggcatcgtggcccacttccccgcccacgagaagcccgtgtgctgcatggccttcaacaccagcggcatgctgctggtgaccaccgacaccctgggccacgacttccacgtgttccagatcctgacccacccctggagcagcagccagtgcgccgtgcaccacctgtacaccctgcacagaggcgagaccgaggccaaggtgcaggacatctgcttcagccacgactgcagatgggtggtggtgagcaccctgagaggcaccagccacgtgttccccatcaacccctacggcggccagccctgcgtgagaacccacatgagccccagagtggtgaacagaatgagcagattccagaagagcgccggcctggaggagatcgagcaggagctgaccagcaagcagggcggcagatgcagccccgtgcccggcctgagcagcagccccagcggcagccccctgcacggcaagctgaacagccaggacagctacaacaacttcaccaacaacaaccccggcaaccccagactgagccccctgcccagcctgatggtggtgatgcccctggcccagatcaagcagcccatgaccctgggcaccatcaccaagagaaccggcaaggtgaagccccccccccagatcagccccagcaagagcatgggcggcgagttctgcgtggccgccatcttcggcaccagcagaagctggttcgccaacaacgccggcctgaagagagagaaggaccagagcaagcaggtggtggtggagagcctgtacatcatcagctgctacggcaccctggtggagcacatgatggagccccagcccctgaacggcatgaactgcagccacagactgatgcagaccaccctgtgcagcagcctgcagatgcagtacagcatcatcagcagctgcctgctggcctggttccccctggaggtgctgggccccctgctggacatgggcctgaccaccgtgtag

SEQ ID NO: 10517 - DNA, 309 bp, synthetic construct
  source 1..309: mol_type = other DNA; note = Synthetic coding sequence
atgagagccagcccctgcatcagccagcccgccgccagctggcaccccagacccagcgccctgagacccaccgccggcagcggccccgacaccagaacccccggcaccgtggaggacggcagcgccccctgccccgccttcagaagccccgccgtgagcccctgcggcgaggagccctgctgcttccagatcagccccgccgaggagaccctggagctgggcagactggtgagccccggctgccacaagagcagcgccccccaggagagaagactggaccccagagccagatgcgtggtgcacatctag

SEQ ID NO: 10518 - DNA, 4227 bp, synthetic construct; identical to SEQ ID NO: 10132
  source 1..4227: mol_type = other DNA; note = Synthetic coding sequence

SEQ ID NO: 10519 - DNA, 2994 bp, synthetic construct
  source 1..2994: mol_type = other DNA; note = Synthetic coding sequence
agacccccccccgccggcccccaggcccccgagggcgccagagccggcagcagacccgtgcagctgctggccctgctgagcagctggtgcgaggagctgggcagactgctgctgctgagacaccagaagagcagacagagcgacccccccggcaagctgcccatgcagccccccctgagcagcatgagcagcatgaagcccaccctgagccacagcgacggcagcttcccctacgacagcgtgccctggcagcagaacaccaaccagccccccggcagcctgagcgtggtgaccaccgtgtggggcgtgaccaacaccagccagagccaggtgctgggcaaccccatggccaacgccaacaaccccatgaaccccggcggcaaccccatggccagcggcatgaccaccagcaaccccggcctgaacagcccccagttcgccggccagcagcagcagttcagcgccaaggccggccccgcccagccctacatccagcagagcatgtacggcagacccaactaccccggcagcggcggcttcggcgccagctaccccggcggccccaacgcccccgccggcatgggcatccccccccacaccagaccccccgccgacttcacccagcccgccgccgccgccgccgccgccgccgtggccgccgccgccgccaccgccaccgccaccgccaccgccaccgtggccgccctgcaggagacccagaacaaggacatcaaccagtacggccccatgggccccacccaggcctacaacagccagttcatgaaccagcccggccccagaggccccgccagcatgggcggcagcatgaaccccgccagcatggccgccggcatgacccccagcggcatgagcggcccccccatgggcatgaaccagcccagaccccccggcatcagccccttcggcacccacggccagagaatgccccagcagacctaccccggccccagaccccagagcctgcccatccagaacatcaagagaccctaccccggcgagcccaactacggcaaccagcagtacggccccaacagccagttccccacccagcccggccagtaccccgcccccaacccccccagacccctgaccagccccaactaccccggccagagaatgcccagccagcccagcagcggccagtaccccccccccaccgtgaacatgggccagtactacaagcccgagcagttcaacggccagaacaacaccttcagcggcagcagctacagcaactacagccagggcaacgtgaacagaccccccagacccgtgcccgtggccaactacccccacagccccgtgcccggcaaccccaccccccccatgacccccggcagcagcatccccccctacctgagccccagccaggacgtgaagccccccttcccccccgacatcaagcccaacatgagcgccctgccccccccccccgccaaccacaacgacgagctgagactgaccttccccgtgagagacggcgtggtgctggagcccttcagactggagcacaacctggccgtgagcaaccacgtgttccacctgagacccaccgtgcaccagaccctgatgtggagaagcgacctggagctgcagttcaagtgctaccaccacgaggacagacagatgaacaccaactggcccgccagcgtgcaggtgagcgtgaacgccacccccctgaccatcgagagaggcgacaacaagaccagccacaagcccctgcacctgaagcacgtgtgccagcccggcagaaacaccatccagatcaccgtgaccgcctgctgctgcagccacctgttcgtgctgcagctggtgcacagacccagcgtgagaagcgtgctgcagggcctgctgaagaagagactgctgcccgccgagcactgcatcaccaagatcaagagaaacttcagcagcgtggccgccagcagcggcaacaccaccctgaacggcgaggacggcgtggagcagaccgccatcaaggtgagcctgaagtgccccatcaccttcagaagaatccagctgcccgccagaggccacgactgcaagcacgtgcagtgcttcgacctggagagctacctgcagctgaactgcgagagaggcacctggagatgccccgtgtgcaacaagaccgccctgctggagggcctggaggtggaccagtacatgtggggcatcctgaacgccatccagcacagcgagttcgaggaggtgaccatcgaccccacctgcagctggagacccgtgcccatcaagagcgacctgcacatcaaggacgaccccgacggcatccccagcaagagattcaagaccatgagccccagccagatgatcatgcccaacgtgatggagatgatcgccgccctgggccccggccccagcccctaccccctgccccccccccccggcggcaccaacagcaacgactacagcagccagggcaacaactaccagggccacggcaacttcgacttcccccacggcaaccccggcggcaccagcatgaacgacttcatgcacggccccccccagctgagccacccccccgacatgcccaacaacatggccgccctggagaagcccctgagccaccccatgcaggagaccatgccccacgccggcagcagcgaccagccccaccccagcatccagcagggcctgcacgtgccccaccccagcagccagagcggcccccccctgcaccacagcggcgcccccccccccccccccagccagccccccagacagcccccccaggccgcccccagcagccacccccacagcgacctgaccttcaaccccagcagcgccctggagggccaggccggcgcccagggcgccagcgacatgcccgagcccagcctggacctgctgcccgagctgaccaaccccgacgagctgctgagctacctggacccccccgacctgcccagcaacagcaacgacgacctgctgagcctgttcgagaacaactag

SEQ ID NO: 10520 - DNA, 3405 bp, synthetic construct
  source 1..3405: mol_type = other DNA; note = Synthetic coding sequence
atgggcaaggagcaggagctgctggaggccgccagaaccggccacctgcccgccgtggagaagctgctgagcggcaagagactgagcagcggcttcggcggcggcggcggcggcggcagcggcggcggcggcggcggcagcggcggcggcggcggcggcctgggcagcagcagccaccccctgagcagcctgctgagcatgtggagaggccccaacgtgaactgcgtggacagcaccggctacacccccctgcaccacgccgccctgaacggccacaaggacgtggtggaggtgctgctgagaaacgacgccctgaccaacgtggccgacagcaagggctgctaccccctgcacctggccgcctggaagggcgacgcccagatcgtgagactgctgatccaccagggccccagccacaccagagtgaacgagcagaacaacgacaacgagaccgccctgcactgcgccgcccagtacggccacaccgaggtggtgaaggtgctgctggaggagctgaccgaccccaccatgagaaacaacaagttcgagacccccctggacctggccgccctgtacggcagactggaggtggtgaagatgctgctgaacgcccaccccaacctgctgagctgcaacaccaagaagcacacccccctgcacctggccgccagaaacggccacaaggccgtggtgcaggtgctgctggacgccggcatggacagcaactaccagaccgagatgggcagcgccctgcacgaggccgccctgttcggcaagaccgacgtggtgcagatcctgctggccgccggcaccgacgtgaacatcaaggacaaccacggcctgaccgccctggacaccgtgagagagctgcccagccagaagagccagcagatcgccgccctgatcgaggaccacatgaccggcaagagaagcaccaaggaggtggacaagaccccccccccccagccccccctgatcagcagcatggacagcatcagccagaagagccagggcgacgtggagaaggccgtgaccgagctgatcatcgacttcgacgccaacgccgaggaggagggcccctacgaggccctgtacaacgccatcagctgccacagcctggacagcatggccagcggcagaagcagcgaccaggacagcaccaacaaggaggccgaggccgccggcgtgaagcccgccggcgtgagacccagagagagaccccccccccccgccaagcccccccccgacgaggaggaggaggaccacatcgacaagaagtacttccccctgaccgccagcgaggtgctgagcatgagacccagaatccacggcagcgccgccagagaggaggacgagcacccctacgagctgctgctgaccgccgagaccaagaaggtggtgctggtggacggcaagaccaaggaccacagaagaagcagcagcagcagaagccaggacagcgccgagggccaggacggccaggtgcccgagcagttcagcggcctgctgcacggcagcagccccgtgtgcgaggtgggccaggaccccttccagctgctgtgcaccgccggccagagccaccccgacggcagcccccagcagggcgcctgccacaaggccagcatgcagctggaggagaccggcgtgcacgcccccggcgccagccagcccagcgccctggaccagagcaagagagtgggctacctgaccggcctgcccaccaccaacagcagaagccaccccgagaccctgacccacaccgccagcccccaccccggcggcgccgaggagggcgacagaagcggcgccagaagcagagccccccccaccagcaagcccaaggccgagctgaagctgagcagaagcctgagcaagagcgacagcgacctgctgacctgcagccccaccgaggacgccaccatgggcagcagaagcgagagcctgagcaactgcagcatcggcaagaagagactggagaagagccccagcttcgccagcgagtgggacgagatcgagaagatcatgagcagcatcggcgagggcatcgacttcagccaggagagacagaagatcagcggcctgagaaccctggagcagagcgtgggcgagtggctggagagcatcggcctgcagcagtacgagagcaagctgctgctgaacggcttcgacgacgtgcacttcctgggcagcaacgtgatggaggagcaggacctgagagacatcggcatcagcgacccccagcacagaagaaagctgctgcaggccgccagaagcctgcccaaggtgaaggccctgggctacgacggcaacagcccccccagcgtgcccagctggctggacagcctgggcctgcaggactacgtgcacagcttcctgagcagcggctacagcagcatcgacaccgtgaagaacctgtgggagctggagctggtgaacgtgctgaaggtgcagctgctgggccacagaaagagaatcatcgccagcctggccgacagaccctacgaggagcccccccagaagccccccagattcagccagctgagatgccaggacctgctgagccagaccagcagccccctgagccagaacgacagctgcaccggcagaagcgccgacctgctgctgccccccggcgacaccggcagaagaagacacgacagcctgcacgaccccgccgcccccagcagagccgagagattcagaatccaggaggagcacagagaggccaagctgaccctgagaccccccagcctggccgccccctacgcccccgtgcagagctggcagcaccagcccgagaagctgatcttcgagagctgcggctacgaggccaactacctgggcagcatgctgatcaaggacctgagaggcaccgagagcacccaggacgcctgcgccaagatgagaaagagcaccgagcacatgaagaagatccccaccatcatcctgagcatcacctacaagggcgtgaagttcatcgacgccagcaacaagaacgtgatcgccgagcacgagatcagaaacatcagctgcgccgcccaggaccccgaggacctgtgcaccttcgcctacatcaccaaggacctgcagaccagccaccactactgccacgtgttcagcaccgtggacgtgaacctgacctacgagatcatcctgaccctgggccaggccttcgaggtggcctaccagctggccctgcaggcccagaagagcagagccaccggcgccagcgccgccgagatgatcgagaccaagagcagcaagcccgtgcccaagcccagagtgggcgtgagaaagagcgccctggagccccccgacatggaccaggacgcccagagccacgccagcgtgagctgggtggtggaccccaagcccgacagcaagagaagcctgagcaccaactag

SEQ ID NO: 10521 - DNA, 3099 bp, synthetic construct
  source 1..3099: mol_type = other DNA; note = Synthetic coding sequence
atggaggccgccgccgccgtggtggccgccgaggccgaggtggagaacgaggacggcgacagcagctgcggcgacgtgtgcttcatggacaagggcctgcagagcatcagcgagctgagcctggacagcaccctgcacgccgtgaacctgcactgcaacaacatcagcaagatcgaggccatcgaccacatctggaacctgcagcacctggacctgagcagcaaccagatcagcagaatcgagggcctgaacaccctgaccaagctgtgcaccctgaacctgagctgcaacctgatcaccaaggtggagggcctggaggagctgatcaacctgaccagactgaacgtgagctacaaccacatcgacgacctgagcggcctgatccccctgcacggcatcaagcacaagctgagatacatcgacctgcacagcaacagaatcgacagcatccaccacctgctgcagtgcatggtgggcctgcacttcctgaccaacctgatcctggagaaggacggcgacgacaaccccgtgtgcagactgcccggctacagagccgtgatcctgcagaccctgccccagctgagaatcctggactgcaagaacatcttcggcgagcccgtgaacctgaccgagatcaacagcagccagctgcagtgcctggagggcctgctggacaacctggtgagcagcgacagccccctgaacatcagcgaggacgagatcatcgacagaatgcccgtgatcaccgcccccatcgacgagctggtgcccctggagcagttcgccagcacccccagcgacgccgtgctgaccagcttcatgagcgtgtgccagagcagcgagcccgagaagaacaaccacgagaacgacctgcagaacgagatcaagctgcagaagctggacgaccagatcctgcagctgctgaacgagaccagcaacagcatcgacaacgtgctggagaaggaccccagacccaagagagacaccgacatcaccagcgagagcgactacggcaacagaaaggagtgcaacagaaaggtgcccagaagaagcaagatcccctacgacgccaagaccatccagaccatcaagcaccacaacaagaactacaacagcttcgtgagctgcaacagaaagatgaagcccccctacctgaaggagctgtacgtgagcagcagcctggccaactgccccatgctgcaggagagcgagaagcccaagaccgagatcatcaaggtggaccagagccacagcgaggacaacacctaccagagcctggtggagcagctggaccaggagagagagaagagatggagagccgagcaggccgagaacaagctgatggactacatcgacgagctgcacaagcacgccaacgagaaggaggacatccacagcctggccctgctgaccaccgacagactgaaggagatcatcttcagagagagaaacagcaagggccagctggaggtgatggtgcacaagctgcagaacgagatcaagaagctgaccgtggagctgatgaaggccaaggaccagcaggaggaccacctgaagcacctgagaaccctggagaagaccctggagaagatggagagacagaagagacagcagcaggccgcccagatcagactgatccaggaggtggagctgaaggccagcgccgccgacagagagatctacctgctgagaaccagcctgcacagagagagagagcaggcccagcagctgcaccagctgctggccctgaaggagcaggagcacagaaaggagctggagaccagagagttcttcaccgacgccgacttccaggacgccctggccaaggagatcgccaaggaggagaagaagcacgagcagatgatcaaggagtaccaggagaagatcgacgtgctgagccagcagtacatggacctggagaacgagttcagaatcgccctgaccgtggaggccagaagattccaggacgtgaaggacggcttcgagaacgtggccaccgagctggccaagagcaagcacgccctgatctgggcccagagaaaggagaacgagagcagcagcctgatcaaggacctgacctgcatggtgaaggagcagaagaccaagctggccgaggtgagcaagctgaagcaggagaccgccgccaacctgcagaaccagatcaacaccctggagatcctgatcgaggacgacaagcagaagagcatccagatcgagctgctgaagcacgagaaggtgcagctgatcagcgagctggccgccaaggagagcctgatcttcggcctgagaaccgagagaaaggtgtggggccacgagctggcccagcagggcagcagcctggcccagaacagaggcaagctggaggcccagatcgagagcctgagcagagagaacgagtgcctgagaaagaccaacgagagcgacagcgacgccctgagaatcaagtgcaagatcatcgacgaccagaccgagaccatcagaaagctgaaggactgcctgcaggagaaggacgagcacatcaagagactgcaggagaagatcaccgagatcgagaagtgcacccaggagcagctggacgagaagagcagccagctggacgaggtgctggagaagctggagagacacaacgagagaaaggagaagctgaagcagcagctgaagggcaaggaggtggagctggaggagatcagaaaggcctacagcaccctgaacagaaagtggcacgacaagggcgagctgctgtgccacctggagacccaggtgaaggaggtgaaggagaagttcgagaacaaggagaagaagctgaaggccgagagagacaagagcatcgagctgcagaagaacgccatggagaagctgcacagcatggacgacgccttcaagagacaggtggacgccatcgtggaggcccaccaggccgagatcgcccagctggccaacgagaagcagaagtgcatcgacagcgccaacctgaaggtgcaccagatcgagaaggagatgagagagctgctggaggagacctgcaagaacaagaagaccatggaggccaagatcaagcagctggccttcgccctgaacgagatccagcaggacatgtag

SEQ ID NO: 10522 - DNA, 219 bp, synthetic construct
  source 1..219: mol_type = other DNA; note = Synthetic coding sequence
atgagctaccagcagcagcagtgcaagcagccctgccagcccccccccgtgtgccccacccccaagtgccccgagccctgccccccccccaagtgccccgagccctgccccagccccaagtgcccccagccctgccccccccagcagtgccagcagaagtacccccccgtgacccccagccccccctgccagcccaagtgcccccccaagagcaagtag

SEQ ID NO: 10523 - DNA, 888 bp, synthetic construct; identical to SEQ ID NO: 10194
  source 1..888: mol_type = other DNA; note = Synthetic coding sequence

SEQ ID NO: 10524 - DNA, 1491 bp, synthetic construct; identical to SEQ ID NO: 10231
  source 1..1491: mol_type = other DNA; note = Synthetic coding sequence

SEQ ID NO: 10525 - DNA, 1575 bp, synthetic construct
  source 1..1575: mol_type = other DNA; note = Synthetic coding sequence
atgagcagctgcgtgagcagccagcccagcagcaacagagccgccccccaggacgagctgggcggcagaggcagcagcagcatccacctgggcatggagagcttcatcgtggtgaccgagtgcgagcccggctgcgccgtggacctgggcctggccagagacagacccctggaggccgacggccaggaggtgcccctggacaccagcggcagccaggccagaccccacctgagcggcagaaagctgagcctgcaggagagaagccagggcggcctggccgccggcggcagcctggacatgaacggcagatgcatctgccccagcctgccctacagccccgtgagcagcccccagagcagccccagactgcccagaagacccaccgtggagagccaccacgtgagcatcaccggcatgcaggactgcgtgcagctgaaccagtacaccctgaaggacgagatcggcaagggcagctacggcgtggtgaagctggcctacaacgagaacgacaacacctactacgccatgaaggtgctgagcaagaagaagctgatcagacaggccggcttccccagaagacccccccccagaggcaccagacccgcccccggcggctgcatccagcccagaggccccatcgagcaggtgtaccaggagatcgccatcctgaagaagctggaccaccccaacgtggtgaagctggtggaggtgctggacgaccccaacgaggaccacctgtacatggtgttcgagctggtgaaccagggccccgtgatggaggtgcccaccctgaagcccctgagcgaggaccaggccagattctacttccaggacctgatcaagggcatcgagtacctgcactaccagaagatcatccacagagacatcaagcccagcaacctgctggtgggcgaggacggccacatcaagatcgccgacttcggcgtgagcaacgagttcaagggcagcgacgccctgctgagcaacaccgtgggcacccccgccttcatggcccccgagagcctgagcgagaccagaaagatcttcagcggcaaggccctggacgtgtgggccatgggcgtgaccctgtactgcttcgtgttcggccagtgccccttcatggacgagagaatcatgtgcctgcacagcaagatcaagagccaggccctggagttccccgaccagcccgacatcgccgaggacctgaaggacctgatcaccagaatgctggacaagaaccccgagagcagaatcgtggtgcccgagatcaagctgcacccctgggtgaccagacacggcgccgagcccctgcccagcgaggacgagaactgcaccctggtggaggtgaccgaggaggaggtggagaacagcgtgaagcacatccccagcctggccaccgtgatcctggtgaagaccatgatcagaaagagaagcttcggcaaccccttcgagggcagcagaagagaggagagaagcctgagcgcccccggcaacctgctgaccaagcagggcagcgaggacaacctgcagggcaccgaccccccccccgtgggcgaggaggaggtgctgctgtag

SEQ ID NO: 10526 - DNA, 1902 bp, synthetic construct
  source 1..1902: mol_type = other DNA; note = Synthetic coding sequence
atgaaggccatcaagaagagcctgaccgaggaggagtacctgtacctggacttcagccaccagaccgagggctgcatcttccccctgcacaccagcgtgaccctgttcctgctgagctactgcgactgcaagatcttcaagatctgcctggtggtgaccaaggaggtgagcagagacagcagcctgctgagagacgacctgatccaggacgtggagatccagatcatcagcagacaggagctgccccccatcgtgcagaactgctgcctgcccgccgtggtggagagaagcgacaacttctgcagagccggcctggccgtggtgctgagacacatcatccagaagagctacgaggccgaccccctgaagaaggagctgctggagctgctgggcttcaagaagacctgcctgaaggcctgcgccgaggtgagccagtggaccagactgtgcgagctgaccatccccctggccatcgagaacttcctgagagagagcagcgaccagccccccaccatccccgtggagatcctgcagctggagaagaagctgagcgagcccgtgagagtgcacaacgacgacaagctgagaagacagaagctgaagcagcagaaggccgacggcgtgggcccccccctgaccaagggcaaggccaagagcaaggtgcacacccaggagaccagcgagggcctggacagcagcagcaagagcctggagctgaaggtggccttcagcaagctgaccgtgcaggaggagcccgccaccaccaacagagagcccagccacatcagaaaggccaaggccagcgacctgccccccctggagcacgtgttcgccgagggcctgtacttcaccctggccgacatcgtgctgctgccctgcatccaccacttcctggtgatcatcagcagaaagttcagcgagaagctggtggagttccccctgctggccagctggtaccagagaatccaggaggtgcccggcgtgaagaccgccgccagcaagtgcggcatccagttcctgcacctgcccaagctgctgaccaccagcaccgagcagcaccccaacctgtgcgaggtgcccggcgtggaggagcagagcgaccccctgttcatcggcggccccagacccaccatggccaagctgatggagaagggcatcgaggtgatgttcagcccccacccctgccccacctggaccctggactggaacgtgctgcccgccgccgtgagccccaaggagggcaagatgagcagcgacagagccctgagaaagcagcagcagctgaacaacctggtgtacgtggtgaccaaccaggccaagcccggcgacagaatcgtggacttctgcagcggcggcggccacgtgggcatcgtgctggcccacatgctgcccagctgccaggtgaccctgatcgagaacaaggagctgagcctgatcagagccaagaagagaagcgacgagctgggcctgagcaacatctggttcatccaggccaacatggagtacttcaccggcatgttcaacatcggcgtggccctgcacgcctgcggcgtggccaccgacatggtgatcgagcactgcatcaagaccagagccagcttcgtgacctgcccctgctgctacggcttcatccagaacaccagcaagttcaacttccccaagagcgagcagttcaagaagaccctgagctacaaggagcacatgatcctgtgcagattcgccgaccagaccgccgtgcagctgcccccccagagaagactgatcggcaagcagtgcatgtgcctggtggacctggacagagccagagccgccgaggagtgcggctacagcgtgcaggtgatcagcatggagcccgagagctgcagccccaagaacaacatgatcgtgggcgtgcccatctag

SEQ ID NO: 10527 - DNA, 519 bp, synthetic construct
  source 1..519: mol_type = other DNA; note = Synthetic coding sequence
atgagcagcggcaactaccagcagagcgaggccctgagcaagcccaccttcagcgaggagcaggccagcgccctggtggagagcgtgttcggcctgaaggtgagcaaggtgagacccctgcccagctacgacgaccagaacttccacgtgtacgtgagcaagaccaaggacggccccaccgagtacgtgctgaagatcagcaacaccaaggccagcaagaaccccgacctgatcgaggtgcagaaccacatcatcatgttcctgaaggccgccggcttccccaccgccagcgtgtgccacaccaagggcgacaacaccgccagcctggtgagcgtggacagcggcagcgagatcaagagctacctggtgagactgctgacctacctgcccggcagacccatcgccgagctgcccgtgagcccccagctgctgtacgagatcggcaagctggccgccaagctggacaagaccctgcaggagggcaagcccagagtgacccccctgctggccaagaactag

SEQ ID NO: 10528 - DNA, 2937 bp, synthetic construct
  source 1..2937: mol_type = other DNA; note = Synthetic coding sequence
atgggctggaagcccagcgaggccagaggccagagccagagcttccaggccagcggcctgcagcccagaagcctgaaggccgccagaagagccaccggcagacccgacagaagcagagccgccagacccaccatggaccccagcgcccacagaagcagagccgccccccccaacatggaccccgacccccaggccggcgtgcaggtgggcatgagagtggtgagaggcgtggactggaagtggggccagcaggacggcggcgagggcggcgtgggcaccgtggtggagctgggcagacacggcagccccagcacccccgacagaaccgtggtggtgcagtgggaccagggcaccagaaccaactacagagccggctaccagggcgcccacgacctgctgctgtacgacaacgcccagatcggcgtgagacaccccaacatcatctgcgactgctgcaagaagcacggcctgagaggcatgagatggaagtgcagagtgtgcctggactacgacctgtgcacccagtgctacatgcacaacaagcacgagctggcccacgccttcgacagatacgagaccgcccacagcagacccgtgaccctgagccccagacagggcctgcccagaatccccctgagaggcatcttccagggcgccaaggtggtgagaggccccgactgggagtggggcagccaggacggcggcgagggcaagcccggcagagtggtggacatcagaggctgggacgtggagaccggcagaagcgtggccagcgtgacctgggccgacggcaccaccaacgtgtacagagtgggccacaagggcaaggtggacctgaagtgcgtgggcgaggccgccggcggcttctactacaaggaccacctgcccagactgggcaagcccgccgagctgcagagaagagtgagcgccgacagccagcccttccagcacggcgacaaggtgaagtgcctgctggacaccgacgtgctgagagagatgcaggagggccacggcggctggaaccccagaatggccgagttcatcggccagaccggcaccgtgcacagaatcaccgacagaggcgacgtgagagtgcagttcaaccacgagaccagatggaccttccaccccggcgccctgaccaaggccctgggcagagtgggcaaggtggtgaaggtgttcggcgacggcaacctgagagtggccgtggccggccagagatggaccttcagccccagctgcctggtggcctacagacccgaggaggacgccaacctggacgtggccgagagagccagagagaacaagagcagcctgagcgtggccctggacaagctgagagcccagaagagcgaccccgagcaccccggcagactggtggtggaggtggccctgggcaacgccgccagagccctggacctgctgagaagaagacccgagcaggtggacaccaagaaccagggcagaaccgccctgcaggtggccgcctacctgggccaggtggagctgatcagactgctgctgcaggccagagccggcgtggacctgcccgacgacgagggcaacaccgccctgcactacgccgccctgggcaaccagcccgaggccaccagagtgctgctgagcgccggctgcagagccgacgccatcaacagcacccagagcaccgccctgcacgtggccgtgcagagaggcttcctggaggtggtgagagccctgtgcgagagaggctgcgacgtgaacctgcccgacgcccacagcgacacccccctgcacagcgccatcagcgccggcaccggcgccagcggcatcgtggaggtgctgaccgaggtgcccaacatcgacgtgaccgccaccaacagccagggcttcaccctgctgcaccacgccagcctgaagggccacgccctggccgtgagaaagatcctggccagagccagacagctggtggacgccaagaaggaggacggcttcaccgccctgcacctggccgccctgaacaaccacagagaggtggcccagatcctgatcagagagggcagatgcgacgtgaacgtgagaaacagaaagctgcagagccccctgcacctggccgtgcagcaggcccacgtgggcctggtgcccctgctggtggacgccggctgcagcgtgaacgccgaggacgaggagggcgacaccgccctgcacgtggccctgcagagacaccagctgctgcccctggtggccgacggcgccggcggcgaccccggccccctgcagctgctgagcagactgcaggccagcggcctgcccggcagcgccgagctgaccgtgggcgccgccgtggcctgcttcctggccctggagggcgccgacgtgagctacaccaaccacagaggcagaagccccctggacctggccgccgagggcagagtgctgaaggccctgcagggctgcgcccagagattcagagagagacaggccggcggcggcgccgcccccggccccagacagaccctgggcacccccaacaccgtgaccaacctgcacgtgggcgccgcccccggccccgaggccgccgagtgcctggtgtgcagcgagctggccctgctggtgctgttcagcccctgccagcacagaaccgtgtgcgaggagtgcgccagaagaatgaagaagtgcatcagatgccaggtggtggtgagcaagaagctgagacccgacggcagcgaggtggccagcgccgcccccgcccccggcccccccagacagctggtggaggagctgcagagcagatacagacagatggaggagagaatcacctgccccatctgcatcgacagccacatcagactggtgttccagtgcggccacggcgcctgcgccccctgcggcagcgccctgagcgcctgccccatctgcagacagcccatcagagacagaatccagatcttcgtgtag

SEQ ID NO: 10529 - DNA, 1074 bp, synthetic construct
  source 1..1074: mol_type = other DNA; note = Synthetic coding sequence
atgggcggcgccgtgagcgccggcgaggacaacgacgacctgatcgacaacctgaaggaggcccagtacatcagaaccgagagagtggagcaggccttcagagccatcgacagaggcgactactacctggagggctacagagacaacgcctacaaggacctggcctggaagcacggcaacatccacctgagcgccccctgcatctacagcgaggtgatggaggccctgaagctgcagcccggcctgagcttcctgaacctgggcagcggcaccggctacctgagcaccatggtgggcctgatcctgggccccttcggcatcaaccacggcatcgagctgcacagcgacgtggtggagtacgccaaggagaagctggagagcttcatcaagaacagcgacagcttcgacaagttcgagttctgcgagcccgccttcgtggtgggcaactgcctgcagatcgccagcgacagccaccagtacgacagaatctactgcggcgccggcgtgcagaaggaccacgagaactacatgaagatcctgctgaaggtgggcggcatcctggtgatgcccatcgaggaccagctgacccagatcatgagaaccggccagaacacctgggagagcaagaacatcctggccgtgagcttcgcccccctggtgcagcccagcaagaacgacaacggcaagcccgacagcgtgggcctgcccccctgcgccgtgagaaacctgcaggacctggccagaatctacatcagaagaaccctgagaaacttcatcaacgacgagatgcaggccaagggcatcccccagagagccccccccaagagaaagagaaagagagtgaagcagagaatcaacacctacgtgttcgtgggcaaccagctgatcccccagcccctggacagcgaggaggacgagaagatggaggaggacaacaaggaggaggaggagaaggaccacaacgaggccatgaagcccgaggagcccccccagaacctgctgagagagaagatcatgaagctgcccctgcccgagagcctgaaggcctacctgacctacttcagagacaagtag

SEQ ID NO: 10530 - DNA, 633 bp, synthetic construct
  source 1..633: mol_type = other DNA; note = Synthetic coding sequence
atgagctgccccaactactgcagcggcaacagcaacagcggcagcctgagaaccagcagacacatccccctgaccagcatcgacctgtgccccaccagcgtgagctgcggcgacgtgctgtacctgcccaccagcagccaggaccacacctgggtgaccgacaactgccaggagacctgcggcgagcccaccagctgccagcccgtgcactgcgagaccggcaacctggagaccagctgcggcagcagcaccgcctactacgtgcccagaccctgccagggcagcagcttcctgcccgccagcttcttcagcagcagctgcctgcccgtgagctgcagaccccagagatacgtgagcagcggctgcagacccctgagacccctgctgaacagctaccagcccatcggcgactgcgtgcccaacgcctacagaccccagttctgcctgagcaagagctgccagccccagaacctgctgaccagcggctgccagcccagcagctgcctggcctacagaccccagagcctgcacgtggtgagcagcagcctgagacccctgggccccctgttcagcggctgccagcccctgacccacgtgttcagcacctgcagacccagctgcagcggcctgtag

SEQ ID NO: 10531 - DNA, 606 bp, synthetic construct
  source 1..606: mol_type = other DNA; note = Synthetic coding sequence
atggccagcggcgacgacagccccatcttcgaggacgacgagagccccccctacagcctggagaagatgaccgacctggtggccgtgtgggacgtggccctgagcgacggcgtgcacaagatcgagttcgagcacggcaccaccagcggcaagagagtggtgtacgtggacggcaaggaggagatcagaaaggagtggatgttcaagctggtgggcaaggagaccttctacgtgggcgccgccaagaccaaggccaccatcaacatcgacgccatcagcggcttcgcctacgagtacaccctggagatcaacggcaagagcctgaagaagtacatggaggacagaagcaagaccaccaacacctgggtgctgcacatggacggcgagaacttcagaatcgtgctggagaaggacgccatggacgtgtggtgcaacggcaagaagctggagaccgccggcgagttcgtggacgacggcaccgagacccacttcagcatcggcaaccacgactgctacatcaaggccgtgagcagcggcaagagaaaggagggcatcatccacaccctgatcgtggacaacagagagatccccgagatcgccagctag

SEQ ID NO: 10532 - DNA, 3390 bp, synthetic construct
  source 1..3390: mol_type = other DNA; note = Synthetic coding sequence
atgcccgccaccagaaagcccatgagatacggccacaccgagggccacaccgaggtgtgcttcgacgacagcggcagcttcatcgtgacctgcggcagcgacggcgacgtgagaatctgggaggacctggacgacgacgaccccaagttcatcaacgtgggcgagaaggcctacagctgcgccctgaagagcggcaagctggtgaccgccgtgagcaacaacaccatccaggtgcacaccttccccgagggcgtgcccgacggcatcctgaccagattcaccaccaacgccaaccacgtggtgttcaacggcgacggcaccaagatcgccgccggcagcagcgacttcctggtgaagatcgtggacgtgatggacagcagccagcagaagaccttcagaggccacgacgcccccgtgctgagcctgagcttcgaccccaaggacatcttcctggccagcgccagctgcgacggcagcgtgagagtgtggcagatcagcgaccagacctgcgccatcagctggcccctgctgcagaagtgcaacgacgtgatcaacgccaagagcatctgcagactggcctggcagcccaagagcggcaagctgctggccatccccgtggagaagagcgtgaagctgtacagaagagagagctggagccaccagttcgacctgagcgacaacttcatcagccagaccctgaacatcgtgacctggagcccctgcggccagtacctggccgccggcagcatcaacggcctgatcatcgtgtggaacgtggagaccaaggactgcatggagagagtgaagcacgagaagggctacgccatctgcggcctggcctggcaccccacctgcggcagaatcagctacaccgacgccgagggcaacctgggcctgctggagaacgtgtgcgaccccagcggcaagaccagcagcagcaaggtgagcagcagagtggagaaggactacaacgacctgttcgacggcgacgacatgagcaacgccggcgacttcctgaacgacaacgccgtggagatccccagcttcagcaagggcatcatcaacgacgacgaggacgacgaggacctgatgatggccagcggcagacccagacagagaagccacatcctggaggacgacgagaacagcgtggacatcagcatgctgaagaccggcagcagcctgctgaaggaggaggaggaggacggccaggagggcagcatccacaacctgcccctggtgaccagccagagacccttctacgacggccccatgcccacccccagacagaagcccttccagagcggcagcacccccctgcacctgacccacagattcatggtgtggaacagcatcggcatcatcagatgctacaacgacgagcaggacaacgccatcgacgtggagttccacgacaccagcatccaccacgccacccacctgagcaacaccctgaactacaccatcgccgacctgagccacgaggccatcctgctggcctgcgagagcaccgacgagctggccagcaagctgcactgcctgcacttcagcagctgggacagcagcaaggagtggatcatcgacctgccccagaacgaggacatcgaggccatctgcctgggccagggctgggccgccgccgccaccagcgccctgctgctgagactgttcaccatcggcggcgtgcagaaggaggtgttcagcctggccggccccgtggtgagcatggccggccacggcgagcagctgttcatcgtgtaccacagaggcaccggcttcgacggcgaccagtgcctgggcgtgcagctgctggagctgggcaagaagaagaagcagatcctgcacggcgaccccctgcccctgaccagaaagagctacctggcctggatcggcttcagcgccgagggcaccccctgctacgtggacagcgagggcatcgtgagaatgctgaacagaggcctgggcaacacctggacccccatctgcaacaccagagagcactgcaagggcaagagcgaccactactgggtggtgggcatccacgagaacccccagcagctgagatgcatcccctgcaagggcagcagattcccccccaccctgcccagacccgccgtggccatcctgagcttcaagctgccctactgccagatcgccaccgagaagggccagatggaggagcagttctggagaagcgtgatcttccacaaccacctggactacctggccaagaacggctacgagtacgaggagagcaccaagaaccaggccaccaaggagcagcaggagctgctgatgaagatgctggccctgagctgcaagctggagagagagttcagatgcgtggagctggccgacctgatgacccagaacgccgtgaacctggccatcaagtacgccagcagaagcagaaagctgatcctggcccagaagctgagcgagctggccgtggagaaggccgccgagctgaccgccacccaggtggaggaggaggaggaggaggaggacttcagaaagaagctgaacgccggctacagcaacaccgccaccgagtggagccagcccagattcagaaaccaggtggaggaggacgccgaggacagcggcgaggccgacgacgaggagaagcccgagatccacaagcccggccagaacagcttcagcaagagcaccaacagcagcgacgtgagcgccaagagcggcgccgtgaccttcagcagccagggcagagtgaaccccttcaaggtgagcgccagcagcaaggagcccgccatgagcatgaacagcgccagaagcaccaacatcctggacaacatgggcaagagcagcaagaagagcaccgccctgagcagaaccaccaacaacgagaagagccccatcatcaagcccctgatccccaagcccaagcccaagcaggccagcgccgccagctacttccagaagagaaacagccagaccaacaagaccgaggaggtgaaggaggagaacctgaagaacgtgctgagcgagacccccgccatctgccccccccagaacaccgagaaccagagacccaagaccggcttccagatgtggctggaggagaacagaagcaacatcctgagcgacaaccccgacttcagcgacgaggccgacatcatcaaggagggcatgatcagattcagagtgctgagcaccgaggagagaaaggtgtgggccaacaaggccaagggcgagaccgccagcgagggcaccgaggccaagaagagaaagagagtggtggacgagagcgacgagaccgagaaccaggaggagaaggccaaggagaacctgaacctgagcaagaagcagaagcccctggacttcagcaccaaccagaagctgagcgccttcgccttcaagcaggagtag

SEQ ID NO: 10533 - DNA, 1476 bp, synthetic construct
  source 1..1476: mol_type = other DNA; note = Synthetic coding sequence
agcggcagcagccacagcttccccggcagcctggaggtgaccgccctgatgaccacctggagcagcctgcagggcagccacgtgagcaagagagccctggcctacgccctggtggtgaccaactgccaggagagaatccagcactggaagaaggtggacaacgactacaacgccctgagagagagactgagcaccctgcccgacaagctgagctacaacatcatggtgcccttcggccccttcgccttcatgcccggcaagctggtgcacaccaacgaggtgaccgtgctgctgggcgacaactggttcgccaagtgcagcgccaagcaggccgtgggcctggtggagcacagaaaggagcacgtgagaaagaccatcgacgacctgaagaaggtgatgaagaacttcgagagcagagtggagttcaccgaggacctgcagaagatgagcgacgccgccggcgacatcgtggacatcagagaggagatcaagtgcgacttcgagttcaaggccaagcacagaatcgcccacaagccccacagcaagcccaagaccagcgacatcttcgaggccgacatcgccaacgacgtgaagagcaaggacctgctggccgacaaggagctgtgggccagactggaggagctggagagacaggaggagctgctgggcgagctggacagcaagcccgacaccgtgatcgccaacggcgaggacaccaccagcagcgaggaggagaaggaggacagaaacaccaacgtgaacgccatgcaccaggtgaccgacagccacaccccctgccacaaggacgtggccagcagcgagcccttcagcggccaggtgaacagccagctgaactgcagcgtgaacggcagcagcagctaccacagcgacgacgacgacgacgacgacgacgacgacgacgacgacaacatcgacgacgacgacggcgacaacgaccacgaggccctgggcgtgggcgacaacagcatccccaccatctacttcagccacaccgtggagcccaagagagtgagaatcaacaccggcaagaacaccaccctgaagttcagcgagaagaaggaggaggccaagagaaagagaaagaacagcaccggcagcggccacagcgcccaggagctgcccaccatcagaacccccgccgacatctacagagccttcgtggacgtggtgaacggcgagtacgtgcccagaaagagcatcctgaagagcagaagcagagagaacagcgtgtgcagcgacaccagcgagagcagcgccgccgagttcgacgacagaagaggcgtgctgagaagcatcagctgcgaggaggccacctgcagcgacaccagcgagagcatcctggaggaggagccccaggagaaccagaagaagctgctgcccctgagcgtgacccccgaggtgctgagactggtgggctacagcagaaacctggcccccctgaacgtgatcctgtag

SEQ ID NO: 10534 - DNA, 981 bp, synthetic construct
  source 1..981: mol_type = other DNA; note = Synthetic coding sequence
atgctgctgagcaagttcggcagcctggcccacctgtgcggccccggcggcgtggaccacctgcccgtgaagatcctgcagcccgccaaggccgacaaggagagcttcgagaaggcctaccaggtgggcgccgtgctgggcagcggcggcttcggcaccgtgtacgccggcagcagaatcgccgacggcctgcccgtggccgtgaagcacgtggtgaaggagagagtgaccgagtggggcagcctgggcggcgccaccgtgcccctggaggtggtgctgctgagaaaggtgggcgccgccggcggcgccagaggcgtgatcagactgctggactggttcgagagacccgacggcttcctgctggtgctggagagacccgagcccgcccaggacctgttcgacttcatcaccgagagaggcgccctggacgagcccctggccagaagattcttcgcccaggtgctggccgccgtgagacactgccacagctgcggcgtggtgcacagagacatcaaggacgagaacctgctggtggacctgagaagcggcgagctgaagctgatcgacttcggcagcggcgccctgctgaaggacaccgtgtacaccgacttcgacggcaccagagtgtacagcccccccgagtggatcagataccacagataccacggcagaagcgccaccgtgtggagcctgggcgtgctgctgtacgacatggtgtgcggcgacatccccttcgagcaggacgaggagatcctgagaggcagactgctgttcagaagaagagtgagccccgagtgccagcagctgatcagatggtgcctgagcctgagacccagcgagagacccagcctggaccagatcgccgcccacccctggatgctgggcgccgacggcggcgtgcccgagagctgcgacctgagactgtgcaccctggaccccgacgacgtggccagcaccaccagcagcagcgagagcctgtag

SEQ ID NO: 10535 - DNA, 2880 bp, synthetic construct
  source 1..2880: mol_type = other DNA; note = Synthetic coding sequence
atggccgccagcaccggctacgtgagactgtggggcgccgccagatgctgggtgctgagaagacccatgctggccgccgccggcggcagagtgcccaccgccgccggcgcctggctgctgagaggccagagaacctgcgacgccagccccccctgggccctgtggggcagaggccccgccatcggcggccagtggagaggcttctgggaggccagcagcagaggcggcggcgccttcagcggcggcgaggacgccagcgagggcggcgccgaggagggcgccggcggcgccggcggcagcgccggcgccggcgagggccccgtgatcaccgccctgacccccatgaccatccccgacgtgttcccccacctgcccctgatcgccatcaccagaaaccccgtgttccccagattcatcaagatcatcgaggtgaagaacaagaagctggtggagctgctgagaagaaaggtgagactggcccagccctacgtgggcgtgttcctgaagagagacgacagcaacgagagcgacgtggtggagagcctggacgagatctaccacaccggcaccttcgcccagatccacgagatgcaggacctgggcgacaagctgagaatgatcgtgatgggccacagaagagtgcacatcagcagacagctggaggtggagcccgaggagcccgaggccgagaacaagcacaagcccagaagaaagagcaagagaggcaagaaggaggccgaggacgagctgagcgccagacaccccgccgagctggccatggagcccacccccgagctgcccgccgaggtgctgatggtggaggtggagaacgtggtgcacgaggacttccaggtgaccgaggaggtgaaggccctgaccgccgagatcgtgaagaccatcagagacatcatcgccctgaaccccctgtacagagagagcgtgctgcagatgatgcaggccggccagagagtggtggacaaccccatctacctgagcgacatgggcgccgccctgaccggcgccgagagccacgagctgcaggacgtgctggaggagaccaacatccccaagagactgtacaaggccctgagcctgctgaagaaggagttcgagctgagcaagctgcagcagagactgggcagagaggtggaggagaagatcaagcagacccacagaaagtacctgctgcaggagcagctgaagatcatcaagaaggagctgggcctggagaaggacgacaaggacgccatcgaggagaagttcagagagagactgaaggagctggtggtgcccaagcacgtgatggacgtggtggacgaggagctgagcaagctgggcctgctggacaaccacagcagcgagttcaacgtgaccagaaactacctggactggctgaccagcatcccctggggcaagtacagcaacgagaacctggacctggccagagcccaggccgtgctggaggaggaccactacggcatggaggacgtgaagaagagaatcctggagttcatcgccgtgagccagctgagaggcagcacccagggcaagatcctgtgcttctacggcccccccggcgtgggcaagaccagcatcgccagaagcatcgccagagccctgaacagagagtacttcagattcagcgtgggcggcatgaccgacgtggccgagatcaagggccacagaagaacctacgtgggcgccatgcccggcaagatcatccagtgcctgaagaagaccaagaccgagaaccccctgatcctgatcgacgaggtggacaagatcggcagaggctaccagggcgaccccagcagcgccctgctggagctgctggaccccgagcagaacgccaacttcctggaccactacctggacgtgcccgtggacctgagcaaggtgctgttcatctgcaccgccaacgtgaccgacaccatccccgagcccctgagagacagaatggagatgatcaacgtgagcggctacgtggcccaggagaagctggccatcgccgagagatacctggtgccccaggccagagccctgtgcggcctggacgagagcaaggccaagctgagcagcgacgtgctgaccctgctgatcaagcagtactgcagagagagcggcgtgagaaacctgcagaagcaggtggagaaggtgctgagaaagagcgcctacaagatcgtgagcggcgaggccgagagcgtggaggtgacccccgagaacctgcaggacttcgtgggcaagcccgtgttcaccgtggagagaatgtacgacgtgaccccccccggcgtggtgatgggcctggcctggaccgccatgggcggcagcaccctgttcgtggagaccagcctgagaagaccccaggacaaggacgccaagggcgacaaggacggcagcctggaggtgaccggccagctgggcgaggtgatgaaggagagcgccagaatcgcctacaccttcgccagagccttcctgatgcagcacgcccccgccaacgactacctggtgaccagccacatccacctgcacgtgcccgagggcgccacccccaaggacggccccagcgccggctgcaccatcgtgaccgccctgctgagcctggccatgggcagacccgtgagacagaacctggccatgaccggcgaggtgagcctgaccggcaagatcctgcccgtgggcggcatcaaggagaagaccatcgccgccaagagagccggcgtgacctgcatcgtgctgcccgccgagaacaagaaggacttctacgacctggccgccttcatcaccgagggcctggaggtgcacttcgtggagcactacagagagatcttcgacatcgccttccccgacgagcaggccgaggccctggccgtggagagatag

SEQ ID NO: 10536 - DNA, 1203 bp, synthetic construct
  source 1..1203: mol_type = other DNA; note = Synthetic coding sequence
atgaaccccgccagcgcccccccccccctgcccccccccggccagcaggtgatccacgtgacccaggacctggacaccgacctggaggccctgttcaacagcgtgatgaaccccaagcccagcagctggagaaagaagatcctgcccgagagcttcttcaaggagcccgacagcggcagccacagcagacagagcagcaccgacagcagcggcggccaccccggccccagactggccggcggcgcccagcacgtgagaagccacagcagccccgccagcctgcagctgggcaccggcgccggcgccgccggcagccccgcccagcagcacgcccacctgagacagcagagctacgacgtgaccgacgagctgcccctgccccccggctgggagatgaccttcaccgccaccggccagagatacttcctgaaccacatcgagaagatcaccacctggcaggaccccagaaaggccatgaaccagcccctgaaccacatgaacctgcaccccgccgtgagcagcacccccgtgccccagagaagcatggccgtgagccagcccaacctggtgatgaaccaccagcaccagcagcagatggcccccagcaccctgagccagcagaaccaccccacccagaacccccccgccggcctgatgagcatgcccaacgccctgaccacccagcagcagcagcagcagaagctgagactgcagagaatccagatggagagagagagaatcagaatgagacaggaggagctgatgagacaggaggccgccctgtgcagacagctgcccatggaggccgagaccctggcccccgtgcaggccgccgtgaacccccccaccatgacccccgacatgagaagcatcaccaacaacagcagcgaccccttcctgaacggcggcccctaccacagcagagagcagagcaccgacagcggcctgggcctgggctgctacagcgtgcccaccacccccgaggacttcctgagcaacgtggacgagatggacaccggcgagaacgccggccagacccccatgaacatcaacccccagcagaccagattccccgacttcctggactgcctgcccggcaccaacgtggacctgggcaccctggagagcgaggacctgatccccctgttcaacgacgtggagagcgccctgaacaagagcgagcccttcctgacctggctgtag

SEQ ID NO: 10537 - DNA, 2625 bp, synthetic construct
  source 1..2625: mol_type = other DNA; note = Synthetic coding sequence
atggaggtgctgagagagaaggtggaggaggaggaggaggccgagagagaggaggccgccgagtgggccgagtgggccagaatggagaagatgatgagacccgtggaggtgagaaaggaggagatcaccctgaagcaggagaccctgagagacctggagaagaagctgagcgagatccagatcaccgtgagcgccgagctgcccgccttcaccaaggacaccatcgacatcagcaagctgcccatcagctacaagaccaacacccccaaggaggagcacctgctgcaggtggccgacaacttcagcagacagtacagccacctgtgccccgacagagtgcccctgttcctgcaccccctgaacgagtgcgaggtgcccaagttcgtgagcaccaccctgagacccaccctgatgccctaccccgagctgtacaactgggacagctgcgcccagttcgtgagcgacttcctgaccatggtgcccctgcccgaccccctgaagccccccagccacctgtacagcagcaccaccgtgctgaagtaccagaagggcaactgcttcgacttcagcaccctgctgtgcagcatgctgatcggcagcggctacgacgcctactgcgtgaacggctacggcagcctggacctgtgccacatggacctgaccagagaggtgtgccccctgaccgtgaagcccaaggagaccatcaagaaggaggagaaggtgctgcccaagaagtacaccatcaagccccccagagacctgtgcagcagattcgagcaggagcaggaggtgaagaagcagcaggagatcagagcccaggagaagaagagactgagagaggaggaggagagactgatggaggccgagaaggccaagcccgacgccctgcacggcctgagagtgcacagctgggtgctggtgctgagcggcaagagagaggtgcccgagaacttcttcatcgaccccttcaccggccacagctacagcacccaggacgagcacttcctgggcatcgagagcctgtggaaccacaagaactactggatcaacatgcaggactgctggaactgctgcaaggacctgatcttcgacctgggcgaccccgtgagatgggagtacatgctgctgggcaccgacaagagccagctgagcctgaccgaggaggacgacagcggcatcaacgacgaggacgacgtggagaacctgggcaaggaggacgaggacaagagcttcgacatgccccacagctgggtggagcagatcgagatcagccccgaggccttcgagaccagatgccccaacggcaagaaggtgatccagtacaagagagccaagctggagaagtgggccccctacctgaacagcaacggcctggtgagcagactgaccacctacgaggacctgcagtgcaccaacatcctggagatcaaggagtggtaccagaacagagaggacatgctggagctgaagcacatcaacaagaccaccgacctgaagaccgactacttcaagcccggccacccccaggccctgagagtgcacagctacaagagcatgcagcccgagatggacagagtgatcgagttctacgagaccgccagagtggacggcctgatgaagagagaggagacccccagaaccatgaccgagtactaccagggcagacccgacttcctgagctacagacacgccagcttcggccccagagtgaagaagctgaccctgagcagcgccgagagcaaccccagacccatcgtgaagatcaccgagagattcttcagaaaccccgccaagcccgccgaggaggacgtggccgagagagtgttcctggtggccgaggagagaatccagctgagataccactgcagagaggaccacatcaccgccagcaagagagagttcctgagaagaaccgaggtggacagcaagggcaacaagatcatcatgacccccgacatgtgcatcagcttcgaggtggagcccatggagcacaccaagaagctgctgtaccagtacgaggccatgatgcacctgaagagagaggagaagctgagcagacaccaggtgtgggagagcgagctggaggtgctggagatcctgaagctgagagaggaggaggaggccgcccacaccctgaccatcagcatctacgacaccaagagaaacgagaagagcaaggagtacagagaggccatggagagaatgatgcacgaggagcacctgagacaggtggagacccagctggactacctggcccccttcctggcccagctgccccccggcgagaagctgacctgctggcaggccgtgagactgaaggacgagtgcctgagcgacttcaagcagagactgatcaacaaggccaacctgatccaggccagattcgagaaggagacccaggagctgcagaagaagcagcagtggtaccaggagaaccaggtgaccctgacccccgaggacgaggacctgtacctgagctactgcagccaggccatgttcagaatcagaatcctggagcagagactgaacagacacaaggagctggcccccctgaagtacctggccctggaggagaagctgtacaaggaccccagactgggcgagctgcagaagatcttcgcctag

SEQ ID NO: 10538 - DNA, 1851 bp, synthetic construct
  source 1..1851: mol_type = other DNA; note = Synthetic coding sequence
atggacgtgatgctggagaactactgccacctgatcagcgtgggctgccacatgaccaagcccgacgtgatcctgaagctggagagaggcgaggagccctggaccagcttcgccggccacacctgcctggaggagaactggaaggccgaggacttcctggtgaagttcaaggagcaccaggagaagtacagcagaagcgtggtgagcatcaaccacaagaagctggtgaaggagaagagcaagatctacgagaagaccttcaccctgggcaagaaccccgtgaacagcaagaacctgccccccgagtacgacacccacggcagaatcctgaagaacgtgagcgagctgatcatcagcaacctgaaccccgccagaaagagactgagcgagtacaacggctacggcaagagcctgctgagcaccaagcaggagaccacccaccccgaggtgaagagccacaaccagagcgccagagccttcagccacaacgaggtgctgatgcagtaccagaagaccgagacccccgcccagagcttcggctacaacgactgcgagaagagcttcctgcagagaggcggcctgatcacccacagcagaccctacaagggcgagaaccccagcgtgtacaacaagaagagaagagccaccaacatcgagaagaagcacacctgcaacgagtgcggcaagagcttctgcagaaagagcgtgctgatcctgcaccagggcatccacagcgaggagaagccctaccagtgccaccagtgcggcaacgccttcagaagaaagagctacctgatcgaccaccagagaacccacaccggcgagaagcccttcgtgtgcaacgagtgcggcaagagcttcagactgaagaccgccctgaccgaccaccagagaacccacaccggcgagaagagctacgagtgcctgcagtgcagaaacgccttcagactgaagagccacctgatcagacaccagagaacccacaccggcgagaagccctacgagtgcaacgactgcggcaagagcttcagacagaagaccaccctgagcctgcaccagagaatccacaccggcgagaagccctacatctgcaaggagtgcggcaagagcttccaccagaaggccaacctgaccgtgcaccagagaacccacaccggcgagaagccctacatctgcaacgagtgcggcaagagcttcagccagaagaccaccctggccctgcacgagaagacccacaacgaggagaagccctacatctgcagcgagtgcggcaagagcttcagacagaagaccaccctggtggcccaccagagaacccacaccggcgagaagagctacgagtgcccccactgcggcaaggccttcagaatgaagagctacctgatcgaccaccacagaacccacaccggcgagaagccctacgagtgcaacgagtgcggcaagagcttcagccagaagaccaacctgaacctgcaccagagaatccacaccggcgagaagccctacgtgtgcaacgagtgcggcaagagcttcagacagaaggccaccctgaccgtgcaccagaagatccacaccggccagaagagctacgagtgcccccagtgcggcaaggccttcagcagaaagagctacctgatccaccaccagagaacccacaccggcgagaagccctacaagtgcagcgagtgcggcaagtgcttcagacagaagaccaacctgatcgtgcaccagagaacccacaccggcgagaagccctacgtgtgcaacgagtgcggcaagagcttcagctacaagagaaacctgatcgtgcaccagagaacccacaagggcgagaacatcgagatgcagtag

SEQ ID NO: 10539 - DNA, 441 bp, synthetic construct
  source 1..441: mol_type = other DNA; note = Synthetic coding sequence
atgtgccacaccagctgcagcagcggctgccagcccgcctgctgcgcccccagcccctgccagcccgcctgctgcgtgcccagcagctgccaggccagctgctgcgtgcccgtgggctgccagagcagcgtgtgcgtgcccgtgagcttcaagcccgccgtgtgcctgcccgtgagctgccagagcagcgtgtgcgtgcccatgagcttcaagagcgccgtgtgcgtgcccgtgagctgccagagcagcgtgtgcgtgcccgtgagctgcagacccatcgtgtgcgccgcccccagctgccagagcagcctgtgcgtgcccgtgagctgcagacccgtggtgtacgccgcccccagctgccagagcagcggctgctgccagcccagctgcaccagcgtgctgtgcagacccatcagctacagcatcagcagctgctgctag

SEQ ID NO: 10540 - DNA, 1257 bp, synthetic construct; identical to SEQ ID NO: 10234
  source 1..1257: mol_type = other DNA; note = Synthetic coding sequence

SEQ ID NO: 10541 - DNA, 3351 bp, synthetic construct
  source 1..3351: mol_type = other DNA; note = Synthetic coding sequence
atgtacggcagcgccagaagcgtgggcaaggtggagcccagcagccagagccccggcagaagccccagactgcccagaagccccagactgggccacagaagaaccaacagcaccggcggcagcagcggcagcagcgtgggcggcggcagcggcaagaccctgagcatggagaacatccagagcctgaacgccgcctacgccaccagcggccccatgtacctgagcgaccacgagaacgtgggcagcgagacccccaagagcaccatgaccctgggcagaagcggcggcagactgccctacggcgtgagaatgaccgccatgggcagcagccccaacatcgccagcagcggcgtggccagcgacaccatcgccttcggcgagcaccacctgccccccgtgagcatggccagcaccgtgccccacagcctgagacaggccagagacaacaccatcatggacctgcagacccagctgaaggaggtgctgagagagaacgacctgctgagaaaggacgtggaggtgaaggagagcaagctgagcagcagcatgaacagcatcaagaccttctggagccccgagctgaagaaggagagagccctgagaaaggacgaggccagcaagatcaccatctggaaggagcagtacagagtggtgcaggaggagaaccagcacatgcagatgaccatccaggccctgcaggacgagctgagaatccagagagacctgaaccagctgttccagcaggacagcagcagcagaaccggcgagccctgcgtggccgagctgaccgaggagaacttccagagactgcacgccgagcacgagagacaggccaaggagctgttcctgctgagaaagaccctggaggagatggagctgagaatcgagacccagaagcagaccctgaacgccagagacgagagcatcaagaagctgctggagatgctgcagagcaagggcctgagcgccaaggccaccgaggaggaccacgagagaaccagaagactggccgaggccgagatgcacgtgcaccacctggagagcctgctggagcagaaggagaaggagaacagcatgctgagagaggagatgcacagaagattcgagaacgcccccgacagcgccaagaccaaggccctgcagaccgtgatcgagatgaaggacagcaagatcagcagcatggagagaggcctgagagacctggaggaggagatccagatgctgaagagcaacggcgccctgagcaccgaggagagagaggaggagatgaagcagatggaggtgtacagaagccacagcaagttcatgaagaacaaggtggagcagctgaaggaggagctgagcagcaaggaggcccagtgggaggagctgaagaagaaggccgccggcctgcaggccgagatcggccaggtgaagcaggagctgagcagaaaggacaccgagctgctggccctgcagaccaagctggagaccctgaccaaccagttcagcgacagcaagcagcacatcgaggtgctgaaggagagcctgaccgccaaggagcagagagccgccatcctgcagaccgaggtggacgccctgagactgagactggaggagaaggagaccatgctgaacaagaagaccaagcagatccaggacatggccgaggagaagggcacccaggccggcgagatccacgacctgaaggacatgctggacgtgaaggagagaaaggtgaacgtgctgcagaagaagatcgagaacctgcaggagcagctgagagacaaggagaagcagatgagcagcctgaaggagagagtgaagagcctgcaggccgacaccaccaacaccgacaccgccctgaccaccctggaggaggccctggccgagaaggagagaaccatcgagagactgaaggagcagagagacagagacgagagagagaagcaggaggagatcgacaactacaagaaggacctgaaggacctgaaggagaaggtgagcctgctgcagggcgacctgagcgagaaggaggccagcctgctggacctgaaggagcacgccagcagcctggccagcagcggcctgaagaaggacagcagactgaagaccctggagatcgccctggagcagaagaaggaggagtgcctgaagatggagagccagctgaagaaggcccacgaggccgccctggaggccagagccagccccgagatgagcgacagaatccagcacctggagagagagatcaccagatacaaggacgagagcagcaaggcccaggccgaggtggacagactgctggagatcctgaaggaggtggagaacgagaagaacgacaaggacaagaagatcgccgagctggagagacaggtgaaggaccagaacaagaaggtggccaacctgaagcacaaggagcaggtggagaagaagaagagcgcccagatgctggaggaggccagaagaagagaggacaacctgaacgacagcagccagcagctgcaggacagcctgagaaagaaggacgacagaatcgaggagctggaggaggccctgagagagagcgtgcagatcaccgccgagagagagatggtgctggcccaggaggagagcgccagaaccaacgccgagaagcaggtggaggagctgctgatggccatggagaaggtgaagcaggagctggagagcatgaaggccaagctgagcagcacccagcagagcctggccgagaaggagacccacctgaccaacctgagagccgagagaagaaagcacctggaggaggtgctggagatgaagcaggaggccctgctggccgccatcagcgagaaggacgccaacatcgccctgctggagctgagcagcagcaagaagaagacccaggaggaggtggccgccctgaagagagagaaggacagactggtgcagcagctgaagcagcagacccagaacagaatgaagctgatggccgacaactacgaggacgaccacttcaagagcagccacagcaaccagaccaaccacaagcccagccccgaccagatcatccagcccctgctggagctggaccagaacagaagcaagctgaagctgtacatcggccacctgaccaccctgtgccacgacagagaccccctgatcctgagaggcctgaccccccccgccagctacaacctggacgacgaccaggccgcctgggagaacgagctgcagaagatgaccagaggccagctgcaggacgagctggagaagggcgagagagacaacgccgagctgcaggagttcgccaacgccatcctgcagcagatcgccgaccactgccccgacatcctggagcaggtggtgaacgccctggaggagagcagctag

SEQ ID NO: 10542 - DNA, 3075 bp, synthetic construct
  source 1..3075: mol_type = other DNA; note = Synthetic coding sequence
atgaacttcatcaaggacaacagcagagccctgatccagagaatgggcatgaccgtgatcaagcagatcaccgacgacctgttcgtgtggaacgtgctgaacagagaggaggtgaacatcatctgctgcgagaaggtggagcaggacgccgccagaggcatcatccacatgatcctgaagaagggcagcgagagctgcaacctgttcctgaagagcctgaaggagtggaactaccccctgttccaggacctgaacggccagagcctgttccaccagaccagcgagggcgacctggacgacctggcccaggacctgaaggacctgtaccacacccccagcttcctgaacttctaccccctgggcgaggacatcgacatcatcttcaacctgaagagcaccttcaccgagcccgtgctgtggagaaaggaccagcaccaccacagagtggagcagctgaccctgaacggcctgctgcaggccctgcagagcccctgcatcatcgagggcgagagcggcaagggcaagagcaccctgctgcagagaatcgccatgctgtggggcagcggcaagtgcaaggccctgaccaagttcaagttcgtgttcttcctgagactgagcagagcccagggcggcctgttcgagaccctgtgcgaccagctgctggacatccccggcaccatcagaaagcagaccttcatggccatgctgctgaagctgagacagagagtgctgttcctgctggacggctacaacgagttcaagccccagaactgccccgagatcgaggccctgatcaaggagaaccacagattcaagaacatggtgatcgtgaccaccaccaccgagtgcctgagacacatcagacagttcggcgccctgaccgccgaggtgggcgacatgaccgaggacagcgcccaggccctgatcagagaggtgctgatcaaggagctggccgagggcctgctgctgcagatccagaagagcagatgcctgagaaacctgatgaagacccccctgttcgtggtgatcacctgcgccatccagatgggcgagagcgagttccacagccacacccagaccaccctgttccacaccttctacgacctgctgatccagaagaacaagcacaagcacaagggcgtggccgccagcgacttcatcagaagcctggaccactgcggcgacctggccctggagggcgtgttcagccacaagttcgacttcgagctgcaggacgtgagcagcgtgaacgaggacgtgctgctgaccaccggcctgctgtgcaagtacaccgcccagagattcaagcccaagtacaagttcttccacaagagcttccaggagtacaccgccggcagaagactgagcagcctgctgaccagccacgagcccgaggaggtgaccaagggcaacggctacctgcagaagatggtgagcatcagcgacatcaccagcacctacagcagcctgctgagatacacctgcggcagcagcgtggaggccaccagagccgtgatgaagcacctggccgccgtgtaccagcacggctgcctgctgggcctgagcatcgccaagagacccctgtggagacaggagagcctgcagagcgtgaagaacaccaccgagcaggagatcctgaaggccatcaacatcaacagcttcgtggagtgcggcatccacctgtaccaggagagcaccagcaagagcgccctgagccaggagttcgaggccttcttccagggcaagagcctgtacatcaacagcggcaacatccccgactacctgttcgacttcttcgagcacctgcccaactgcgccagcgccctggacttcatcaagctggacttctacggcggcgccatggccagctgggagaaggccgccgaggacaccggcggcatccacatggaggaggcccccgagacctacatccccagcagagccgtgagcctgttcttcaactggaagcaggagttcagaaccctggaggtgaccctgagagacttcagcaagctgaacaagcaggacatcagatacctgggcaagatcttcagcagcgccaccagcctgagactgcagatcaagagatgcgccggcgtggccggcagcctgagcctggtgctgagcacctgcaagaacatctacagcctgatggtggaggccagccccctgaccatcgaggacgagagacacatcaccagcgtgaccaacctgaagaccctgagcatccacgacctgcagaaccagagactgcccggcggcctgaccgacagcctgggcaacctgaagaacctgaccaagctgatcatggacaacatcaagatgaacgaggaggacgccatcaagctggccgagggcctgaagaacctgaagaagatgtgcctgttccacctgacccacctgagcgacatcggcgagggcatggactacatcgtgaagagcctgagcagcgagccctgcgacctggaggagatccagctggtgagctgctgcctgagcgccaacgccgtgaagatcctggcccagaacctgcacaacctggtgaagctgagcatcctggacctgagcgagaactacctggagaaggacggcaacgaggccctgcacgagctgatcgacagaatgaacgtgctggagcagctgaccgccctgatgctgccctggggctgcgacgtgcagggcagcctgagcagcctgctgaagcacctggaggaggtgccccagctggtgaagctgggcctgaagaactggagactgaccgacaccgagatcagaatcctgggcgccttcttcggcaagaaccccctgaagaacttccagcagctgaacctggccggcaacagagtgagcagcgacggctggctggccttcatgggcgtgttcgagaacctgaagcagctggtgttcttcgacttcagcaccaaggagttcctgcccgaccccgccctggtgagaaagctgagccaggtgctgagcaagctgaccttcctgcaggaggccagactggtgggctggcagttcgacgacgacgacctgagcgtgatcaccggcgccttcaagctggtgaccgcctag

SEQ ID NO: 10543 - DNA, 1065 bp, synthetic construct
  source 1..1065: mol_type = other DNA; note = Synthetic coding sequence
atggccgagagccccaccgaggaggccgccaccgccggcgccggcgccgccggccccggcgccagcagcgtggccggcgtggtgggcgtgagcggcagcggcggcggcttcggcccccccttcctgcccgacgtgtgggccgccgccgccgccgccggcggcgccggcggccccggcagcggcctggcccccctgcccggcctgccccccagcgccgccgcccacggcgccgccctgctgagccactgggaccccaccctgagcagcgactgggacggcgagagaaccgccccccagtgcctgctgagaatcaagagagacatcatgagcatctacaaggagcccccccccggcatgttcgtggtgcccgacaccgtggacatgaccaagatccacgccctgatcaccggccccttcgacaccccctacgagggcggcttcttcctgttcgtgttcagatgcccccccgactaccccatccacccccccagagtgaagctgatgaccaccggcaacaacaccgtgagattcaaccccaacttctacagaaacggcaaggtgtgcctgagcatcctgggcacctggaccggccccgcctggagccccgcccagagcatcagcagcgtgctgatcagcatccagagcctgatgaccgagaacccctaccacaacgagcccggcttcgagcaggagagacaccccggcgacagcaagaactacaacgagtgcatcagacacgagaccatcagagtggccgtgtgcgacatgatggagggcaagtgcccctgccccgagcccctgagaggcgtgatggagaagagcttcctggagtactacgacttctacgaggtggcctgcaaggacagactgcacctgcagggccagaccatgcaggaccccttcggcgagaagagaggccacttcgactaccagagcctgctgatgagactgggcctgatcagacagaaggtgctggagagactgcacaacgagaacgccgagatggacagcgacagcagcagcagcggcaccgagaccgacctgcacggcagcctgagagtgtag

SEQ ID NO: 10544 - DNA, 2487 bp, synthetic construct
  source 1..2487: mol_type = other DNA; note = Synthetic coding sequence
atggacagcgaggccttccagagcgccagagacttcctggacatgaacttccagagcctggccatgaagcacatggacctgaagcagatggagctggacaccgccgccgccaaggtggacgagctgaccaagcagctggagagcctgtggagcgacagccccgccccccccggcccccaggccggcccccccagcagaccccccagatacagcagcagcagcatccccgagcccttcggcagcagaggcagccccagaaaggccgccaccgacggcgccgacacccccttcggcagaagcgagagcgcccccaccctgcacccctacagccccctgagccccaagggcagacccagcagccccagaacccccctgtacctgcagcccgacgcctacggcagcctggacagagccaccagccccagacccagagccttcgacggcgccggcagcagcctgggcagagcccccagccccagacccggccccggccccctgagacagcagggcccccccacccccttcgacttcctgggcagagccggcagccccagaggcagccccctggccgagggcccccaggccttcttccccgagagaggccccagccccagaccccccgccaccgcctacgacgcccccgccagcgccttcggcagcagcctgctgggcagcggcggcagcgccttcgccccccccctgagagcccaggacgacctgaccctgagaagaagaccccccaaggcctggaacgagagcgacctggacgtggcctacgagaagaagcccagccagaccgccagctacgagagactggacgtgttcgccagacccgccagccccagcctgcagctgctgccctggagagagagcagcctggacggcctgggcggcaccggcaaggacaacctgaccagcgccaccctgcccagaaactacaaggtgagccccctggccagcgacagaagaagcgacgccggcagctacagaagaagcctgggcagcgccggccccagcggcaccctgcccagaagctggcagcccgtgagcagaatccccatgccccccagcagcccccagcccagaggcgcccccagacagagacccatccccctgagcatgatcttcaagctgcagaacgccttctgggagcacggcgccagcagagccatgctgcccggcagccccctgttcaccagagcccccccccccaagctgcagccccagccccagccccagccccagccccagagccagccccagccccagctgcccccccagccccagacccagccccagacccccacccccgccccccagcacccccagcagacctggccccccgtgaacgagggcccccccaagccccccaccgagctggagcccgagcccgagatcgagggcctgctgacccccgtgctggaggccggcgacgtggacgagggccccgtggccagacccctgagccccaccagactgcagcccgccctgccccccgaggcccagagcgtgcccgagctggaggaggtggccagagtgctggccgagatccccagacccctgaagagaagaggcagcatggagcaggcccccgccgtggccctgccccccacccacaagaagcagtaccagcagatcatcagcagactgttccacagacacggcggccccggccccggcggccccgagcccgagctgagccccatcaccgagggcagcgaggccagagccggcccccccgcccccgccccccccgcccccatccccccccccgcccccagccagagcagcccccccgagcagccccagagcatggagatgagaagcgtgctgagaaaggccggcagccccagaaaggccagaagagccagactgaaccccctggtgctgctgctggacgccgccctgaccggcgagctggaggtggtgcagcaggccgtgaaggagatgaacgaccccagccagcccaacgaggagggcatcaccgccctgcacaacgccatctgcggcgccaactacagcatcgtggacttcctgatcaccgccggcgccaacgtgaacagccccgacagccacggctggacccccctgcactgcgccgccagctgcaacgacaccgtgatctgcatggccctggtgcagcacggcgccgccatcttcgccaccaccctgagcgacggcgccaccgccttcgagaagtgcgacccctacagagagggctacgccgactgcgccacctacctggccgacgtggagcagagcatgggcctgatgaacagcggcgccgtgtacgccctgtgggactacagcgccgagttcggcgacgagctgagcttcagagagggcgagagcgtgaccgtgctgagaagagacggccccgaggagaccgactggtggtgggccgccctgcacggccaggagggctacgtgcccagaaactacttcggcctgttccccagagtgaagccccagagaagcaaggtgtag

SEQ ID NO: 10545 - DNA, 1131 bp, synthetic construct
  source 1..1131: mol_type = other DNA; note = Synthetic coding sequence
atggtggtggaggtggacagcatgcccgccgccagcagcgtgaagaagcccttcggcctgagaagcaagatgggcaagtggtgctgcagatgcttcccctgctgcagagagagcggcaagagcaacgtgggcaccagcggcgaccacgacgacagcgccatgaagaccctgagaagcaagatgggcaagtggtgcagacactgcttcccctgctgcagaggcagcggcaagagcaacgtgggcgccagcggcgaccacgacgacagcgccatgaagaccctgagaaacaagatgggcaagtggtgctgccactgcttcccctgctgcagaggcagcagcaagagcaaggtgggcgcctggggcgactacgacgacagcgccttcatggagcccagataccacgtgagaggcgaggacctggacaagctgcacagagccgcctggtggggcaaggtgcccagaaaggacctgatcgtgatgctgagagacaccgacgtgaacaagcaggacaagcagaagagaaccgccctgcacctggccagcgccaacggcaacagcgaggtggtgaagctgctgctggacagaagatgccagctgaacgtgctggacaacaagaagagaaccgccctgatcaaggccgtgcagtgccaggaggacgagtgcgccctgatgctgctggagcacggcaccgaccccaacatccccgacgagtacggcaacaccaccctgcactacgccatctacaacgaggacaagctgatggccaaggccctgctgctgtacggcgccgacatcgagagcaagaacaagcacggcctgacccccctgctgctgggcgtgcacgagcagaagcagcaggtggtgaagttcctgatcaagaagaaggccaacctgaacgccctggacagatacggcagaaccgccctgatcctggccgtgtgctgcggcagcgccagcatcgtgagcctgctgctggagcagaacatcgacgtgagcagccaggacctgagcggccagaccgccagagagtacgccgtgagcagccaccaccacgtgatctgccagctgctgagcgactacaaggagaagcagatgctgaagatcagcagcgagaacagcaaccccggctag

SEQ ID NO: 10546 - DNA, 765 bp, synthetic construct
  source 1..765: mol_type = other DNA; note = Synthetic coding sequence
atgcccgccagcttccccatgctgagatgcgccagaagcccctgctggaccgtgtgctggagcccctggtgcagagccctgcccgacggcagatgcagctgcctgagcagcccccccagccccctgggccccaccagagaccccgtggccaccttcctggagacctgcagagagcccggcagccagcccgccggccccgccagcctgagagccgagtacctgccccccagcgtggccagcatcaaggtgagcgccgagctgctgagagccgccctgaaggacggccacagcggcgtgcccctgtgctgcgccaccctgcagtggctgctggccgagaacgccgccgtggacgtggtgagagccagagccctgagcagcatccagggcgtggcccccgacggcgccaacgtgcacctgatcgtgagagaggtggccatgaccgacctgtgccccgccggccccatccaggccgtggagatccaggtggagagcagcagcctggccgacatctgcagagcccaccacgccgtggtgggcagaatgcagaccatggtgaccgagcaggccacccagggcagcagcgcccccgacctgagagtgcagtacctgagacagatccacgccaaccacgagaccctgctgagagaggtgcagaccctgagagacagactgtgcaccgaggacgaggccagcagctgcgccaccgcccagagactgctgcaggtgtacagacagctgagacaccccagcctgatcctgctgtag

SEQ ID NO: 10547 - DNA, 2046 bp, synthetic construct
  source 1..2046: mol_type = other DNA; note = Synthetic coding sequence
atgtgcggcatcttcgcctacctgaactaccacgtgcccagaaccagaagagagatcctggagaccctgatcaagggcctgcagagactggagtacagaggctacgacagcgccggcgtgggcttcgacggcggcaacgacaaggactgggaggccaacgcctgcaagatccagctgatcaagaagaagggcaaggtgaaggccctggacgaggaggtgcacaagcagcaggacatggacctggacatcgagttcgacgtgcacctgggcatcgcccacaccagatgggccacccacggcgagcccagccccgtgaacagccacccccagagaagcgacaagaacaacgagttcatcgtgatccacaacggcatcatcaccaactacaaggacctgaagaagttcctggagagcaagggctacgacttcgagagcgagaccgacaccgagaccatcgccaagctggtgaagtacatgtacgacaacagagagagccaggacaccagcttcaccaccctggtggagagagtgatccagcagctggagggcgccttcgccctggtgttcaagagcgtgcacttccccggccaggccgtgggcaccagaagaggcagccccctgctgatcggcgtgagaagcgagcacaagctgagcaccgaccacatccccatcctgtacagaaccggcaaggacaagaagggcagctgcaacctgagcagagtggacagcaccacctgcctgttccccgtggaggagaaggccgtggagtactacttcgccagcgacgccagcgccgtgatcgagcacaccaacagagtgatcttcctggaggacgacgacgtggccgccgtggtggacggcagactgagcatccacagaatcaagagaaccgccggcgaccaccccggcagagccgtgcagaccctgcagatggagctgcagcagatcatgaagggcaacttcagcagcttcatgcagaaggagatcttcgagcagcccgagagcgtggtgaacaccatgagaggcagagtgaacttcgacgactacaccgtgaacctgggcggcctgaaggaccacatcaaggagatccagagatgcagaagactgatcctgatcgcctgcggcaccagctaccacgccggcgtggccaccagacaggtgctggaggagctgaccgagctgcccgtgatggtggagctggccagcgacttcctggacagaaacacccccgtgttcagagacgacgtgtgcttcttcctgagccagagcggcgagaccgccgacaccctgatgggcctgagatactgcaaggagagaggcgccctgaccgtgggcatcaccaacaccgtgggcagcagcatcagcagagagaccgactgcggcgtgcacatcaacgccggccccgagatcggcgtggccagcaccaaggcctacaccagccagttcgtgagcctggtgatgttcgccctgatgatgtgcgacgacagaatcagcatgcaggagagaagaaaggagatcatgctgggcctgaagagactgcccgacctgatcaaggaggtgctgagcatggacgacgagatccagaagctggccaccgagctgtaccaccagaagagcgtgctgatcatgggcagaggctaccactacgccacctgcctggagggcgccctgaagatcaaggagatcacctacatgcacagcgagggcatcctggccggcgagctgaagcacggccccctggccctggtggacaagctgatgcccgtgatcatgatcatcatgagagaccacacctacgccaagtgccagaacgccctgcagcaggtggtggccagacagggcagacccgtggtgatctgcgacaaggaggacaccgagaccatcaagaacaccaagagaaccatcaaggtgccccacagcgtggactgcctgcagggcatcctgagcgtgatccccctgcagctgctggccttccacctggccgtgctgagaggctacgacgtggacttccccagaaacctggccaagagcgtgaccgtggagtag

SEQ ID NO: 10548 - DNA, 498 bp, synthetic construct
  source 1..498: mol_type = other DNA; note = Synthetic coding sequence
atggaggacctgttcgagaccttccaggacgagatgggcttcagcaacatggaggacgacggccccgaggaggaggagagagtggccgagccccaggccaacttcaacaccccccaggccctgagattcgaggagctgctggccaacctgctgaacgagcagcaccagatcgccaaggagctgttcgagcagctgaagatgaagaagcccagcgccaagcagcagaaggaggtggagaaggtgaagccccagtgcaaggaggtgcaccagaccctgatcctggaccccgcccagagaaagagactgcagcagcagatgcagcagcacgtgcagctgctgacccagatccacctgctggccacctgcaaccccaacctgaaccccgaggccagcagcaccagaatctgcctgagctgggagcccctgctgaaggcccccagccccttcaccatcagcaccacccccagcttcagaccctgcagcaaccccgtgacctag

SEQ ID NO: 10549 - DNA, 633 bp, synthetic construct
  source 1..633: mol_type = other DNA; note = Synthetic coding sequence
atggccgccagcgtggagcagagagagggcaccatccaggtgcagggccaggccctgttcttcagagaggccctgcccggcagcggccaggccagattcagcgtgctgctgctgcacggcatcagattcagcagcgagacctggcagaacctgggcaccctgcacagactggcccaggccggctacagagccgtggccatcgacctgcccggcctgggccacagcaaggaggccgccgcccccgcccccatcggcgagctggcccccggcagcttcctggccgccgtggtggacgccctggagctgggcccccccgtggtgatcagccccagcctgagcggcatgtacagcctgcccttcctgaccgcccccggcagccagctgcccggcttcgtgcccgtggcccccatctgcaccgacaagatcaacgccgccaactacgccagcgtgaagacccccgccctgatcgtgtacggcgaccaggaccccatgggccagaccagcttcgagcacctgaagcagctgcccaaccacagagtgctgatcatgaagggcgccggccacccctgctacctggacaagcccgaggagtggcacaccggcctgctggacttcctgcagggcctgcagtag

SEQ ID NO: 10550 - DNA, 1248 bp, synthetic construct
  source 1..1248: mol_type = other DNA; note = Synthetic coding sequence
atgagagccgccgacagcggcagctgggagagagtgagacagctggccgcccagggcgagcccgcccccagctgcggcgccggcgccggccccgccagaccccccggccccgccgcctgcgagcagtgcgtggacgccgccggccccggcgacagacccagagccggcgtgcccagagtgagagccgacggcgactgcagccagcccgtgctgctgagagaggaggtgagcagactgcaggaggaggtgcacctgctgagacagatgaaggagatgctggccaaggacctggaggagagccagggcggcaagagcagcgaggtgctgagcgccaccgagctgagagtgcagctggcccagaaggagcaggagctggccagagccaaggaggccctgcaggccatgaaggccgacagaaagagactgaagggcgagaagaccgacctggtgagccagatgcagcagctgtacgccaccctggagagcagagaggagcagctgagagacttcatcagaaactacgagcagcacagaaaggagagcgaggacgccgtgaaggccctggccaaggagaaggacctgctggagagagagaagtgggagctgagaagacaggccaaggaggccaccgaccacgccaccgccctgagaagccagctggacctgaaggacaacagaatgaaggagctggaggccgagctggccatggccaagcagagcctggccaccctgaccaaggacgtgcccaagagacacagcctggccatgcccggcgagaccgtgctgaacggcaaccaggagtgggtggtgcaggccgacctgcccctgaccgccgccatcagacagagccagcagaccctgtaccacagccaccccccccaccccgccgacagacaggccgtgagagtgagcccctgccacagcagacagcccagcgtgatcagcgacgccagcgccgccgagggcgacagaagcagcacccccagcgacatcaacagccccagacacagaacccacagcctgtgcaacggcgacagccccggccccgtgcagaagaacctgcacaaccccatcgtgcagagcctggaggacctggaggaccagaagagaaagaagaagaaggagaagatgggcttcggcagcatcagcagagtgttcgccagaggcaagcagagaaagagcctggaccccggcctgttcgacggcaccgcccccgactactacatcgaggaggacgccgactggtag

SEQ ID NO: 10551 - DNA, 693 bp, synthetic construct
  source 1..693: mol_type = other DNA; note = Synthetic coding sequence
atggaggccgccgagaccgaggccgaggccgccgccctggaggtgctggccgaggtggccggcatcctggagcccgtgggcctgcaggaggaggccgagctgcccgccaagatcctggtggagttcgtggtggacagccagaagaaggacaagctgctgtgcagccagctgcaggtggccgacttcctgcagaacatcctggcccaggaggacaccgccaagggcctggaccccctggccagcgaggacaccagcagacagaaggccatcgccgccaaggagcagtggaaggagctgaaggccacctacagagagcacgtggaggccatcaagatcggcctgaccaaggccctgacccagatggaggaggcccagagaaagagaacccagctgagagaggccttcgagcagctgcaggccaagaagcagatggccatggagaagagaagagccgtgcagaaccagtggcagctgcagcaggagaagcacctgcagcacctggccgaggtgagcgccgagggcaagctgctgttccccgaggccgaggccgaggccgagaacctgcccgacgacaagccccagcagcccaccagaccccaggagcagagcaccggcgacaccatgggcagagaccccggcgtgagcttcaaggccgtgggcctgcagcccgccggcgacgtgaacctgccctag

SEQ ID NO: 10552 - DNA, 2547 bp, synthetic construct
  source 1..2547: mol_type = other DNA; note = Synthetic coding sequence
atgcaggccgaggccgccgactggttcagcagcatgcccttccagaagcacgtgtactaccccctggccagcggccccgagggccccgacgtggccgtggccgccgccgccgccggcgccgccagcatggcctgcgccccccccagcgccgccagcggccccctgcccttcttccagttcagacccagactggagagcgtggactggagaagactgagcgccatcgacgtggacaaggtggccggcgccgtggacgtgctgaccctgcaggagaacatcatgaacatcaccttctgcaagctggaggacgagaagtgcccccactgccagagcggcgtggaccccgtgctgctgaagctgatcagactggcccagttcaccatcgagtacctgctgcacagccaggagttcctgaccagccagctgcacaccctggaggagagactgagactgagccactgcgacggcgagcagagcaagaagctgctgaccaagcaggccggcgagatcaagaccctgaaggaggagtgcaagagaagaaagaagatgatcagcacccagcagctgatgatcgaggccaaggccaactactaccagtgccacttctgcgacaaggccttcatgaaccaggccttcctgcagagccacatccagagaagacacaccgaggagaacagccacttcgagtaccagaagaacgcccagatcgagaagctgagaagcgagatcgtggtgctgaaggaggagctgcagctgaccagaagcgagctggaggccgcccaccacgccagcgccgtgagattcagcaaggagtacgagatgcagaagaccaaggaggaggacttcctgaagctgttcgacagatggaaggaggaggagaaggagaagctggtggacgagatggagaaggtgaaggagatgttcatgaaggagttcaaggagctgaccagcaagaacagcgccctggagtaccagctgagcgagatccagaagagcaacatgcagatcaagagcaacatcggcaccctgaaggacgcccacgagttcaaggaggacagaagcccctacccccaggacttccacaacgtgatgcagctgctggacagccaggagagcaagtggaccgccagagtgcaggccatccaccaggagcacaagaaggagaagggcagactgctgagccacatcgagaagctgagaaccagcatgatcgacgacctgaacgccagcaacgtgttctacaagaagagaatcgaggagctgggccagagactgcaggagcagaacgagctgatcatcacccagagacagcagatcaaggacttcacctgcaaccccctgaacagcatcagcgagcccaaggtgaacgcccccgccctgcacaccctggagaccaagagcagcctgcccatggtgcacgagcaggccttcagcagccacatcctggagcccatcgaggagctgagcgaggaggagaagggcagagagaacgagcagaagctgaacaacaacaagatgcacctgagaaaggccctgaagagcaacagcagcctgaccaagggcctgagaaccatggtggagcagaacctgatggagaagctggagaccctgggcatcaacgccgacatcagaggcatcagcagcgaccagctgcacagagtgctgaagagcgtggagagcgagagacacaagcaggagagagagatccccaacttccaccagatcagagagttcctggagcaccaggtgagctgcaagatcgaggagaaggccctgctgagcagcgaccagtgcagcgtgagccagatggacaccctgagcaccggcgaggtgcccaagatgatccagctgcccagcaagaacagacagctgatcagacagaaggccgtgagcaccgacagaaccagcgtgcccaagatcaagaagaacgtgatggaggaccccttccccagaaagagcagcaccatcaccaccccccccttcagcagcgaggaggagcaggaggacgacgacctgatcagagcctacgccagccccggccccctgcccgtgccccccccccagaacaagggcagcttcggcaagaacaccgtgaagagcgacgccgacggcaccgagggcagcgagatcgaggacaccgacgacagccccaagcccgccggcgtggccgtgaagacccccaccgagaaggtggagaagatgttcccccacagaaagaacgtgaacaagcccgtgggcggcaccaacgtgcccgagatgttcatcaagaaggaggagctgcaggagctgaagtgcgccgacgtggaggacgaggactgggacatcagcagcctggaggaggagatcagcctgggcaagaagagcggcaaggagcagaaggagcccccccccgccaagaacgagccccacttcgcccacgtgctgaacgcctggggcgccttcaaccccaagggccccaagggcgagggcctgcaggagaacgagagcagcaccctgaagagcagcctggtgaccgtgaccgactggagcgacaccagcgacgtgtag

SEQ ID NO: 10553 - DNA, 1185 bp, synthetic construct
  source 1..1185: mol_type = other DNA; note = Synthetic coding sequence
atggtggtggaggtggacagcatgcccgccgccagcagcgtgaagaagcccttcggcctgagaagcaagatgggcaagtggtgctgcagatgcttcccctgctgcagagagagcggcaagagcaacgtgggcaccagcggcgaccacgacgacagcgccatgaagaccctgagaagcaagatgggcaagtggtgcagacactgcttcccctgctgcagaggcagcggcaagagcaacgtgggcgccagcggcgaccacgacgacagcgccatgaagaccctgagaaacaagatgggcaagtggtgctgccactgcttcccctgctgcagaggcagcagcaagagcaaggtgggcgcctggggcgactacgacgacagcgccttcatggagcccagataccacgtgagaggcgaggacctggacaagctgcacagagccgcctggtggggcaaggtgcccagaaaggacctgatcgtgatgctgagagacaccgacgtgaacaagcaggacaagcagaagagaaccgccctgcacctggccagcgccaacggcaacagcgaggtggtgaagctgctgctggacagaagatgccagctgaacgtgctggacaacaagaagagaaccgccctgatcaaggtgtgcagcagccagctgtaccagcacgaggccgtgcagtgccaggaggacgagtgcgccctgatgctgctggagcacggcaccgaccccaacatccccgacgagtacggcaacaccaccctgcactacgccatctacaacgaggacaagctgatggccaaggccctgctgctgtacggcgccgacatcgagagcaagaacaagcacggcctgacccccctgctgctgggcgtgcacgagcagaagcagcaggtggtgaagttcctgatcaagaagaaggccaacctgaacgccctggacagatacggcagaaccgccctgatcctggccgtgtgctgcggcagcgccagcatcgtgagcctgctgctggagcagaacatcgacgtgagcagccaggacctgagcggccagaccgccagagagtacgccgtgagcagccaccaccacgtgatctgccagctgctgagcgactacaaggagaagcagatgctgaagatcagcagcgagaacagcaaccccgagaacgtgagcagaaccagaaacaagtag

SEQ ID NO: 10554 - DNA, 1308 bp, synthetic construct
  source 1..1308: mol_type = other DNA; note = Synthetic coding sequence
atggcccccttcggcagaaacctgctgaagaccagacacaagaacagaagccccaccaaggacatggacagcgaggagaaggagatcgtggtgtgggtgtgccaggaggagaagctggtgtgcggcctgaccaagagaaccaccagcgccgacgtgatccaggccctgctggaggagcacgaggccaccttcggcgagaagagattcctgctgggcaagcccagcgactactgcatcatcgagaagtggagaggcagcgagagagtgctgccccccctgaccagaatcctgaagctgtggaaggcctggggcgacgagcagcccaacatgcagttcgtgctggtgaaggccgacgccttcctgcccgtgcccctgtggagaaccgccgaggccaagctggtgcagaacaccgagaagctgtgggagctgagccccgccaactacatgaagaccctgccccccgacaagcagaagagaatcgtgagaaagaccttcagaaagctggccaagatcaagcaggacaccgtgagccacgacagagacaacatggagaccctggtgcacctgatcatcagccaggaccacaccatccaccagcaggtgaagagaatgaaggagctggacctggagatcgagaagtgcgaggccaagttccacctggacagagtggagaacgacggcgagaactacgtgcaggacgcctacctgatgcccagcttcagcgaggtggagcagaacctggacctgcagtacgaggagaaccagaccctggaggacctgagcgagagcgacggcatcgagcagctggaggagagactgaagtactacagaatcctgatcgacaagctgagcgccgagatcgagaaggaggtgaagagcgtgtgcatcgacatcaacgaggacgccgagggcgaggccgccagcgagctggagagcagcaacctggagagcgtgaagtgcgacctggagaagagcatgaaggccggcctgaagatccacagccacctgagcggcatccagaaggagatcaagtacagcgacagcctgctgcagatgaaggccaaggagtacgagctgctggccaaggagttcaacagcctgcacatcagcaacaaggacggctgccagctgaaggagaacagagccaaggagagcgaggtgcccagcagcaacggcgagatcccccccttcacccagagagtgttcagcaactacaccaacgacaccgacagcgacaccggcatcagcagcaaccacagccaggacagcgagaccaccgtgggcgacgtggtgctgctgagcacctag

SEQ ID NO: 10555 - DNA, 1644 bp, synthetic construct
  source 1..1644: mol_type = other DNA; note = Synthetic coding sequence
atggccggcaccaagaacaagaccagagcccaggccaagaccgagaagaaggccgccatccaggccaaggccggcgccgagagagaggccaccggcgtggtgagacccgtggccaagaccagagccaaggccaaggccaagaccggcagcaagaccgacgccgtggccgagatgaaggccgtgagcaagaacaaggtggtggccgagaccaaggagggcgccctgagcgagcccaagaccctgggcaaggccatgggcgacttcacccccaaggccggcaacgagagcaccagcagcacctgcaagaacgaggccggcaccgacgcctggttctgggccggcgaggaggccaccatcaacagctggttctggaacggcgaggaggccggcaacagcttcagcaccaagaacgacaagcccgagatcggcgcccaggtgtgcgccgaggagctggagcccgccgccggcgccgactgcaagcccagaagcggcgccgaggaggaggaggaggagaacgtgatcggcaactggttctgggagggcgacgacaccagcttcgaccccaaccccaagcccgtgagcagaatcgtgaagccccagcccgtgtacgagatcaacgagaagaacagacccaaggactggagcgaggtgaccatctggcccaacgcccccgccgtgacccccgccgtgctgggcttcagaagccaggcccccagcgaggccagcccccccagctacatcgtgctggccagcgccgaggagaacgcctgcagcctgcccgtggccaccgcctgcagacccagcagaaacaccagaagctgcagccagcccatccccgagtgcagattcgacagcgacccctgcatccagaccatcgacgagatcagaagacagatcagaatcagagaggtgaacggcatcaagcccttcgcctgcccctgcaagatggagtgctacatggacagcgaggagttcgagaagctggtgagcctgctgaagagcaccaccgaccccctgatccacaagatcgccagaatcgccatgggcgtgcacaacgtgcaccccttcgcccaggagttcatcaacgaggtgggcgtggtgaccctgatcgagagcctgctgagcttccccagccccgagatgagaaagaagaccgtgatcaccctgaacccccccagcggcgacgagagacagagaaagatcgagctgcacgtgaagcacatgtgcaaggagaccatgagcttccccctgaacagccccggccagcagagcggcctgaagatcctgggccagctgaccaccgacttcgtgcaccactacatcgtggccaactacttcagcgagctgttccacctgctgagcagcggcaactgcaagaccagaaacctggtgctgaagctgctgctgaacatgagcgagaaccccaccgccgccagagacatgatcaacatgaaggccctggccgccctgaagctgatcttcaaccagaaggaggccaaggccaacctggtgagcggcgtggccatcttcatcaacatcaaggagcacatcagaaagggcagcatcgtggtggtggaccacctgagctacaacaccctgatggccatcttcagagaggtgaaggagatcatcgagaccatgtag

SEQ ID NO: 10556 - DNA, 1362 bp, synthetic construct
  source 1..1362: mol_type = other DNA; note = Synthetic coding sequence
atggccagaaaggtggtgagcagaaagagaaaggcccccgccagccccggcgccggcagcgacgcccagggcccccagttcggctgggaccacagcctgcacaagagaaagagactgccccccgtgaagagaagcctggtgtactacctgaagaacagagaggtgagactgcagaacgagaccagctacagcagagtgctgcacggctacgccgcccagcagctgcccagcctgctgaaggagagagagttccacctgggcaccctgaacaaggtgttcgccagccagtggctgaaccacagacaggtggtgtgcggcaccaagtgcaacaccctgttcgtggtggacgtgcagaccagccagatcaccaagatccccatcctgaaggacagagagcccggcggcgtgacccagcagggctgcggcatccacgccatcgagctgaaccccagcagaaccctgctggccaccggcggcgacaaccccaacagcctggccatctacagactgcccaccctggaccccgtgtgcgtgggcgacgacggccacaaggactggatcttcagcatcgcctggatcagcgacaccatggccgtgagcggcagcagagacggcagcatgggcctgtgggaggtgaccgacgacgtgctgaccaagagcgacgccagacacaacgtgagcagagtgcccgtgtacgcccacatcacccacaaggccctgaaggacatccccaaggaggacaccaaccccgacaactgcaaggtgagagccctggccttcaacaacaagaacaaggagctgggcgccgtgagcctggacggctacttccacctgtggaaggccgagaacaccctgagcaagctgctgagcaccaagctgccctactgcagagagaacgtgtgcctggcctacggcagcgagtggagcgtgtacgccgtgggcagccaggcccacgtgagcttcctggaccccagacagcccagctacaacgtgaagagcgtgtgcagcagagagagaggcagcggcatcagaagcgtgagcttctacgagcacatcatcaccgtgggcaccggccagggcagcctgctgttctacgacatcagagcccagagattcctggaggagagactgagcgcctgctacggcagcaagcccagactggccggcgagaacctgaagctgaccaccggcaagggctggctgaaccacgacgagacctggagaaactacttcagcgacatcgacttcttccccaacgccgtgtacacccactgctacgacagcagcggcaccaagctgttcgtggccggcggccccctgcccagcggcctgcacggcaactacgccggcctgtggagctag

SEQ ID NO: 10557 - DNA, 2439 bp, synthetic construct
  source 1..2439: mol_type = other DNA; note = Synthetic coding sequence
atggaggccttccaggagctgagaaagcccagcgccagactggagtgcgaccactgcagcttcagaggcaccgactacgagaacgtgcagatccacatgggcaccatccaccccgagttctgcgacgagatggacgccggcggcctgggcaagatgatcttctaccagaagagcgccaagctgttccactgccacaagtgcttcttcaccagcaagatgtacagcaacgtgtactaccacatcaccagcaagcacgccagccccgacaagtggaacgacaagcccaagaaccagctgaacaaggagaccgaccccgtgaagagcccccccctgcccgagcaccagaagatcccctgcaacagcgccgagcccaagagcatccccgccctgagcatggagacccagaagctgggcagcgtgctgagccccgagagccccaagcccacccccctgacccccctggagccccagaagcccggcagcgtggtgagccccgagctgcagacccccctgcccagccccgagcccagcaagcccgccagcgtgagcagccccgagccccccaagagcgtgcccgtgtgcgagagccagaagctggcccccgtgcccagccccgagccccagaagcccgcccccgtgagccccgagagcgtgaaggccaccctgagcaaccccaagccccagaagcagagccacttccccgagaccctgggcccccccagcgccagcagccccgagagccccgtgctggccgccagccccgagccctggggccccagccccgccgccagccccgagagcagaaagagcgccagaaccaccagccccgagcccagaaagcccagccccagcgagagccccgagccctggaagcccttccccgccgtgagccccgagcccagaagacccgcccccgccgtgagccccggcagctggaagcccggcccccccggcagccccagaccctggaagagcaaccccagcgccagcagcggcccctggaagcccgccaagcccgcccccagcgtgagccccggcccctggaagcccatccccagcgtgagccccggcccctggaagcccacccccagcgtgagcagcgccagctggaagagcagcagcgtgagccccagcagctggaagagcccccccgccagccccgagagctggaagagcggcccccccgagctgagaaagaccgcccccaccctgagccccgagcactggaaggccgtgccccccgtgagccccgagctgagaaagcccggcccccccctgagccccgagatcagaagccccgccggcagccccgagctgagaaagcccagcggcagccccgacctgtggaagctgagccccgaccagagaaagaccagccccgccagcctggacttccccgagagccagaagagcagcagaggcggcagccccgacctgtggaagagcagcttcttcatcgagccccagaagcccgtgttccccgagaccagaaagcccggccccagcggccccagcgagagccccaaggccgccagcgacatctggaagcccgtgctgagcatcgacaccgagcccagaaagcccgccctgttccccgagcccgccaagaccgccccccccgccagccccgaggccagaaagagagccctgttccccgagcccagaaagcacgccctgttccccgagctgcccaagagcgccctgttcagcgagagccagaaggccgtggagctgggcgacgagctgcagatcgacgccatcgacgaccagaagtgcgacatcctggtgcaggaggagctgctggccagccccaagaagctgctggaggacaccctgttccccagcagcaagaagctgaagaaggacaaccaggagagcagcgacgccgagctgagcagcagcgagtacatcaagaccgacctggacgccatggacatcaagggccaggagagcagcagcgaccaggagcaggtggacgtggagagcatcgacttcagcaaggagaacaagatggacatgaccagccccgagcagagcagaaacgtgctgcagttcaccgaggagaaggaggccttcatcagcgaggaggagatcgccaagtacatgaagagaggcaagggcaagtactactgcaagatctgctgctgcagagccatgaagaagggcgccgtgctgcaccacctggtgaacaagcacaacgtgcacagcccctacaagtgcaccatctgcggcaaggccttcctgctggagagcctgctgaagaaccacgtggccgcccacggccagagcctgctgaagtgccccagatgcaacttcgagagcaacttccccagaggcttcaagaagcacctgacccactgccagagcagacacaacgaggaggccaacaagaagctgatggaggccctggagccccccctggaggagcagcagatctag

SEQ ID NO: 10558 - DNA, 1974 bp, synthetic construct
  source 1..1974: mol_type = other DNA; note = Synthetic coding sequence
atggacgagcaggaggccctgaacagcatcatgaacgacctggtggccctgcagatgaacagaagacacagaatgcccggctacgagaccatgaagaacaaggacaccggccacagcaacagacagaagaagcacaacagcagcagcagcgccctgctgaacagccccaccgtgaccaccagcagctgcgccggcgccagcgagaagaagaagttcctgagcgacgtgagaatcaagttcgagcacaacggcgagagaagaatcatcgccttcagcagacccgtgaagtacgaggacgtggagcacaaggtgaccaccgtgttcggccagcccctggacctgcactacatgaacaacgagctgagcatcctgctgaagaaccaggacgacctggacaaggccatcgacatcctggacagaagcagcagcatgaagagcctgagaatcctgctgctgagccaggacagaaaccacaacagcagcagcccccacagcggcgtgagcagacaggtgagaatcaaggccagccagagcgccggcgacatcaacaccatctaccagccccccgagcccagaagcagacacctgagcgtgagcagccagaaccccggcagaagcagccccccccccggctacgtgcccgagagacagcagcacatcgccagacagggcagctacaccagcatcaacagcgagggcgagttcatccccgagaccagcgagcagtgcatgctggaccccctgagcagcgccgagaacagcctgagcggcagctgccagagcctggacagaagcgccgacagccccagcttcagaaagagcagaatgagcagagcccagagcttccccgacaacagacaggagtacagcgacagagagacccagctgtacgacaagggcgtgaagggcggcacctaccccagaagataccacgtgagcgtgcaccacaaggactacagcgacggcagaagaaccttccccagaatcagaagacaccagggcaacctgttcaccctggtgcccagcagcagaagcctgagcaccaacggcgagaacatgggcctggccgtgcagtacctggaccccagaggcagactgagaagcgccgacagcgagaacgccctgagcgtgcaggagagaaacgtgcccaccaagagccccagcgcccccatcaactggagaagaggcaagctgctgggccagggcgccttcggcagagtgtacctgtgctacgacgtggacaccggcagagagctggccagcaagcaggtgcagttcgaccccgacagccccgagaccagcaaggaggtgagcgccctggagtgcgagatccagctgctgaagaacctgcagcacgagagaatcgtgcagtactacggctgcctgagagacagagccgagaagaccctgaccatcttcatggagtacatgcccggcggcagcgtgaaggaccagctgaaggcctacggcgccctgaccgagagcgtgaccagaaagtacaccagacagatcctggagggcatgagctacctgcacagcaacatgatcgtgcacagagacatcaagggcgccaacatcctgagagacagcgccggcaacgtgaagctgggcgacttcggcgccagcaagagactgcagaccatctgcatgagcggcaccggcatgagaagcgtgaccggcaccccctactggatgagccccgaggtgatcagcggcgagggctacggcagaaaggccgacgtgtggagcctgggctgcaccgtggtggagatgctgaccgagaagcccccctgggccgagtacgaggccatggccgccatcttcaagatcgccacccagcccaccaacccccagctgcccagccacatcagcgagcacggcagagacttcctgagaagaatcttcgtggaggccagacagagacccagcgccgaggagctgctgacccaccacttcgcccagctgatgtactag

SEQ ID NO: 10559 - DNA, 2547 bp, synthetic construct; identical to SEQ ID NO: 10552
  source 1..2547: mol_type = other DNA; note = Synthetic coding sequence

SEQ ID NO: 10560 - DNA, 4074 bp, synthetic construct
  source 1..4074: mol_type = other DNA; note = Synthetic coding sequence
atggccgacaccgacctgttcatggagtgcgaggaggaggagctggagccctggcagaagatcagcgacgtgatcgaggacagcgtggtggaggactacaacagcgtggacaagaccaccaccgccggcaaccccctggtgcagcagggcggccagcccctgatcctgacccagaaccccgcccccggcctgggcaccatggtgacccagcccgtgctgagacccgtgcaggtgatgcagaacgccaaccacgtgaccagcagccccgtggccagccagcccatcttcatcaccacccagggcttccccgtgagaaacgtgagacccgtgcagaacgccatgaaccaggtgggcatcgtgctgaacgtgcagcagggccagaccgtgagacccatcaccctggtgcccgcccccggcacccagttcgtgaagcccaccgtgggcgtgccccaggtgttcagccagatgacccccgtgagacccggcagcaccatgcccgtgagacccaccaccaacaccttcaccaccgtgatccccgccaccctgaccatcagaagcaccgtgccccagagccagagccagcagaccaagagcacccccagcaccagcaccacccccaccgccacccagcccaccagcctgggccagctggccgtgcagagccccggccagagcaaccagaccaccaaccccaagctggcccccagcttccccagcccccccgccgtgagcatcgccagcttcgtgaccgtgaagagacccggcgtgaccggcgagaacagcaacgaggtggccaagctggtgaacaccctgaacaccatccccagcctgggccagagccccggccccgtggtggtgagcaacaacagcagcgcccacggcagccagagaaccagcggccccgagagcagcatgaaggtgaccagcagcatccccgtgttcgacctgcaggacggcggcagaaagatctgccccagatgcaacgcccagttcagagtgaccgaggccctgagaggccacatgtgctactgctgccccgagatggtggagtaccagaagaagggcaagagcctggacagcgagcccagcgtgcccagcgccgccaagccccccagccccgagaagaccgcccccgtggccagcacccccagcagcacccccatccccgccctgagcccccccaccaaggtgcccgagcccaacgagaacgtgggcgacgccgtgcagaccaagctgatcatgctggtggacgacttctactacggcagagacggcggcaaggtggcccagctgaccaacttccccaaggtggccaccagcttcagatgcccccactgcaccaagagactgaagaacaacatcagattcatgaaccacatgaagcaccacgtggagctggaccagcagaacggcgaggtggacggccacaccatctgccagcactgctacagacagttcagcacccccttccagctgcagtgccacctggagaacgtgcacagcccctacgagagcaccaccaagtgcaagatctgcgagtgggccttcgagagcgagcccctgttcctgcagcacatgaaggacacccacaagcccggcgagatgccctacgtgtgccaggtgtgccagtacagaagcagcctgtacagcgaggtggacgtgcacttcagaatgatccacgaggacaccagacacctgctgtgcccctactgcctgaaggtgttcaagaacggcaacgccttccagcagcactacatgagacaccagaagagaaacgtgtaccactgcaacaagtgcagactgcagttcctgttcgccaaggacaagatcgagcacaagctgcagcaccacaagaccttcagaaagcccaagcagctggagggcctgaagcccggcaccaaggtgaccatcagagccagcagaggccagcccagaaccgtgcccgtgagcagcaacgacaccccccccagcgccctgcaggaggccgcccccctgaccagcagcatggaccccctgcccgtgttcctgtacccccccgtgcagagaagcatccagaagagagccgtgagaaagatgagcgtgatgggcagacagacctgcctggagtgcagcttcgagatccccgacttccccaaccacttccccacctacgtgcactgcagcctgtgcagatacagcacctgctgcagcagagcctacgccaaccacatgatcaacaaccacgtgcccagaaagagccccaagtacctggccctgttcaagaacagcgtgagcggcatcaagctggcctgcaccagctgcaccttcgtgaccagcgtgggcgacgccatggccaagcacctggtgttcaaccccagccacagaagcagcagcatcctgcccagaggcctgacctggatcgcccacagcagacacggccagaccagagacagagtgcacgacagaaacgtgaagaacatgtaccccccccccagcttccccaccaacaaggccgccaccgtgaagagcgccggcgccacccccgccgagcccgaggagctgctgacccccctggcccccgccctgcccagccccgccagcaccgccacccccccccccacccccacccacccccaggccctggccctgccccccctggccaccgagggcgccgagtgcctgaacgtggacgaccaggacgagggcagccccgtgacccaggagcccgagctggccagcggcggcggcggcagcggcggcgtgggcaagaaggagcagctgagcgtgaagaagctgagagtggtgctgttcgccctgtgctgcaacaccgagcaggccgccgagcacttcagaaacccccagagaagaatcagaagatggctgagaagattccaggccagccagggcgagaacctggagggcaagtacctgagcttcgaggccgaggagaagctggccgagtgggtgctgacccagagagagcagcagctgcccgtgaacgaggagaccctgttccagaaggccaccaagatcggcagaagcctggagggcggcttcaagatcagctacgagtgggccgtgagattcatgctgagacaccacctgaccccccacgccagaagagccgtggcccacaccctgcccaaggacgtggccgagaacgccggcctgttcatcgacttcgtgcagagacagatccacaaccaggacctgcccctgagcatgatcgtggccatcgacgagatcagcctgttcctggacaccgaggtgctgagcagcgacgacagaaaggagaacgccctgcagaccgtgggcaccggcgagccctggtgcgacgtggtgctggccatcctggccgacggcaccgtgctgcccaccctggtgttctacagaggccagatggaccagcccgccaacatgcccgacagcatcctgctggaggccaaggagagcggctacagcgacgacgagatcatggagctgtggagcaccagagtgtggcagaagcacaccgcctgccagagaagcaagggcatgctggtgatggactgccacagaacccacctgagcgaggaggtgctggccatgctgagcgccagcagcaccctgcccgccgtggtgcccgccggctgcagcagcaagatccagcccctggacgtgtgcatcaagagaaccgtgaagaacttcctgcacaagaagtggaaggagcaggccagagagatggccgacaccgcctgcgacagcgacgtgctgctgcagctggtgctggtgtggctgggcgaggtgctgggcgtgatcggcgactgccccgagctggtgcagagaagcttcctggtggccagcgtgctgcccggccccgacggcaacatcaacagccccaccagaaacgccgacatgcaggaggagctgatcgccagcctggaggagcagctgaagctgagcggcgagcacagcgagagcagcacccccagacccagaagcagccccgaggagaccatcgagcccgagagcctgcaccagctgttcgagggcgagagcgagaccgagagcttctacggcttcgaggaggccgacctggacctgatggagatctag

SEQ ID NO: 10561 - DNA, 2904 bp, synthetic construct
  source 1..2904: mol_type = other DNA; note = Synthetic coding sequence
atgggccccggccagcccgccagcacctgcgtgcacctggcccccagaacccagctggacggcagaagcgaccccaaggtgctgcagacccagaaccagctgcagttcaacagaaacgtgcccacccacagcagcaacctggccatcagatacagctgcccccacgccatcagaatcgagaagctgaagcacagctacaacgagagctaccactgcaaggacgccgactgcagagtgggccccgacctgggcagcagcgtgagcttcagcgtgatcagccaggagagactgagctacgccgtgcacctggccagaagagacgtgaagagaagacagttcgagaagcacatcaaggagcaccacctgagaagccagccccagagcagccagaagtgcggccacaccaagtacaagatccccgaccacagagtggagagaaaggagagcaagagccaggccgcctgccagtgcagccaccagcccagcaaggtggagatcagcagcagcggcgccaaggtgtacctgtacagcagccaccccggccagagcgacctgaccgtgcccaacagcccccccacccacgaccccggcctgcagccccaccccagaatcggcgaccacaagaacatcagcgagcagaagagcctgctggaggtgcagagactgcagaaggagctgagcagctgcatccacaagatcgaggaggtgaccaagaaggacagactggaggaggccctggaccccgacgaggagagaagaatcagaatcagaagacaggagcaggccgccagaagcgccagaatgctgtacgtgctgcagcagcaggtgaaggagatccaggaggagctggacaagctgagcccccacaagatcaagcacaccaagaagagctgggccatgagcaagctggccgccgcccacagaggcgccatcagagccctgcagatgttcgtgacccagttcaccgacagaggcgagcaccccctgcccgccagatgcaaggagctgggcagcctgatcagacagctgagcctgtgcagcgtgaagctggacgccgaccccagcgtgcccgacgtggtgatcgacatcctgcagcagatcgaggccctggagagcctgctggagaagaagctgagccccaagaaggtgaagaagtgcttcagcgagatcagaagcagattccccatcggcagccagaaggccctggagagatggcccagcaccagccccaagggcgagagaagacccctgaccgccaaggacaccttcccccaggagaccagcagacccagcgtggccaagcagctgctggccgacaagtaccagcccgacaccgagctgcccgagacccagagactgcagagcgagctggacgtgctggacgccgacatcgtgctggaggagggccccttcatcctggaccagagcgccagcttcaaggacgaggtgctggccgtggccaagaccaaggccggcaagaagaagcccgtgaccgagaacgtgcccttcagaaagaaggacaccctggcccccgccagacagcagggcctgagaaaggccgagagaggcagacagagccagccccacagcaagagcagagtgcagcagaccaccgtgagcagcagactgaagatgaacagacagcccgtgaaggacagaaaggccccctggatcccccccaaccccaccagcccccccgccagccccaagtgcgccgcctggctgaaggtgaagaccagccccagagacgccaccaaggagcccctgcagcaggaggacccccaggaggagagccacctgaccggcgccgtggagcacgaggccgccagactggcctggctggacgccgagaccagcaagagactgaaggagctggaggagctgaaggccaaggagatcgacagcatgcagaagcagagactggactggctggacgccgagaccagcagaagaaccaaggagctgaacgagctgaaggccgaggagatgtacagactgcagcagctgagcgtgagcgccacccacctggccgacaaggtggaggaggccgtgctggacagactgaagcccctgctggtgaaggcccagagagtgaacagcaccaccgaggccaacatccacctgaaggacggcagcagcgtgaacaccgccaaggcccagcccgcccaggaggtggccgccgtggacttcgagagcaacaacatcagacagctggacgacttcctggaggactgcgccagcgagctgtgggccgtgacccacgccaagatcctgggcagcgagaccctggccaccgtggaggacagcaaggacagccccgacctggagatcatgatgagaagaatggaggagatggagaagtaccaggagagcgtgagacagagatacaacaagatcgcctacgccgaccccagactgtggatgcaggaggagaacaacgaccagaagatcagcgccatcagcgagaagcccctgagcccccaccccatcagaatcaccaagaccgtggacagaaaggaccccgccgtgaacatcatgctggagagaccctgcaacggcaacagcctggacgagagcgtgggcaccgaggagggcagcgagaagagagaggcccccctgctgagcctggccgaggacagccagcagaaggagggcagagcccccctgttcgtgccccccggcatgcagcacagcatcggcgactactgcagcagattcgagcagtacctgagaatcatcagccacgaggccgtgggcagcttcaacccctggctgatcgccgagagcttcagcgaggagctggtggacgaggccctgggcgccgtggccgccgagctgcaggacatgtgcgaggactacgccgaggccgtgttcaccagcgagttcctggaggccgccacctag

SEQ ID NO: 10562 - DNA, 6840 bp, synthetic construct
  source 1..6840: mol_type = other DNA; note = Synthetic coding sequence
atgtacagaagcagcgccagaagcagcgtgagcagccacagacccaaggacgacggcggcggcggccccagaagcggcagaagcagcggcagcagcagcggccccgccagaagaagcagccccccccccccccccagcggcagcagcagcagaacccccgccagaagacccagaagccccagcggccacagaggcagaagagccagccccagcccccccagaggcagaagagtgagccccagcccccccagagccagaagaggcagccccagcccccccagaggcagaagactgttcccccccggccccgccggcttcagaggcagcagcagaggcgagagcagagccgactacgccagagacggcagaggcgaccaccccggcgacagcggcagcagaagaagaagccccggcctgtgcagcgacagcctggagaagagcctgagaatcaccgtgggcaacgaccacttctgcgtgagcacccccgagagaagaagactgagcgacagactgggcagccccgtggacaacctggaggacatggacagagacgacctgaccgacgacagcgtgttcaccagaagcagccagtgcagcagaggcctggagagatacatcagccaggaggagggccccctgagccccttcctgggccagctggacgaggactacagaaccaaggagaccttcctgcacagaagcgactacagcccccacatcagctgccacgacgagctgctgagaggcaccgagagaaacagagagaagctgaagggctacagcatcagaagcgaggagagaagcagagaggccaagagacccagatacgacgacaccgtgaagatcaacagcatgggcggcgaccaccccagcttcaccagcggcaccagaaactacagacagagaagaagaagccccagccccagattcctggaccccgagttcagagagctggacctggccagaagaaagagagaggaggaggaggagagaagcagaagcctgagccaggagctggtgggcgtggacggcggcggcaccggctgcagcatccccggcctgagcggcgtgctgaccgccagcgagcccggctacagcctgcacagacccgaggaggtgagcgtgatgcccaagaagagcatcctgaagaagagaatcgaggtggacatcatggagcccagcatgcagctggagagcttcagcagcagcaccagcagcagccaggaccaccccctgtacagcggccaccccagcctgcccctgagcggcgccatcgccgccttcgccagcgagatcgagaacaagggcaccatggtggagaccgccctgaaggagccccagggcaacctgtaccagtggggccccctgcccggcatccccaaggacaacagccccctgagagagaagttcggcagcttcctgtgccacaaggacaacctggacctgaaggccgagggccccgagagacacaccgacttcctgctgccccacgagagagccagccaggacggcagcggcttcagcagaatcctgagcatgctggccgacagcaccagcacccaggagaagagaagaagaagcttccccgacatcgaggacgaggagaagttcctgtacggcgacgaggaggaggacctgaaggccgagagcgtgcccaagcccctgggcagcagcgagagcgaggtgatgagacagaaggccagcagcctgcccagcagcgcccccgccgtgaagctggagagcctggaggagaccaaccccgagtacgccaagatccacgacctgctgaagaccatcggcctggacatcggcgtggccgagatcagccagctggccgccagaacccaggagagactgcacggcaagaagcccagcctgagaagcagcgccgacagaagaagcagcgtggacagatacttcagcgccgaccactgcagcagcgtggaccacagattcagcgccgacagatgcagcagcgtggaccactgcttcagcgccgacagaagaagcagcgacccccacagactggagagcagagaggcccaccacagcaacacccacagccccgaggtgagccacccccacccccccagccccgtggacccctacctgctgaccaagaacagcccccccttcctgaagagcgaccaccccgtgggccacatcagcggccccgaggtggtgggcagcggcttccagagcagcgtggccgtgagatgcatgctgcccagcgcccccagcgcccccatcagactgccccacaccgccgccctgagccagttccacatgcccagagccagccagttcgccgccgccagaatcccccccaactaccagggccccgccatcccccccgccagcttcgacgcctacagacactacatggcctacgccgccagcagatggcccatgtaccccaccagccagcccagcaaccaccccgtgcccgagccccacagaatcatgcccatcaccaagcaggccaccagaagcagacccaacctgagagtgatccccaccgtgacccccgacaagcccaagcagaaggagagcctgagaggcagcatccccgccgcccaggtgcccgtgcaggtgagcatccccagcctgatcagatacaaccccgagaagatcagcgacgagaagaacagagccagccagaagcagaaggtgatcgaggagagagagaagctgaagaacgacagagaggccagacagaagaagatgtactacctgagaaccgagctggagagactgcacaagcagcagggcgagatgctgagaaagaagagaagagagaaggacggccacaaggaccccctgctggtggaggtgagcagactgcaggacaacatcatgaaggacatcgccgagctgagacaggaggccgaggaggccgagaagaagcagagcgagctggacaaggtggcccagatcctgggcatcaacatcttcgacaagagccagaagagcctgagcgacagcagagagcccaccgagaagcccggcaaggccgagaagagcaagagccccgagaaggtgagcagcttcagcaacagcagcagcaacaaggagagcaaggtgaacaacgagaagttcagaaccaagagccccaagcccgccgagagcccccagagcgccaccaagcagctggaccagcccaccgccgcctacgagtactacgacgccggcaaccactggtgcaaggactgcaacaccatctgcggcaccatgttcgacttcttcacccacatgcacaacaagaagcacacccagaccctggacccctacaacagaccctgggccagcaagacccagagcgaggccaagcaggacgccatcaagagaaccgacaagatcaccgtgcccgccaagggcagcgagttcctggtgcccatcagcggcttctactgccagctgtgcgaggagttcctgggcgaccccatcagcggcgagcagcacgtgaagggccaccagcacaacgagaagtacaagaagtacgtggacgagaaccccctgtacgaggagagaagaaacctggacagacaggccggcctggccgtggtgctggagaccgagagaagaagacagagcgagctgaagagaaagctgagcgagaagcccaaggaggagaagaaggagaagaaggccaaggccgtgaaggaggtgaaggaggacgacaaggtgagcgagaagctggaggaccagctgagcgagggcagaaacagccccgagaaggccgagaacaagagaaacaccggcatcaagctgcagctgaaggaggaggtgaagaaggagagccccaccagcagcagcttcggcaagttcagctggaagaagcccgagaaggaggaggagaagagcagcctggtgacccccagcatcagcaaggaggagatcctggagagcagcaaggacaaggaggacggcaagaccgaggccggcaaggccaagcccatcaagatcaagctgagcggcaagaccgtggtggcccacaccagcccctggatgcccgtggtgaccaccagcacccagaccaagatcagacccaacctgcccatccccagcaccgtgctgagaaagagctgcagcgccaccatgagcaagcccgcccccctgaacaccttcctgagcatcaagagcagcggcaccaccgccaagcccctgcccgtggtgaaggagagcagcgccgacctgctgctgccccccgacatcatcagcaaggccttcggcggcgaggaggtgatcctgaagggcagccccgaggagaaggtggtgctggccgagaagagcgagcccagccacctgcccgagcagatcctgcccccccccccccccccccccccccccccccccccccccccccccgtgatcccccaccccgccgcccccagcgccgcccaggccaacgccatcctggcccccgtgaagagcaaccccgtggtgagccagaccctgagccccggcttcgtgggccccaacatcctgaaccccgtgctgcccgtggccatcatggccagcgcccagcccgccgccatccccagcgacgagaccgcccccggcgtgagcgagagcgacagagaccagaccctgttcagcgtgctggtgagaccccccccccccctgagcagcgtgttcagcgagcaggccaagaagctggagaagagaaacagctgcctggccaccgccaacgccaaggacctgtacgacatcttctacagcagcggcggcaagggcgcccccgagaccaagggcgcccccgagaccaagctgagcggcggccccctggccaacggcgagaacagcaacctgagcagaaccaagagcagcgacaccagcagcaccagccccctgaacagcagcgccagccaggaggagctgcaccaggacgagggcctggtggccgcccccatcgtgagcaacagcgagaagcccatcgccaagaccctggtggccctgggcaagtggagcgtggtggagcacgtgggccccaagagcaccggcagcacctacggcttcctgcagcccctgaccagactgtgccagagcagaccctacgagaccatcacccccaagaccgacaccctggccatctggaccagcagcagcttccagagcgacaccagcagagacatcagccccgagaagagcgagctggacctgggcgagcccggcccccccggcgtggagccccccccccagctgctggacatccagtgcaaggagagccagaagctggtggagatccacctgagagagagcgtgaaccaggacaaggagagccaggagctgagaaagagcgaggactgcagagagagcgagatcgagaccaacaccgagctgaaggagagagtgaaggagctgagcgagggcatcgtggacgagggcgtgagcaccagcatcggcccccacagcatcgacgacagcaacctgaaccacggcaacagatacatgtgggagggcgaggtgaagcagcccaacctgctgatgatcgacaaggaggccgagcagagcaacaagctgatgaccggcagcgagacccccagcaaggtggtgatcaagctgagcccccaggcctgcagcttcaccaaggccaagctggacagcttcctgagcgaggccagaagcctgctgaacccccaggacacccccgtgaagatcagcgcccccgagctgctgctgcacagccccgccagaagcgccatgtgcctgaccggcagcccccaggagcagggcgtgagcgtggtgagcgaggagggcctggagaacagcgcccccgagagcgccagcagaaccagcagatacagaagcctgaagctgaagagagagagaagcaaggacttccaggtgaagaagatctacgagctggccgtgtgggacgagaacaagaagagacccgagacctgggagagccccgagaagcccaagaccgaggccctggagctgcaggacgtgcaccccgagctgaccgtgaccatcgagagcaaggccctggaggacttcgaggccaccgacctgaaggtggaggagctgaccgccctgggcaacctgggcgacatgcccgtggacttctgcaccaccagagtgagccccgcccacagaagccccaccgtgctgtgccagaaggtgtgcgaggagaacagcgtgagccccatcggctgcaacagcagcgaccccgccgacttcgagcccatccccagcttcagcggcttccccctggacagccccaagaccctggtgctggacttcgagaccgagggcgagagaaacagccccaaccccagaagcgtgagaatccccagccccaacatcctgaagaccggcctgaccgagaacgtggacagaggcctgggcggcctggagggcacccaccaggccctggacctgctggccggcggcatgatgcccgaggaggtgaaggagagcagccagctggacaagcaggagagcctgggcctggagctgaagaccatcaacagcgccggcctgggccccagcccctgcctgcccgacctggtggacttcgtgaccagaaccagcggcgtgcagaaggacaagctgtgcagccccctgagcgagcccggcgaccccagcaagtgcagcagcctggagctgggccccctgcagctggagatcagcaacgccagcaccaccgaggtggccatcctgcaggtggacgacgacagcggcgaccccctgaacctggtgaaggcccccgtgagcagaagcccccccagagagcaggtgatcgaggacaacatggtgccccagggcatgcccgagcaggagaccaccgtgggcgccatccaggaccacaccgagagcagcgtgcacaactag

SEQ ID NO: 10563 - DNA, 1932 bp, synthetic construct
  source 1..1932: mol_type = other DNA; note = Synthetic coding sequence
atgggccaggagagcagcaagcccgtgtggcccaaccccaccggcggctaccagagcaacaccggcagaagatacggcagaagacacgcctacgtgagcttcagaccccccaccagccagagagagagaatcgccagccagagaaagaccaacagcgaggtgcccatgcacagaagcgcccccagccagaccaccaagagaagcagaagccccttcagcaccaccagaagaagctgggacgacagcgagagcagcggcaccaacctgaacatcgacaacgaggactacagcagatacccccccagagagtacagagccagcggcagcagaagaggcatggcctacggccacatcgacagctacggcgccgacgacagcgaggaggagggcgccggccccgtggagagaccccccgtgagaggcaagaccggcaagttcaaggacgacaagctgtacgaccccgagaagggcgccagaagcctggccggcccccccccccacttcagcagcttcagcagagacgtgagagaggagagagacaagctggaccccgtgcccgccgccagatgcagcgccagcagagccgacttcctgccccagagcagcgtggccagccagagcagcagcgagggcaagctggccaccaagggcgacagcagcgagagagagagaagagagcagaacctgcccgccagacccagcagagcccccgtgagcatctgcggcggcggcgagaacaccagcaagagcgccgaggagcccgtggtgagacccaagatcagaaacctggccagccccaactgcgtgaagcccaagatcttcttcgacaccgacgacgacgacgacatgccccacagcaccagcagatggagagacaccgccaacgacaacgagggccacagcgacggcctggccagaagaggcagaggcgagagcagcagcggctaccccgagcccaagtaccccgaggacaagagagaggccagaagcgaccaggtgaagcccgagaaggtgcccagaagaagaagaaccatggccgaccccgacttctggacccacagcgacgactactacaagtactgcgacgaggacagcgacagcgacaaggagtggatcgccgccctgagaagaaagtacagaagcagagagcagaccctgagcagcagcggcgagagctgggagaccctgcccggcaaggaggagagagagcccccccaggccaaggtgagcgccagcaccggcaccagccccggccccggcgccagcgccagcgccggcgccggcgccggcgccagcgccggcagcaacggcagcaactacctggaggaggtgagagagcccagcctgcaggaggagcaggccagcctggaggagggcgagatcccctggctgcagtaccacgagaacgacagcagcagcgagggcgacaacgacagcggccacgagctgatgcagcccggcgtgttcatgctggacggcaacaacaacctggaggacgacagcagcgtgagcgaggacctggaggtggactggagcctgttcgacggcttcgccgacggcctgggcgtggccgaggccatcagctacgtggacccccagttcctgacctacatggccctggaggagagactggcccaggccatggagaccgccctggcccacctggagagcctggccgtggacgtggaggtggccaacccccccgccagcaaggagagcatcgacgccctgcccgagatcctggtgaccgaggaccacggcgccgtgggccaggagatgtgctgccccatctgctgcagcgagtacgtgaagggcgaggtggccaccgagctgccctgccaccactacttccacaagccctgcgtgagcatctggctgcagaagagcggcacctgccccgtgtgcagatgcatgttccccccccccctgtag

SEQ ID NO: 10564 - DNA, 1113 bp, synthetic construct
  source 1..1113: mol_type = other DNA; note = Synthetic coding sequence
atgcccaccgagaccctgcagaccggcagcatggtgaagcccgtgagccccgccggcaccttcaccagcgccgtgcccctgagaatcctgaacaagggccccgactacttcagaagacaggccgagcccaaccccaagagactgagcgccgtggagagactggaggccgacaaggccaagtacgtgaagagccaggaggtgatcaacgccaagcaggagcccgtgaagcccgccgtgctggccaagccccccgtgtgccccgccgccaagagagccctgggcagccccaccctgaaggtgttcggcaaccacgccaagaccgagagcggcgtgcagagagagaacctgaagctggagatcctgaagaacatcatcaacagcagcgagggcagcagcagcggcagcggccacaagcacagcagcagaaactggcccccccacagaagcgaggccaccgacctgcacagacacagcttcgccgagagcctgaaggtgtaccccacccagggcagaagaagcccccaggagggcggcagccacgtgggcagaagactgctggagcagagcgccgagagcttcctgcacgtgagccacagcagcagcgacatcagaaaggtgaccagcgtgaagcccctgaaggccatcccctgcagcagcagcgccccccccctgccccccaagcccaagatcgccgccatcgccagcatgaagagccccgaggccgaccccgtggagcccgcctgcggcgtgagcagaagacccagcctgcagagaagcaagagcgacctgagcgacagatacttcagagtggacgccgacgtggagagattcttcaactactgcggcctggaccccgaggagctggagaacctgggcatggagaacttcgccagagccaacagcgacatcatcagcctgaacttcagaagcgccagcatgatcagcagcgactgcgagcagagccaggacagcaacagcgacctgagaaacgacgacagcgccaacgacagagtgccctacggcatcagcgccatcgagagaaacgccagaatcatcaagtggctgtacagcatcaagcaggccagagagagccagaaggtgagccacgtgtag

SEQ ID NO: 10565 - DNA, 3126 bp, synthetic construct
  source 1..3126: mol_type = other DNA; note = Synthetic coding sequence
atggccgccgccgccgccgccggcgccgccagcggcctgcccggccccgtggcccagggcctgaaggaggccctggtggacaccctgaccggcatcctgagccccgtgcaggaggtgagagccgccgccgaggagcagatcaaggtgctggaggtgaccgaggagttcggcgtgcacctggccgagctgaccgtggacccccagggcgccctggccatcagacagctggccagcgtgatcctgaagcagtacgtggagacccactggtgcgcccagagcgagaagttcagaccccccgagaccaccgagagagccaagatcgtgatcagagagctgctgcccaacggcctgagagagagcatcagcaaggtgagaagcagcgtggcctacgccgtgagcgccatcgcccactgggactggcccgaggcctggccccagctgttcaacctgctgatggagatgctggtgagcggcgacctgaacgccgtgcacggcgccatgagagtgctgaccgagttcaccagagaggtgaccgacacccagatgcccctggtggcccccgtgatcctgcccgagatgtacaagatcttcaccatggccgaggtgtacggcatcagaaccagaagcagagccgtggagatcttcaccacctgcgcccacatgatctgcaacatggaggagctggagaagggcgccgccaaggtgctgatcttccccgtggtgcagcagttcaccgaggccttcgtgcaggccctgcagatccccgacggccccaccagcgacagcggcttcaagatggaggtgctgaaggccgtgaccgccctggtgaagaacttccccaagcacatggtgagcagcatgcagcagatcctgcccatcgtgtggaacaccctgaccgagagcgccgccttctacgtgagaaccgaggtgaactacaccgaggaggtggaggaccccgtggacagcgacggcgaggtgctgggcttcgagaacctggtgttcagcatcttcgagttcgtgcacgccctgctggagaacagcaagttcaagagcaccgtgaagaaggccctgcccgagctgatctactacatcatcctgtacatgcagatcaccgaggagcagatcaaggtgtggaccgccaacccccagcagttcgtggaggacgaggacgacgacaccttcagctacaccgtgagaatcgccgcccaggacctgctgctggccgtggccaccgacttccagaacgagagcgccgccgccctggccgccgccgccaccagacacctgcaggaggccgagcagaccaagaacagcggcaccgagcactggtggaagatccacgaggcctgcatgctggccctgggcagcgtgaaggccatcatcaccgacagcgtgaagaacggcagaatccacttcgacatgcacggcttcctgaccaacgtgatcctggccgacctgaacctgagcgtgagccccttcctgctgggcagagccctgtgggccgccagcagattcaccgtggccatgagccccgagctgatccagcagttcctgcaggccaccgtgagcggcctgcacgagacccagccccccagcgtgagaatcagcgccgtgagagccatctggggctactgcgaccagctgaaggtgagcgagagcacccacgtgctgcagcccttcctgcccagcatcctggacggcctgatccacctggccgcccagttcagcagcgaggtgctgaacctggtgatggagaccctgtgcatcgtgtgcaccgtggaccccgagttcaccgccagcatggagagcaagatctgccccttcaccatcgccatcttcctgaagtacagcaacgaccccgtggtggccagcctggcccaggacatcttcaaggagctgagccagatcgaggcctgccagggccccatgcagatgagactgatccccaccctggtgagcatcatgcaggcccccgccgacaagatccccgccggcctgtgcgccaccgccatcgacatcctgaccaccgtggtgagaaacaccaagccccccctgagccagctgctgatctgccaggccttccccgccgtggcccagtgcaccctgcacaccgacgacaacgccaccatgcagaacggcggcgagtgcctgagagcctacgtgagcgtgaccctggagcaggtggcccagtggcacgacgagcagggccacaacggcctgtggtacgtgatgcaggtggtgagccagctgctggaccccagaaccagcgagttcaccgccgccttcgtgggcagactggtgagcaccctgatcagcaaggccggcagagagctgggcgagaacctggaccagatcctgagagccatcctgagcaagatgcagcaggccgagaccctgagcgtgatgcagagcctgatcatggtgttcgcccacctggtgcacacccagctggagcccctgctggagttcctgtgcagcctgcccggccccaccggcaagcccgccctggagttcgtgatggccgagtggaccagcagacagcacctgttctacggccagtacgagggcaaggtgagcagcgtggccctgtgcaagctgctgcagcacggcatcaacgccgacgacaagagactgcaggacatcagagtgaagggcgaggagatctacagcatggacgagggcatcagaaccagaagcaagagcgccaagaaccccgagagatggaccaacatccccctgctggtgaagatcctgaagctgatcatcaacgagctgagcaacgtgatggaggccaacgccgccagacaggccacccccgccgagtggagccaggacgacagcaacgacatgtgggaggaccaggaggaggaggaggaggaggaggaggacggcctggccggccagctgctgagcgacatcctggccaccagcaagtacgaggaggactactacgaggacgacgaggaggacgaccccgacgccctgaaggaccccctgtaccagatcgacctgcaggcctacctgaccgacttcctgtgccagttcgcccagcagccctgctacatcatgttcagcggccacctgaacgacaacgagagaagagtgctgcagaccatcggcatctag

SEQ ID NO: 10566 - DNA, 156 bp, synthetic construct
  source 1..156: mol_type = other DNA; note = Synthetic coding sequence
atgagcagccacaagaccttcagaatcaagagattcctggccaagaagcagaagcagaacagacccatcccccagtggatcagaatgaagaccggcaacaagatcagatacaacagcaagagaagacactggagaagaaccaagctgggcctgtag

SEQ ID NO: 10567 - DNA, 3627 bp, synthetic construct
  source 1..3627: mol_type = other DNA; note = Synthetic coding sequence
atggacagcctgcccgacgagttcttcgtgagacaccccgccgtggaggaccagagaaaggaggagaccgagaacaagctggagaagagcagcggccagctgaacaagcaggagaacgacatccccaccgacctggtgcccgtgaacctgctgctggaggtgaagaagctgctgaacgccatcaacaccctgcccaagggcgtggtgccccacatcaagaagttcctgcaggaggacttcagcttccagaccatgcagagagaggtggccgccaacagccagaacggcgaggagatcgtgcccgccctgaccctgagattcctgatcacccagctggaggccgccctgagaaacatccaggccggcaactacaccgcccaccagatcaacatcggctactacctgaccctgctgttcctgtacggcgtggccctgaccgagagaggcaagaaggaggactacaccgaggccgagaacaagttcctggtgatgaagatgatgatccaggagaacgagatctgcgagaacttcatgagcctggtgtacttcggcagaggcctgctgagatgcgcccagaagagatacaacggcggcctgctggagttccacaagagcctgcaggagatcggcgacaagaacgaccactggttcgacatcgaccccaccgaggacgaggacctgcccaccaccttcaaggacctgctgaacaacttcatcaagaccaccgagagcaacatcatgaagcagaccatctgcagctacctggactgcgagagaagctgcgaggccgacatcctgaagaacaccagctacaagggcttcttccagctgatgtgcagcaagagctgctgcgtgtacttccacaagatctgctggaagaagttcaagaacctgaagtaccccggcgagaacgaccagagcttcagcggcaagaagtgcctgaaggagggctgcaccggcgacatggtgagaatgctgcagtgcgacgtgcccggcatcgtgaagatcctgttcgaggtggtgagaaaggacgagtacatcaccatcgagaacctgggcgccagctacagaaagctgatcagcctgaagatcaccgacaccgacatcagacccaagatcagcctgaagttcaacaccaaggacgagatgcccatcttcaagctggactacaactacttctaccacctgctgcacatcatcatcatcagcggcaccgacatcgtgagacagatcttcgacgaggccatgcccccccccctgctgaagaaggagctgctgatccacaagaacgtgctggagagctactacaaccacctgtggaccaaccaccccctgggcggcagctggcacctgctgtacccccccaacaaggagctgccccagagcaagcagttcgacctgtgcctgctgctggccctgatcaagcacctgaacgtgttccccgcccccaagaagggctggaacatggagccccccagcagcgacatcagcaagagcgccgacatcctgagactgtgcaagtacagagacatcctgctgagcgagatcctgatgaacggcctgaccgagagccagttcaacagcatctggaagaaggtgagcgacatcctgctgagactgggcatgatgcaggaggacatcgacaaggtgaaggagaaccccatcgagaacatcagcctggactaccaccagctgagcgtgtacctgggcatccccgtgcccgagatcatccagagaatgctgagctgctaccagcagggcatcgccctgcagagcatcaccggcagccagagaatcgagatcgaggagctgcagaacgaggaggaggagctgagcccccccctgatggagtacaacatcaacgtgaagagccaccccgagatccagttcgccgagatcaacaaggacggcaccagcatccccagcgagagcagcaccgagagcctgaaggacctgcaggaggtgaagagcaagcagagaaagaagaagaagaccaagaacaagaagaacaaggacagcaaggaggaccaggtgccctacgtggtggagaaggaggagcagctgagaaaggagcaggccaacccccacagcgtgagcagactgatcaaggacgacgccagcgacgtgcaggaggacagcgccatggaggacaagttctacagcctggacgagctgcacatcctggacatgatcgagcagggcagcgccggcaaggtgaccaccgactacggcgagaccgagaaggagagactggccagacagagacagctgtacaagctgcactaccagtgcgaggacttcaagagacagctgagaaccgtgaccttcagatggcaggagaaccagatgcagatcaagaagaaggacaagatcatcgccagcctgaaccagcaggtggccttcggcatcaacaaggtgagcaagctgcagagacagatccacgccaaggacaacgagatcaagaacctgaaggagcagctgagcatgaagagaagccagtgggagatggagaagcacaacctggagagcaccatgaagacctacgtgagcaagctgaacgccgagaccagcagagccctgaccgccgaggtgtacttcctgcagtgcagaagagacttcggcctgctgcacctggagcagaccgagaaggagtgcctgaaccagctggccagagtgacccacatggccgccagcaacctggagagcctgcagctgaaggccgccgtggacagctggaacgccatcgtggccgacgtgagaaacaagatcgccttcctgagaacccagtacaacgagcagatcaacaaggtgaagcagggcttcgccctgagcaccctgccccccgtgcagctgcccccccccccccccagccccgagatcctgatgcagcagttcctgggcagacccctggtgaaggagagcttcttcagacccatcctgaccgtgccccagatgcccgccgtgtgccccggcgtggtgagcgccaccggccagcccagagcccccctgatgaccggcatcgcctgggccctgcccgcccccgtgggcgacgccgtgccccccagcgccggcctgagaagcgaccccagcatcatgaactgggagagaatcaccgacagactgaagaccgccttcccccagcagaccagaaaggagctgaccgacttcctgagaaagctgaaggacgcctacggcaagagcctgagcgagctgaccttcgacgagatcgtgtgcaagatcagccagttcatcgaccccaagaagagccagagccagggcaagagcgtgagcaacgtgaactgcgtgagccccagccacagccccagccagcccgacgccgcccagccccccaagcccgcctggagacccctgaccagccagggccccgccacctgggagggcgccagcaaccccgacgaggaggaggaggaggaggagccctgcgtgatctgccacgagaacctgagccccgagaacctgagcgtgctgccctgcgcccacaagttccacgcccagtgcatcagaccctggctgatgcagcagggcacctgccccacctgcagactgcacgtgctgctgcccgaggagttccccggccaccccagcagacagctgcccaagatctag

SEQ ID NO: 10568 - DNA, 996 bp, synthetic construct
  source 1..996: mol_type = other DNA; note = Synthetic coding sequence
atgagcagacagctgagcagagccagacccgccaccgtgctgggcgccatggagatgggcagaagaatggacgcccccaccagcgccgccgtgaccagagccttcctggagagaggccacaccgagatcgacaccgccttcgtgtacagcgagggccagagcgagaccatcctgggcggcctgggcctgagactgggcggcagcgactgcagagtgaagatcgacaccaaggccatccccctgttcggcaacagcctgaagcccgacagcctgagattccagctggagaccagcctgaagagactgcagtgccccagagtggacctgttctacctgcacatgcccgaccacagcacccccgtggaggagaccctgagagcctgccaccagctgcaccaggagggcaagttcgtggagctgggcctgagcaactacgccgcctgggaggtggccgagatctgcaccctgtgcaagagcaacggctggatcctgcccaccgtgtaccagggcatgtacaacgccatcaccagacaggtggagaccgagctgttcccctgcctgagacacttcggcctgagattctacgccttcaaccccctggccggcggcctgctgaccggcaagtacaagtacgaggacaagaacggcaagcagcccgtgggcagattcttcggcaacacctgggccgagatgtacagaaacagatactggaaggagcaccacttcgagggcatcgccctggtggagaaggccctgcaggccgcctacggcgccagcgcccccagcatgaccagcgccaccctgagatggatgtaccaccacagccagctgcagggcgcccacggcgacgccgtgatcctgggcatgagcagcctggagcagctggagcagaacctggccgccgccgaggagggccccctggagcccgccgtggtggacgccttcaaccaggcctggcacctggtgacccacgagtgccccaactacttcagatag

SEQ ID NO: 10569 - DNA, 1131 bp, synthetic construct
  source 1..1131: mol_type = other DNA; note = Synthetic coding sequence
atgagccccgaggtggccctgaacagaatcagccccatgctgagccccttcatcagcagcgtggtgagaaacggcaaggtgggcctggacgccaccaactgcctgagaatcaccgacctgaagagcggctgcaccagcctgacccccggccccaactgcgacagattcaagctgcacatcccctacgccggcgagaccctgaagtgggacatcatcttcaacgcccagtaccccgagctgccccccgacttcatcttcggcgaggacgccgagttcctgcccgaccccagcgccctgcagaacctggccagctggaaccccagcaaccccgagtgcctgctgctggtggtgaaggagctggtgcagcagtaccaccagttccagtgcagcagactgagagagagcagcagactgatgttcgagtaccagaccctgctggaggagccccagtacggcgagaacatggagatctacgccggcaagaagaacaactggaccggcgagttcagcgccagattcctgctgaagctgcccgtggacttcagcaacatccccacctacctgctgaaggacgtgaacgaggaccccggcgaggacgtggccctgctgagcgtgagcttcgaggacaccgaggccacccaggtgtaccccaagctgtacctgagccccagaatcgagcacgccctgggcggcagcagcgccctgcacatccccgccttccccggcggcggctgcctgatcgactacgtgccccaggtgtgccacctgctgaccaacaaggtgcagtacgtgatccagggctaccacaagagaagagagtacatcgccgccttcctgagccacttcggcaccggcgtggtggagtacgacgccgagggcttcaccaagctgaccctgctgctgatgtggaaggacttctgcttcctggtgcacatcgacctgcccctgttcttccccagagaccagcccaccctgaccttccagagcgtgtaccacttcaccaacagcggccagctgtacagccaggcccagaagaactacccctacagccccagatgggacggcaacgagatggccaagagagccaagagagagagcaacagagacggcgaggagagcagcagcgcctag

SEQ ID NO: 10570 - DNA, 1881 bp, synthetic construct
  source 1..1881: mol_type = other DNA; note = Synthetic coding sequence
atggacgagcaggaggccctgaacagcatcatgaacgacctggtggccctgcagatgaacagaagacacagaatgcccggctacgagaccatgaagaacaaggacaccggccacagcaacagacagagcgacgtgagaatcaagttcgagcacaacggcgagagaagaatcatcgccttcagcagacccgtgaagtacgaggacgtggagcacaaggtgaccaccgtgttcggccagcccctggacctgcactacatgaacaacgagctgagcatcctgctgaagaaccaggacgacctggacaaggccatcgacatcctggacagaagcagcagcatgaagagcctgagaatcctgctgctgagccaggacagaaaccacaacagcagcagcccccacagcggcgtgagcagacaggtgagaatcaaggccagccagagcgccggcgacatcaacaccatctaccagccccccgagcccagaagcagacacctgagcgtgagcagccagaaccccggcagaagcagccccccccccggctacgtgcccgagagacagcagcacatcgccagacagggcagctacaccagcatcaacagcgagggcgagttcatccccgagaccagcgagcagtgcatgctggaccccctgagcagcgccgagaacagcctgagcggcagctgccagagcctggacagaagcgccgacagccccagcttcagaaagagcagaatgagcagagcccagagcttccccgacaacagacaggagtacagcgacagagagacccagctgtacgacaagggcgtgaagggcggcacctaccccagaagataccacgtgagcgtgcaccacaaggactacagcgacggcagaagaaccttccccagaatcagaagacaccagggcaacctgttcaccctggtgcccagcagcagaagcctgagcaccaacggcgagaacatgggcctggccgtgcagtacctggaccccagaggcagactgagaagcgccgacagcgagaacgccctgagcgtgcaggagagaaacgtgcccaccaagagccccagcgcccccatcaactggagaagaggcaagctgctgggccagggcgccttcggcagagtgtacctgtgctacgacgtggacaccggcagagagctggccagcaagcaggtgcagttcgaccccgacagccccgagaccagcaaggaggtgagcgccctggagtgcgagatccagctgctgaagaacctgcagcacgagagaatcgtgcagtactacggctgcctgagagacagagccgagaagaccctgaccatcttcatggagtacatgcccggcggcagcgtgaaggaccagctgaaggcctacggcgccctgaccgagagcgtgaccagaaagtacaccagacagatcctggagggcatgagctacctgcacagcaacatgatcgtgcacagagacatcaagggcgccaacatcctgagagacagcgccggcaacgtgaagctgggcgacttcggcgccagcaagagactgcagaccatctgcatgagcggcaccggcatgagaagcgtgaccggcaccccctactggatgagccccgaggtgatcagcggcgagggctacggcagaaaggccgacgtgtggagcctgggctgcaccgtggtggagatgctgaccgagaagcccccctgggccgagtacgaggccatggccgccatcttcaagatcgccacccagcccaccaacccccagctgcccagccacatcagcgagcacggcagagacttcctgagaagaatcttcgtggaggccagacagagacccagcgccgaggagctgctgacccaccacttcgcccagctgatgtactag

SEQ ID NO: 10571 - DNA, 1701 bp, synthetic construct; identical to SEQ ID NO: 10391
  source 1..1701: mol_type = other DNA; note = Synthetic coding sequence

SEQ ID NO: 10572 - DNA, 456 bp, synthetic construct
  source 1..456: mol_type = other DNA; note = Synthetic coding sequence
atggagggctgcgtgagcaacctgatggtgtgcaacctggcctacagcggcaagctggaggagctgaaggagagcatcctggccgacaagagcctggccaccagaaccgaccaggacagcagaaccgccctgcactgggcctgcagcgccggccacaccgagatcgtggagttcctgctgcagctgggcgtgcccgtgaacgacaaggacgacgccggctggagccccctgcacatcgccgccagcgccggcagagacgagatcgtgaaggccctgctgggcaagggcgcccaggtgaacgccgtgaaccagaacggctgcacccccctgcactacgccgccagcaagaacagacacgagatcgccgtgatgctgctggagggcggcgccaaccccgacgccaaggaccactacgaggccaccgccatgcacagagccgccgccaaggacacctag

SEQ ID NO: 10573 - DNA, 2220 bp, synthetic construct; identical to SEQ ID NO: 10489
  source 1..2220: mol_type = other DNA; note = Synthetic coding sequence

SEQ ID NO: 10574 - DNA, 1692 bp, synthetic construct
  source 1..1692: mol_type = other DNA; note = Synthetic coding sequence
atgagcagacccagcagcagagccatctacctgcacagaaaggagtacagccagaacctgaccagcgagcccaccctgctgcagcacagagtggagcacctgatgacctgcaagcagggcagccagagagtgcagggccccgaggacgccctgcagaagctgttcgagatggacgcccagggcagagtgtggagccaggacctgatcctgcaggtgagagacggctggctgcagctgctggacatcgagaccaaggaggagctggacagctacagactggacagcatccaggccatgaacgtggccctgaacacctgcagctacaacagcatcctgagcatcaccgtgcaggagcccggcctgcccggcaccagcaccctgctgttccagtgccaggaggtgggcgccgagagactgaagaccagcctgcagaaggccctggaggaggagctggagcagagacccagactgggcggcctgcagcccggccaggacagatggagaggccccgccatggagagacccctgcccatggagcaggccagatacctggagcccggcatcccccccgagcagccccaccagagaaccctggagcacagcctgccccccagccccagacccctgcccagacacaccagcgccagagagcccagcgccttcaccctgcccccccccagaagaagcagcagccccgaggaccccgagagagacgaggaggtgctgaaccacgtgctgagagacatcgagctgttcatgggcaagctggagaaggcccaggccaagaccagcagaaagaagaagttcggcaagaagaacaaggaccagggcggcctgacccaggcccagtacatcgactgcttccagaagatcaagcacagcttcaacctgctgggcagactggccacctggctgaaggagaccagcgcccccgagctggtgcacatcctgttcaagagcctgaacttcatcctggccagatgccccgaggccggcctggccgcccaggtgatcagccccctgctgacccccaaggccatcaacctgctgcagagctgcctgagcccccccgagagcaacctgtggatgggcctgggccccgcctggaccaccagcagagccgactggaccggcgacgagcccctgccctaccagcccaccttcagcgacgactggcagctgcccgagcccagcagccaggcccccctgggctaccaggaccccgtgagcctgagacccagcagccccaagcccgcccagcccgccctgaagatgcaggtgctgtacgagttcgaggccagaaaccccagagagctgaccgtggtgcagggcgagaagctggaggtgctggaccacagcaagagatggtggctggtgaagaacgaggccggcagaagcggctacatccccagcaacatcctggagcccctgcagcccggcacccccggcacccagggccagagccccagcagagtgcccatgctgagactgagcagcagacccgaggaggtgaccgactggctgcaggccgagaacttcagcaccgccaccgtgagaaccctgggcagcctgaccggcagccagctgctgagaatcagacccggcgagctgcagatgctgtgcccccaggaggcccccagaatcctgagcagactggaggccgtgagaagaatgctgggcatcagcccctag

SEQ ID NO: 10575 - DNA, 525 bp, synthetic construct
  source 1..525: mol_type = other DNA; note = Synthetic coding sequence
atgacctgctgccagaccagcttctgcggctaccccagcttcagcatcagcggcacctgcggcagcagctgctgccagcccagctgctgcgagaccagctgctgccagcccagaagctgccagaccagcttctgcggcttccccagcttcagcaccagcggcacctgcagcagcagctgctgccagcccagctgctgcgagaccagctgctgccagcccagctgctgcgagaccagctgctgccagcccagctgctgccagatcagcagctgcggcaccggctgcggcatcggcggcggcatcagctacggccaggagggcagcagcggcgccgtgagcaccagaatcagatggtgcagacccgacagcagagtggagggcacctacctgcccccctgctgcgtggtgagctgcaccccccccagctgctgccagctgcaccacgcccaggccagctgctgcagacccagctactgcggccagagctgctgcagacccgtgtgctgctgcgagcccacctgctag

SEQ ID NO: 10576 - DNA, 1173 bp, synthetic construct
  source 1..1173: mol_type = other DNA; note = Synthetic coding sequence
atgagaggcgacagaggcagaggcagaggcggcagattcggcagcagaggcggccccggcggcggcttcagacccttcgtgccccacatccccttcgacttctacctgtgcgagatggccttccccagagtgaagcccgcccccgacgagaccagcttcagcgaggccctgctgaagagaaaccaggacctggcccccaacagcgccgagcaggccagcatcctgagcctggtgaccaagatcaacaacgtgatcgacaacctgatcgtggcccccggcaccttcgaggtgcagatcgaggaggtgagacaggtgggcagctacaagaagggcaccatgaccaccggccacaacgtggccgacctggtggtgatcctgaagatcctgcccaccctggaggccgtggccgccctgggcaacaaggtggtggagagcctgagagcccaggaccccagcgaggtgctgaccatgctgaccaacgagaccggcttcgagatcagcagcagcgacgccaccgtgaagatcctgatcaccaccgtgccccccaacctgagaaagctggaccccgagctgcacctggacatcaaggtgctgcagagcgccctggccgccatcagacacgccagatggttcgaggagaacgccagccagagcaccgtgaaggtgctgatcagactgctgaaggacctgagaatcagattccccggcttcgagcccctgaccccctggatcctggacctgctgggccactacgccgtgatgaacaaccccaccagacagcccctggccctgaacgtggcctacagaagatgcctgcagatcctggccgccggcctgttcctgcccggcagcgtgggcatcaccgacccctgcgagagcggcaacttcagagtgcacaccgtgatgaccctggagcagcaggacatggtgtgctacaccgcccagaccctggtgagaatcctgagccacggcggcttcagaaagatcctgggccaggagggcgacgccagctacctggccagcgagatcagcacctgggacggcgtgatcgtgacccccagcgagaaggcctacgagaagccccccgagaagaaggagggcgaggaggaggaggagaacaccgaggagcccccccagggcgaggaggaggagagcatggagacccaggagtag

SEQ ID NO: 10577 - DNA, 3606 bp, synthetic construct
  source 1..3606: mol_type = other DNA; note = Synthetic coding sequence
atgcccagaggcgaggcccccggccccggcagaagaggcgccaaggacgaggccctgggcgaggagagcggcgagagatggagccccgagttccacctgcagagaaagctggccgacagcagccacagcgagcagcaggacagaaacagagtgagcgaggagctgatcatggtggtgcaggagatgaagaagtacttccccagcgagagaagaaacaagcccagcaccctggacgccctgaactacgccctgagatgcgtgcacagcgtgcaggccaacagcgagttcttccagatcctgagccagaacggcgccccccaggccgacgtgagcatgtacagcctggaggagctggccaccatcgccagcgagcacaccagcaagaacaccgacaccttcgtggccgtgttcagcttcctgagcggcagactggtgcacatcagcgagcaggccgccctgatcctgaacagaaagaaggacgtgctggccagcagccacttcgtggacctgctggccccccaggacatgagagtgttctacgcccacaccgccagagcccagctgcccttctggaacaactggacccagagagccgccagatacgagtgcgcccccgtgaagcccttcttctgcagaatcagaggcggcgaggacagaaagcaggagaagtgccacagccccttcagaatcatcccctacctgatccacgtgcaccaccccgcccagcccgagctggagagcgagccctgctgcctgaccgtggtggagaagatccacagcggctacgaggcccccagaatccccgtgaacaagagaatcttcaccaccacccacacccccggctgcgtgttcctggaggtggacgagaaggccgtgcccctgctgggctacctgccccaggacctgatcggcaccagcatcctgagctacctgcaccccgaggacagaagcctgatggtggccatccaccagaaggtgctgaagtacgccggccacccccccttcgagcacagccccatcagattctgcacccagaacggcgactacatcatcctggacagcagctggagcagcttcgtgaacccctggagcagaaagatcagcttcatcatcggcagacacaaggtgagaaccagccccctgaacgaggacgtgttcgccaccaagatcaagaagatgaacgacaacgacaaggacatcaccgagctgcaggagcagatctacaagctgctgctgcagcccgtgcacgtgagcgtgagcagcggctacggcagcctgggcagcagcggcagccaggagcagctggtgagcatcgccagcagcagcgaggccagcggccacagagtggaggagaccaaggccgagcagatgaccctgcagcaggtgtacgccagcgtgaacaagatcaagaacctgggccagcagctgtacatcgagagcatgaccaagagcagcttcaagcccgtgaccggcaccagaaccgagcccaacggcggcggcgagtgcaagaccttcaccagcttccaccagaccctgaagaacaacagcgtgtacaccgagccctgcgaggacctgagaaacgacgagcacagccccagctaccagcagatcaactgcatcgacagcgtgatcagatacctgaagagctacaacatccccgccctgaagagaaagtgcatcagctgcaccaacaccaccagcagcagcagcgaggaggacaagcagaaccacaaggccgacgacgtgcaggccctgcaggccggcctgcagatccccgccatccccaagagcgagatgcccaccaacggcagaagcatcgacaccggcggcggcgccccccagatcctgagcaccgccatgctgagcctgggcagcggcatcagccagtgcggctacagcagcaccatcgtgcacgtgcccccccccgagaccgccagagacgccaccctgttctgcgagccctggaccctgaacatgcagcccgcccccctgaccagcgaggagttcaagcacgtgggcctgaccgccgccgtgctgagcgcccacacccagaaggaggagcagaactacgtggacaagttcagagagaagatcctgagcagcccctacagcagctacctgcagcaggagagcagaagcaaggccaagtacagctacttccagggcgacagcaccagcaagcagaccagaagcgccggctgcagaaagggcaagcacaagagaaagaagctgcccgagccccccgacagcagcagcagcaacaccggcagcggccccagaagaggcgcccaccagaacgcccagccctgctgccccagcgccgccagcagcccccacaccagcagccccaccttcccccccgccgccatggtgcccagccaggccccctacctggtgcccgccttccccctgcccgccgccaccagccccggcagagagtacgccgcccccggcaccgcccccgagggcctgcacggcctgcccctgagcgagggcctgcagccctaccccgccttccccttcccctacctggacaccttcatgaccgtgttcctgcccgacccccccgtgtgccccctgctgagccccagcttcctgccctgccccttcctgggcgccaccgccagcagcgccatcagccccagcatgagcagcgccatgagccccaccctggaccccccccccagcgtgaccagccagagaagagaggaggagaagtgggaggcccagagcgagggccaccccttcatcaccagcagaagcagcagccccctgcagctgaacctgctgcaggaggagatgcccagacccagcgagagccccgaccagatgagaagaaacacctgcccccagaccgagtactgcgtgaccggcaacaacggcagcgagagcagccccgccaccaccggcgccctgagcaccggcagcccccccagagagaaccccagccaccccaccgccagcgccctgagcaccggcagcccccccatgaagaaccccagccaccccaccgccagcgccctgagcaccggcagcccccccatgaagaaccccagccaccccaccgccagcaccctgagcatgggcctgccccccagcagaacccccagccaccccaccgccaccgtgctgagcaccggcagcccccccagcgagagccccagcagaaccggcagcgccgccagcggcagcagcgacagcagcatctacctgaccagcagcgtgtacagcagcaagatcagccagaacggccagcagagccaggacgtgcagaagaaggagaccttccccaacgtggccgaggagcccatctggagaatgatcagacagacccccgagagaatcctgatgacctaccaggtgcccgagagagtgaaggaggtggtgctgaaggaggacctggagaagctggagagcatgagacagcagcagccccagttcagccacggccagaaggaggagctggccaaggtgtacaactggatccagagccagaccgtgacccaggagatcgacatccaggcctgcgtgacctgcgagaacgaggacagcgccgacggcgccgccaccagctgcggccaggtgctggtggaggacagctgctag

SEQ ID NO: 10578 - DNA, 1296 bp, synthetic construct
  source 1..1296: mol_type = other DNA; note = Synthetic coding sequence
atgagcgaccagatcaagttcatcatggacagcctgaacaaggagcccttcagaaagaactacaacctgatcaccttcgacagcctggagcccatgcagctgctgcaggtgctgagcgacgtgctggccgagatcgaccccaagcagctggtggacatcagagaggagatgcccgagcagaccgccaagagaatgctgagcctgctgggcatcctgaagtacaagcccagcggcaacgccaccgacatgagcaccttcagacagggcctggtgatcggcagcaagcccgtgatctaccccgtgctgcactggctgctgcagagaaccaacgagctgaagaagagagcctacctggccagattcctgatcaagctggaggtgcccagcgagttcctgcaggacgagaccgtggccgacaccaacaagcagtacgaggagctgatggaggccttcaagaccctgcacaaggagtacgagcagctgaagatcagcggcttcagcaccgccgagatcagaaaggacatcagcgccatggaggaggagaaggaccagctgatcaagagagtggagcacctgaagaagagagtggagaccgcccagaaccaccagtggatgctgaagatcgccagacagctgagagtggagaaggagagagaggagtacctggcccagcagaagcaggagcagaagaaccagctgttccacgccgtgcagagactgcagagagtgcagaaccagctgaagagcatgagacaggccgccgccgacgccaagcccgagagcctgatgaagagactggaggaggagatcaagttcaacctgtacatggtgaccgagaagttccccaaggagctggagaacaagaagaaggagctgcacttcctgcagaaggtggtgagcgagcccgccatgggccacagcgacctgctggagctggagagcaagatcaacgagatcaacaccgagatcaaccagctgatcgagaagaagatgatgagaaacgagcccatcgagggcaagctgagcctgtacagacagcaggccagcatcatcagcagaaagaaggaggccaaggccgaggagctgcaggaggccaaggagaagctggccagcctggagagagaggccagcgtgaagagaaaccagaccagagagttcgacggcaccgaggtgctgaagggcgacgagagacaggacctgaccctgagccccagactggagtgcggcggcgtgatcatggcctactgcagcctgaagctgctgggcagcagcgacccccccaccagcgccagctag

SEQ ID NO: 10579 - DNA, 1119 bp, synthetic construct
  source 1..1119: mol_type = other DNA; note = Synthetic coding sequence
atggccagcagcgccagcgccagaacccccgccggcaagagagtgatcaaccaggaggagctgagaagactgatgaaggagaagcagagactgagcaccagcagaaagagaatcgagagccccttcgccaagtacaacagactgggccagctgagctgcgccctgtgcaacacccccgtgaagagcgagctgctgtggcagacccacgtgctgggcaagcagcacagagagaaggtggccgagctgaagggcgccaaggaggccagccagggcagcagcgccagcagcgccccccacagcgtgaagagaaaggcccccgacgccgacgaccaggacgtgaagagagccaaggccaccctggtgccccaggtgcagcccagcaccagcgcctggaccaccaacttcgacaagatcggcaaggagttcatcagagccacccccagcaagcccagcggcctgagcctgctgcccgactacgaggacgaggaggaggaggaggaggaggaggagggcgacggcgagagaaagagaggcgacgccagcaagcccctgagcgacgcccagggcaaggagcacagcgtgagcagcagcagagaggtgaccagcagcgtgctgcccaacgacttcttcagcaccaacccccccaaggcccccatcatcccccacagcggcagcatcgagaaggccgagatccacgagaaggtggtggagagaagagagaacaccgccgaggccctgcccgagggcttcttcgacgaccccgaggtggacgccagagtgagaaaggtggacgcccccaaggaccagatggacaaggagtgggacgagttccagaaggccatgagacaggtgaacaccatcagcgaggccatcgtggccgaggaggacgaggagggcagactggacagacagatcggcgagatcgacgagcagatcgagtgctacagaagagtggagaagctgagaaacagacaggacgagatcaagaacaagctgaaggagatcctgaccatcaaggagctgcagaagaaggaggaggagaacgccgacagcgacgacgagggcgagctgcaggacctgctgagccaggactggagagtgaagggcgccctgctgtag

SEQ ID NO: 10580 - DNA, 1782 bp, synthetic construct
  source 1..1782: mol_type = other DNA; note = Synthetic coding sequence
atgagcagacccagcagcagagccatctacctgcacagaaaggagtacagccagaacctgaccagcgagcccaccctgctgcagcacagagtggagcacctgatgacctgcaagcagggcagccagagagtgcagggccccgaggacgccctgcagaagctgttcgagatggacgcccagggcagagtgtggagccaggacctgatcctgcaggtgagagacggctggctgcagctgctggacatcgagaccaaggaggagctggacagctacagactggacagcatccaggccatgaacgtggccctgaacacctgcagctacaacagcatcctgagcatcaccgtgcaggagcccggcctgcccggcaccagcaccctgctgttccagtgccaggaggtgggcgccgagagactgaagaccagcctgcagaaggccctggaggaggagctggagcagagacccagactgggcggcctgcagcccggccaggacagatggagaggccccgccatggagagacccctgcccatggagcaggccagatacctggagcccggcatcccccccgagcagccccaccagagaaccctggagcacagcctgccccccagccccagacccctgcccagacacaccagcgccagagagcccagcgccttcaccctgcccccccccagaagaagcagcagccccgaggaccccgagagagacgaggaggtgctgaaccacgtgctgagagacatcgagctgttcatgggcaagctggagaaggcccaggccaagaccagcagaaagaagaagttcggcaagaagaacaaggaccagggcggcctgacccaggcccagtacatcgactgcttccagaagatcaagcacagcttcaacctgctgggcagactggccacctggctgaaggagaccagcgcccccgagctggtgcacatcctgttcaagagcctgaacttcatcctggccagatgccccgaggccggcctggccgcccaggtgatcagccccctgctgacccccaaggccatcaacctgctgcagagctgcctgagcccccccgagagcaacctgtggatgggcctgggccccgcctggaccaccagcagagccgactggaccggcgacgagcccctgccctaccagcccaccttcagcgacgactggcagctgcccgagcccagcagccaggcccccctgggctaccaggaccccgtgagcctgagaagaggcagccacagactgggcagcaccagccacttcccccaggagaagacccacaaccacgacccccagcccggcgaccccaacagcagacccagcagccccaagcccgcccagcccgccctgaagatgcaggtgctgtacgagttcgaggccagaaaccccagagagctgaccgtggtgcagggcgagaagctggaggtgctggaccacagcaagagatggtggctggtgaagaacgaggccggcagaagcggctacatccccagcaacatcctggagcccctgcagcccggcacccccggcacccagggccagagccccagcagagtgcccatgctgagactgagcagcagacccgaggaggtgaccgactggctgcaggccgagaacttcagcaccgccaccgtgagaaccctgggcagcctgaccggcagccagctgctgagaatcagacccggcgagctgcagatgctgtgcccccaggaggcccccagaatcctgagcagactggaggccgtgagaagaatgctgggcatcagcccctag

SEQ ID NO: 10581 - DNA, 1050 bp, synthetic construct
  source 1..1050: mol_type = other DNA; note = Synthetic coding sequence
atgaagctgaccagcgagaagctgcccaagaaccccttctacgccagcgtgagccagtacgccgccaagaaccagaagttcttccagtggaagaaggagaagaccgagagcgactacacccacgccaacctggtggacaaggccctgcagctgctgaaggagagaatcctgaagggcgacaccctggcctacttcctgagaggccagctgtacttcgaggagggctggtacgaggaggccctggagcagttcgaggagatcaaggagaaggaccaccaggccacctaccagctgggcgtgatgtactacgacggcctgggcaccaccctggacgccgagaagggcgtggactacatgaagaagatcctggacagcccctgccccaaggccagacacctgaagttcgccgccgcctacaacctgggcagagcctactacgagggcaagggcgtgaagagaagcaacgaggaggccgagagactgtggctgatcgccgccgacaacggcaaccccaaggccagcgtgaaggcccagagcatgctgggcctgtactacagcaccaaggagcccaaggagctggagaaggccttctactggcacagcgaggcctgcggcaacggcaacctggagagccagggcgccctgggcctgatgtacctgtacggccagggcatcagacaggacaccgaggccgccctgcagtgcctgagagaggccgccgagagaggcaacgtgtacgcccagggcaacctggtggagtactactacaagatgaagttcttcaccaagtgcgtggccttcagcaagagaatcgccgactacgacgaggtgcacgacatccccatgatcgcccaggtgaccgactgcctgcccgagttcatcggcagaggcatggccatggccagcttctaccacgccagatgcctgcagctgggcctgggcatcaccagagacgagaccaccgccaagcactactacagcaaggcctgcagactgaaccccgccctggccgacgagctgcacagcctgctgatcagacagagaatctag

SEQ ID NO: 10582 - DNA, 1236 bp, synthetic construct
  source 1..1236: mol_type = other DNA; note = Synthetic coding sequence
atgggcctgaagaagatgaagggcctgagctacgacgaggccttcgccatggccaacgaccccctggagggcttccacgaggtgaacctggccagccccaccagccccgacctgctgggcgtgtacgagagcggcacccaggagcagaccaccagccccagcgtgatctacagaccccaccccagcgccctgagcagcgtgcccatccaggccaacgccctggacgtgagcgagctgcccacccagcccgtgtacagcagccccagaagactgaactgcgccgagatcagcagcatcagcttccacgtgaccgaccccgccccctgcagcaccagcggcgtgaccgccggcctgaccaagctgaccaccagaaaggacaactacaacgccgagagagagttcctgcagggcgccaccatcaccgaggcctgcgacggcagcgacgacatcttcggcctgagcaccgacagcctgagcagactgagaagccccagcgtgctggaggtgagagagaagggctacgagagactgaaggaggagctggccaaggcccagagagagctgaagctgaaggacgaggagtgcgagagactgagcaaggtgagagaccagctgggccaggagctggaggagctgaccgccagcctgttcgaggaggcccacaagatggtgagagaggccaacatcaagcaggccaccgccgagaagcagctgaaggaggcccagggcaagatcgacgtgctgcaggccgaggtggccgccctgaagaccctggtgctgagcagcagccccaccagccccacccaggagcccctgcccggcggcaagacccccttcaagaagggccacaccagaaacaagagcaccagcagcgccatgagcggcagccaccaggacctgagcgtgatccagcccatcgtgaaggactgcaaggaggccgacctgagcctgtacaacgagttcagactgtggaaggacgagcccaccatggacagaacctgccccttcctggacaagatctaccaggaggacatcttcccctgcctgaccttcagcaagagcgagctggccagcgccgtgctggaggccgtggagaacaacaccctgagcatcgagcccgtgggcctgcagcccatcagattcgtgaaggccagcgccgtggagtgcggcggccccaagagcctgctgtacgtgaccttcctgcacaccttcgacaccttcagcagagacagctag

SEQ ID NO: 10583 - DNA, 2148 bp, synthetic construct
  source 1..2148: mol_type = other DNA; note = Synthetic coding sequence
atgttcggcagaaagagaagcgtgagcttcggcggcttcggctggatcgacaagaccatgctggccagcctgaaggtgaagaagcaggagctggccaacagcagcgacgccaccctgcccgacagacccctgagcccccccctgaccgccccccccaccatgaagagcagcgagttcttcgagatgctggagaagatgcaggacgactacatcccctaccccagcatcgacgaggtggtggagaagggcggcccctacccccaggtgatcctgccccagttcggcggctactggatcgaggaccccgagaacgtgggcacccccaccagcctgggcagcagcatctgcgaggaggaggaggaggacaacctgagccccaacaccttcggctacaagctggagtgcaagggcgaggccagagcctacagaagacacttcctgggcaaggaccacctgaacttctactgcaccggcagcagcctgggcaacctgatcctgagcgtgaagtgcgaggaggccgagggcatcgagtacctgagagtgatcctgagaagcaagctgaagaccgtgcacgagagaatccccctggccggcctgagcaagctgcccagcgtgccccagatcgccaaggccttctgcgacgacgccgtgggcctgagattcaaccccgtgctgtaccccaaggccagccagatgatcgtgagctacgacgagcacgaggtgaacaacaccttcaagttcggcgtgatctaccagaaggccagacagaccctggaggaggagctgttcggcaacaacgaggagagccccgccttcaaggagttcctggacctgctgggcgacaccatcaccctgcaggacttcaagggcttcagaggcggcctggacgtgacccacggccagaccggcgtggagagcgtgtacaccaccttcagagacagagagatcatgttccacgtgagcaccaagctgcccttcaccgacggcgacgcccagcagctgcagagaaagagacacatcggcaacgacatcgtggccatcatcttccaggaggagaacacccccttcgtgcccgacatgatcgccagcaacttcctgcacgcctacatcgtggtgcaggtggagacccccggcaccgagacccccagctacaaggtgagcgtgaccgccagagaggacgtgcccaccttcggcccccccctgcccagcccccccgtgttccagaagggccccgagttcagagagttcctgctgaccaagctgaccaacgccgagaacgcctgctgcaagagcgacaagttcgccaagctggaggacagaaccagagccgccctgctggacaacctgcacgacgagctgcacgcccacacccaggccatgctgggcctgggccccgaggaggacaagttcgagaacggcggccacggcggcttcctggagagcttcaagagagccatcagagtgagaagccacagcatggagaccatggtgggcggccagaagaagagccacagcggcggcatccccggcagcctgagcggcggcatcagccacaacagcatggaggtgaccaagaccaccttcagcccccccgtggtggccgccaccgtgaagaaccagagcagaagccccatcaagagaagaagcggcctgttccccagactgcacaccggcagcgagggccagggcgacagcagagccagatgcgacagcaccagcagcacccccaagacccccgacggcggccacagcagccaggagatcaagagcgagaccagcagcaaccccagcagccccgagatctgccccaacaaggagaagcccttcatgaagctgaaggagaacggcagagccatcagcagaagcagcagcagcaccagcagcgtgagcagcaccgccggcgagggcgaggccatggaggagggcgacagcggcggcagccagcccagcaccaccagccccttcaagcaggaggtgttcgtgtacagccccagccccagcagcgagagccccagcctgggcgccgccgccacccccatcatcatgagcagaagccccaccgacgccaagagcagaaacagccccagaagcaacctgaagttcagattcgacaagctgagccacgccagcagcggcgccggccactag

SEQ ID NO: 10584 - DNA, 2271 bp, synthetic construct
  source 1..2271: mol_type = other DNA; note = Synthetic coding sequence
atggaggaggagctgaagtgccccgtgtgcggcagcctgttcagagagcccatcatcctgccctgcagccacaacgtgtgcctgccctgcgccagaaccatcgccgtgcagacccccgacggcgagcagcacctgccccagcccctgctgctgagcagaggcagcggcctgcaggccggcgccgccgccgccgccagcctggagcacgacgccgccgccggccccgcctgcggcggcgccggcggcagcgccgccggcggcctgggcggcggcgccggcggcggcggcgaccacgccgacaagctgagcctgtacagcgagaccgacagcggctacggcagctacacccccagcctgaagagccccaacggcgtgagagtgctgcccatggtgcccgccccccccggcagcagcgccgccgccgccagaggcgccgcctgcagcagcctgagcagcagcagcagcagcatcacctgcccccagtgccacagaagcgccagcctggaccacagaggcctgagaggcttccagagaaacagactgctggaggccatcgtgcagagataccagcagggcagaggcgccgtgcccggcaccagcgccgccgccgccgtggccatctgccagctgtgcgacagaaccccccccgagcccgccgccaccctgtgcgagcagtgcgacgtgctgtactgcagcgcctgccagctgaagtgccaccccagcagaggccccttcgccaagcacagactggtgcagccccccccccccccccccccccccgccgaggccgccagcggccccaccggcaccgcccagggcgcccccagcggcggcggcggctgcaagagccccggcggcgccggcgccggcgccaccggcggcagcaccgccagaaagttccccacctgccccgagcacgagatggagaactacagcatgtactgcgtgagctgcagaacccccgtgtgctacctgtgcctggaggagggcagacacgccaagcacgaggtgaagcccctgggcgccatgtggaagcagcacaaggcccagctgagccaggccctgaacggcgtgagcgacaaggccaaggaggccaaggagttcctggtgcagctgaagaacatcctgcagcagatccaggagaacggcctggactacgaggcctgcctggtggcccagtgcgacgccctggtggacgccctgaccagacagaaggccaagctgctgaccaaggtgaccaaggagagagagcacaagctgaagatggtgtgggaccagatcaaccactgcaccctgaagctgagacagagcaccggcctgatggagtactgcctggaggtgatcaaggagaacgaccccagcggcttcctgcagatcagcgacgccctgatcaagagagtgcaggtgagccaggagcagtgggtgaagggcgccctggagcccaaggtgagcgccgagttcgacctgaccctggacagcgagcccctgctgcaggccatccaccagctggacttcatccagatgaagtgcagagtgccccccgtgcccctgctgcagctggagaagtgctgcaccagaaacaacagcgtgaccctggcctggagaatgccccccttcacccacagccccgtggacggctacatcctggagctggacgacggcgccggcggccagttcagagaggtgtacgtgggcaaggagaccctgtgcaccatcgacggcctgcacttcaacagcacctacaacgccagagtgaaggccttcaacagcagcggcgtgggcccctacagcaagaccgtggtgctgcagaccagcgacgtggcctggttcaccttcgaccccaacagcggccacagagacatcatcctgagcaacgacaaccagaccgccacctgcagcagctacgacgacagagtggtgctgggcaccgccgccttcagcaagggcgtgcactactgggagctgcacgtggacagatacgacaaccaccccgaccccgccttcggcgtggccagagccagcgtggtgaaggacatgatgctgggcaaggacgacaaggcctgggccatgtacgtggacaacaacagaagctggttcatgcactgcaacagccacaccaacagaaccgagggcggcgtgtgcaagggcgccaccgtgggcgtgctgctggacctgaacaagcacaccctgaccttcttcatcaacggccagcagcagggccccaccgccttcagccacgaggtgcagcccagcgtgaccagcctgttctag

SEQ ID NO: 10585 - DNA, 2352 bp, synthetic construct
  source 1..2352: mol_type = other DNA; note = Synthetic coding sequence
atggaggaggagctgaagtgccccgtgtgcggcagcctgttcagagagcccatcatcctgccctgcagccacaacgtgtgcctgccctgcgccagaaccatcgccgtgcagacccccgacggcgagcagcacctgccccagcccctgctgctgagcagaggcagcggcctgcaggccggcgccgccgccgccgccagcctggagcacgacgccgccgccggccccgcctgcggcggcgccggcggcagcgccgccggcggcctgggcggcggcgccggcggcggcggcgaccacgccgacaagctgagcctgtacagcgagaccgacagcggctacggcagctacacccccagcctgaagagccccaacggcgtgagagtgctgcccatggtgcccgccccccccggcagcagcgccgccgccgccagaggcgccgcctgcagcagcctgagcagcagcagcagcagcatcacctgcccccagtgccacagaagcgccagcctggaccacagaggcctgagaggcttccagagaaacagactgctggaggccatcgtgcagagataccagcagggcagaggcgccgtgcccggcaccagcgccgccgccgccgtggccatctgccagctgtgcgacagaaccccccccgagcccgccgccaccctgtgcgagcagtgcgacgtgctgtactgcagcgcctgccagctgaagtgccaccccagcagaggccccttcgccaagcacagactggtgcagccccccccccccccccccccccccgccgaggccgccagcggccccaccggcaccgcccagggcgcccccagcggcggcggcggctgcaagagccccggcggcgccggcgccggcgccaccggcggcagcaccgccagaaagttccccacctgccccgagcacgagatggagaactacagcatgtactgcgtgagctgcagaacccccgtgtgctacctgtgcctggaggagggcagacacgccaagcacgaggtgaagcccctgggcgccatgtggaagcagcacaaggcccagctgagccaggccctgaacggcgtgagcgacaaggccaaggaggccaaggagttcctggtgcagctgaagaacatcctgcagcagatccaggagaacggcctggactacgaggcctgcctggtggcccagtgcgacgccctggtggacgccctgaccagacagaaggccaagctgctgaccaaggtgaccaaggagagagagcacaagctgaagatggtgtgggaccagatcaaccactgcaccctgaagctgagacagagcaccggcctgatggagtactgcctggaggtgatcaaggagaacgaccccagcggcttcctgcagatcagcgacgccctgatcaagagagtgcaggtgagccaggagcagtgggtgaagggcgccctggagcccaaggtgagcgccgagttcgacctgaccctggacagcgagcccctgctgcaggccatccaccagctggacttcatccagatgaagtgcagagtgccccccgtgcccctgctgcagctggagaagtgctgcaccagaaacaacagcgtgaccctggcctggagaatgccccccttcacccacagccccgtggacggctacatcctggagctggacgacggcgccggcggccagttcagagaggtgtacgtgggcaaggagaccctgtgcaccatcgacggcctgcacttcaacagcacctacaacgccagagtgaaggccttcaacagcagcggcgtgggcccctacagcaagaccgtggtgctgcagaccagcgacgtggcctggttcaccttcgaccccaacagcggccacagagacatcatcctgagcaacgacaaccagaccgccacctgcagcagctacgacgacagagtggtgctgggcaccgccgccttcagcaagggcgtgcactactgggagctgcacgtggacagatacgacaaccaccccgaccccgccttcggcgtggccagagccagcgtggtgaaggacatgatgctgggcaaggacgacaaggcctgggccatgtacgtggacaacaacagaagctggttcatgcactgcaacagccacaccaacagaaccgagggcggcgtgtgcaagggcgccaccgtgggcgtgctgctggacctgaacaagcacaccctgaccttcttcatcaacggccagcagcagggccccaccgccttcagccacgtggacggcgtgttcatgcccgccctgagcctgaacagaaacgtgcaggtgaccctgcacaccggcctggaggtgcccaccaacctgggcagacccaagctgagcggcaactag

SEQ ID NO: 10586 - DNA, 471 bp, synthetic construct
  source 1..471: mol_type = other DNA; note = Synthetic coding sequence
atggtgcccgtgttcaccagcagcgccctgcccgtgaaggacgtggaggacaagcccgagcagcagaccagaaccagagagaccgacaagagccccaccagcaccgagcccagacagcagcccagcgccctgttcgccagaggcaacagaaaggccgtgaagagcccccagagaagcagcagcaagatcaaggagaacaagcaccccttcgccctgtacggctggggcgagaagcagaccgacaccggcagccagaagacccacaacgtgtgcgccagcgcccccgtgcacgagatccacgagagcgccctgagagccaagaacagaagacaggtggagaagagaaagctggtggcccagagacagagagcccacagcgtggacgtggagaagaacagaaagatgaaggccagcagcagcgagaacccctggatgaccgagtacatgagatgctacagcgccagagcctag

SEQ ID NO: 10587 - DNA, 813 bp, synthetic construct; identical to SEQ ID NO: 9598
  source 1..813: mol_type = other DNA; note = Synthetic coding sequence

SEQ ID NO: 10588 - DNA, 1158 bp, synthetic construct
  source 1..1158: mol_type = other DNA; note = Synthetic coding sequence
atggccgcccccgacctgagcaccaacctgcaggaggaggccacctgcgccatctgcctggactacttcaccgaccccgtgatgaccgactgcggccacaacttctgcagagagtgcatcagaagatgctggggccagcccgagggcccctacgcctgccccgagtgcagagagctgagcccccagagaaacctgagacccaacagacccctggccaagatggccgagatggccagaagactgcacccccccagccccgtgccccagggcgtgtgccccgcccacagagagcccctggccgccttctgcggcgacgagctgagactgctgtgcgccgcctgcgagagaagcggcgagcactgggcccacagagtgagacccctgcaggacgccgccgaggacctgaaggccaagctggagaagagcctggagcacctgagaaagcagatgcaggacgccctgctgttccaggcccaggccgacgagacctgcgtgctgtggcagaagatggtggagagccagagacagaacgtgctgggcgagttcgagagactgagaagactgctggccgaggaggagcagcagctgctgcagagactggaggaggaggagctggaggtgctgcccagactgagagagggcgccgcccacctgggccagcagagcgcccacctggccgagctgatcgccgagctggagggcagatgccagctgcccgccctgggcctgctgcaggacatcaaggacgccctgagaagagtgcaggacgtgaagctgcagccccccgaggtggtgcccatggagctgagaaccgtgtgcagagtgcccggcctggtggagaccctgagaagattcagaggcagatgcggcggccccagatggggcgacgacagcagaagaggccccgccaaggacctgggcagccagcccagagtgctgtgccccgccaccgccagcagcaagctgaccgtgagctggtggtgggtggtgggcaagaccagcagcgcccacaccagcgacatcagctgcgtgggcatcttcacccccaacaacagcagcaccagcggcaacgagctgggcatccagggcttccacagcgccctgaacagaatcgccagcgccgacaccaccggcgtgagcaccgaccccaccgactag

SEQ ID NO: 10589 - DNA, 1251 bp, synthetic construct
  source 1..1251: mol_type = other DNA; note = Synthetic coding sequence
atgcccctgtacaacgacagcttccacgagatcagccacaagggcagaagacacaccctggtgctgaagagcatccagagagccgacgccggcatcgtgagagccagcagcctgaaggtgagcaccagcgccagactggaggtgagagtgaagcccgtggtgttcctgaaggccctggacgacctgagcgccgaggagagaggcaccctggccctgcagtgcgaggtgagcgaccccgaggcccacgtggtgtggagaaaggacggcgtgcagctgggccccagcgacaagtacgacttcctgcacaccgccggcaccagaggcctggtggtgcacgacgtgagccccgaggacgccggcctgtacacctgccacgtgggcagcgaggagaccagagccagagtgagagtgcacgacctgcacgtgggcatcaccaagagactgaagaccatggaggtgctggagggcgagagctgcagcttcgagtgcgtgctgagccacgagagcgccagcgaccccgccatgtggaccgtgggcggcaagaccgtgggcagcagcagcagattccaggccaccagacagggcagaaagtacatcctggtggtgagagaggccgcccccagcgacgccggcgaggtggtgttcagcgtgagaggcctgaccagcaaggccagcctgatcgtgagagagagacccgccgccatcatcaagcccctggaggaccagtgggtggcccccggcgaggacgtggagctgagatgcgagctgagcagagccggcacccccgtgcactggctgaaggacagaaaggccatcagaaagagccagaagtacgacgtggtgtgcgagggcaccatggccatgctggtgatcagaggcgccagcctgaaggacgccggcgagtacacctgcgaggtggaggccagcaagagcaccgccagcctgcacgtggaggagaaggccaactgcttcaccgaggagctgaccaacctgcaggtggaggagaagggcaccgccgtgttcacctgcaagaccgagcaccccgccgccaccgtgacctggagaaagggcctgctggagctgagagccagcggcaagcaccagcccagccaggagggcctgaccctgagactgaccatcagcgccctggagaaggccgacagcgacacctacacctgcgacatcggccaggcccagagcagagcccagctgctggtgcagggcgaggccgccaagtgcgccagagcctag

SEQ ID NO: 10590 - DNA, 2130 bp, synthetic construct
  source 1..2130: mol_type = other DNA; note = Synthetic coding sequence
atggagaagcacagaggcgtgctggagtgccaggtgagcagagccagcgcccaggtgagatggttcaagggcagccaggagctgcagcccggccccaagtacgagctggtgagcgacggcctgtacagaaagctgatcatcagcgacgtgcacgccgaggacgaggacacctacacctgcgacgccggcgacgtgaagaccagcgcccagttcttcgtggaggagcagagcatcaccatcgtgagaggcctgcaggacgtgaccgtgatggagcccgcccccgcctggttcgagtgcgagaccagcatccccagcgtgagaccccccaagtggctgctgggcaagaccgtgctgcaggccggcggcaacgtgggcctggagcaggagggcaccgtgcacagactgatgctgagaagaacctgcagcaccatgaccggccccgtgcacttcaccgtgggcaagagcagaagcagcgccagactggtggtgagcgacatccccgtggtgctgaccagacccctggagcccaagaccggcagagagctgcagagcgtggtgctgagctgcgacttcagacccgcccccaaggccgtgcagtggtacaaggacgacacccccctgagccccagcgagaagttcaagatgagcctggagggccagatggccgagctgagaatcctgagactgatgcccgccgacgccggcgtgtacagatgccaggccggcagcgcccacagcagcaccgaggtgaccgtggaggccagagaggtgaccgtgaccggccccctgcaggacgccgaggccaccgaggagggctgggccagcttcagctgcgagctgagccacgaggacgaggaggtggagtggagcctgaacggcatgcccctgtacaacgacagcttccacgagatcagccacaagggcagaagacacaccctggtgctgaagagcatccagagagccgacgccggcatcgtgagagccagcagcctgaaggtgagcaccagcgccagactggaggtgagagtgaagcccgtggtgttcctgaaggccctggacgacctgagcgccgaggagagaggcaccctggccctgcagtgcgaggtgagcgaccccgaggcccacgtggtgtggagaaaggacggcgtgcagctgggccccagcgacaagtacgacttcctgcacaccgccggcaccagaggcctggtggtgcacgacgtgagccccgaggacgccggcctgtacacctgccacgtgggcagcgaggagaccagagccagagtgagagtgcacgacctgcacgtgggcatcaccaagagactgaagaccatggaggtgctggagggcgagagctgcagcttcgagtgcgtgctgagccacgagagcgccagcgaccccgccatgtggaccgtgggcggcaagaccgtgggcagcagcagcagattccaggccaccagacagggcagaaagtacatcctggtggtgagagaggccgcccccagcgacgccggcgaggtggtgttcagcgtgagaggcctgaccagcaaggccagcctgatcgtgagagagagacccgccgccatcatcaagcccctggaggaccagtgggtggcccccggcgaggacgtggagctgagatgcgagctgagcagagccggcacccccgtgcactggctgaaggacagaaaggccatcagaaagagccagaagtacgacgtggtgtgcgagggcaccatggccatgctggtgatcagaggcgccagcctgaaggacgccggcgagtacacctgcgaggtggaggccagcaagagcaccgccagcctgcacgtggaggagaaggccaactgcttcaccgaggagctgaccaacctgcaggtggaggagaagggcaccgccgtgttcacctgcaagaccgagcaccccgccgccaccgtgacctggagaaagggcctgctggagctgagagccagcggcaagcaccagcccagccaggagggcctgaccctgagactgaccatcagcgccctggagaaggccgacagcgacacctacacctgcgacatcggccaggcccagagcagagcccagctgctggtgcagggcgaggccgccaagtgcgccagagcctag

SEQ ID NO: 10591 - DNA, 16809 bp, synthetic construct
  source 1..16809: mol_type = other DNA; note = Synthetic coding sequence
atgctggtgatcagaggcgccagcctgaaggacgccggcgagtacacctgcgaggtggaggccagcaagagcaccgccagcctgcacgtggaggagaaggccaactgcttcaccgaggagctgaccaacctgcaggtggaggagaagggcaccgccgtgttcacctgcaagaccgagcaccccgccgccaccgtgacctggagaaagggcctgctggagctgagagccagcggcaagcaccagcccagccaggagggcctgaccctgagactgaccatcagcgccctggagaaggccgacagcgacacctacacctgcgacatcggccaggcccagagcagagcccagctgctggtgcagggcagaagagtgcacatcatcgaggacctggaggacgtggacgtgcaggagggcagcagcgccaccttcagatgcagaatcagccccgccaactacgagcccgtgcactggttcctggacaagacccccctgcacgccaacgagctgaacgagatcgacgcccagcccggcggctaccacgtgctgaccctgagacagctggccctgaaggacagcggcaccatctacttcgaggccggcgaccagagagccagcgccgccctgagagtgaccgagaagcccagcgtgttcagcagagagctgaccgacgccaccatcaccgagggcgaggacctgaccctggtgtgcgagaccagcacctgcgacatccccgtgtgctggaccaaggacggcaagaccctgagaggcagcgccagatgccagctgagccacgagggccacagagcccagctgctgatcaccggcgccaccctgcaggacagcggcagatacaagtgcgaggccggcggcgcctgcagcagcagcatcgtgagagtgcacgccagacccgtgagattccaggaggccctgaaggacctggaggtgctggagggcggcgccgccaccctgagatgcgtgctgagcagcgtggccgcccccgtgaagtggtgctacggcaacaacgtgctgagacccggcgacaagtacagcctgagacaggagggcgccatgctggagctggtggtgagaaacctgagaccccaggacagcggcagatacagctgcagcttcggcgaccagaccaccagcgccaccctgaccgtgaccgccctgcccgcccagttcatcggcaagctgagaaacaaggaggccaccgagggcgccaccgccaccctgagatgcgagctgagcaaggccgcccccgtggagtggagaaagggcagcgagaccctgagagacggcgacagatactgcctgagacaggacggcgccatgtgcgagctgcagatcagaggcctggccatggtggacgccgccgagtacagctgcgtgtgcggcgaggagagaaccagcgccagcctgaccatcagacccatgcccgcccacttcatcggcagactgagacaccaggagagcatcgagggcgccaccgccaccctgagatgcgagctgagcaaggccgcccccgtggagtggagaaagggcagagagagcctgagagacggcgacagacacagcctgagacaggacggcgccgtgtgcgagctgcagatctgcggcctggccgtggccgacgccggcgagtacagctgcgtgtgcggcgaggagagaaccagcgccaccctgaccgtgaaggccctgcccgccaagttcaccgagggcctgagaaacgaggaggccgtggagggcgccaccgccatgctgtggtgcgagctgagcaaggtggcccccgtggagtggagaaagggccccgagaacctgagagacggcgacagatacatcctgagacaggagggcaccagatgcgagctgcagatctgcggcctggccatggccgacgccggcgagtacctgtgcgtgtgcggccaggagagaaccagcgccaccctgaccatcagagccctgcccgccagattcatcgaggacgtgaagaaccaggaggccagagagggcgccaccgccgtgctgcagtgcgagctgaacagcgccgcccccgtggagtggagaaagggcagcgagaccctgagagacggcgacagatacagcctgagacaggacggcaccaagtgcgagctgcagatcagaggcctggccatggccgacaccggcgagtacagctgcgtgtgcggccaggagagaaccagcgccatgctgaccgtgagagccctgcccatcaagttcaccgagggcctgagaaacgaggaggccaccgagggcgccaccgccgtgctgagatgcgagctgagcaagatggcccccgtggagtggtggaagggccacgagaccctgagagacggcgacagacacagcctgagacaggacggcgccagatgcgagctgcagatcagaggcctggtggccgaggacgccggcgagtacctgtgcatgtgcggcaaggagagaaccagcgccatgctgaccgtgagagccatgcccagcaagttcatcgagggcctgagaaacgaggaggccaccgagggcgacaccgccaccctgtggtgcgagctgagcaaggccgcccccgtggagtggagaaagggccacgagaccctgagagacggcgacagacacagcctgagacaggacggcagcagatgcgagctgcagatcagaggcctggccgtggtggacgccggcgagtacagctgcgtgtgcggccaggagagaaccagcgccaccctgaccgtgagagccctgcccgccagattcatcgaggacgtgaagaaccaggaggccagagagggcgccaccgccgtgctgcagtgcgagctgagcaaggccgcccccgtggagtggagaaagggcagcgagaccctgagaggcggcgacagatacagcctgagacaggacggcaccagatgcgagctgcagatccacggcctgagcgtggccgacaccggcgagtacagctgcgtgtgcggccaggagagaaccagcgccaccctgaccgtgagagccctgcccgccagattcacccaggacctgaagaccaaggaggccagcgagggcgccaccgccaccctgcagtgcgagctgagcaaggtggcccccgtggagtggaagaagggccccgagaccctgagagacggcggcagatacagcctgaagcaggacggcaccagatgcgagctgcagatccacgacctgagcgtggccgacgccggcgagtacagctgcatgtgcggccaggagagaaccagcgccaccctgaccgtgagagccctgcccgccagattcaccgagggcctgagaaacgaggaggccatggagggcgccaccgccaccctgcagtgcgagctgagcaaggccgcccccgtggagtggagaaagggcctggaggccctgagagacggcgacaagtacagcctgagacaggacggcgccgtgtgcgagctgcagatccacggcctggccatggccgacaacggcgtgtacagctgcgtgtgcggccaggagagaaccagcgccaccctgaccgtgagagccctgcccgccagattcatcgaggacatgagaaaccagaaggccaccgagggcgccaccgtgaccctgcagtgcaagctgagaaaggccgcccccgtggagtggagaaagggccccaacaccctgaaggacggcgacagatacagcctgaagcaggacggcaccagctgcgagctgcagatcagaggcctggtgatcgccgacgccggcgagtacagctgcatctgcgagcaggagagaaccagcgccaccctgaccgtgagagccctgcccgccagattcatcgaggacgtgagaaaccacgaggccaccgagggcgccaccgccgtgctgcagtgcgagctgagcaaggccgcccccgtggagtggagaaagggcagcgagaccctgagagacggcgacagatacagcctgagacaggacggcaccagatgcgagctgcagatcagaggcctggccgtggaggacaccggcgagtacctgtgcgtgtgcggccaggagagaaccagcgccaccctgaccgtgagagccctgcccgccagattcatcgacaacatgaccaaccaggaggccagagagggcgccaccgccaccctgcactgcgagctgagcaaggtggcccccgtggagtggagaaagggccccgagaccctgagagacggcgacagacacagcctgagacaggacggcaccagatgcgagctgcagatcagaggcctgagcgtggccgacgccggcgagtacagctgcgtgtgcggccaggagagaaccagcgccaccctgaccatcagagaggccaccgagggcgccaccgccatgctgcagtgcgagctgagcaaggtggcccccgtggagtggagaaagggccccgagaccctgagagacggcgacagatacaacctgagacaggacggcaccagatgcgagctgcagatccacggcctgagcgtggccgacaccggcgagtacagctgcgtgtgcggccaggagaagaccagcgccaccctgaccgtgaaggccccccagcccgtgttcagagagcccctgcagagcctgcaggccgaggagggcagcaccgccaccctgcagtgcgagctgagcgagcccaccgccaccgtggtgtggagcaagggcggcctgcagctgcaggccaacggcagaagagagcccagactgcagggctgcaccgccgagctggtgctgcaggacctgcagagagaggacaccggcgagtacacctgcacctgcggcagccaggccaccagcgccaccctgaccgtgaccgccgcccccgtgagattcctgagagagctgcagcaccaggaggtggacgagggcggcaccgcccacctgtgctgcgagctgagcagagccggcgccagcgtggagtggagaaagggcagcctgcagctgttcccctgcgccaagtaccagatggtgcaggacggcgccgccgccgagctgctggtgagaggcgtggagcaggaggacgccggcgactacacctgcgacaccggccacacccagagcatggccagcctgagcgtgagagtgcccagacccaagttcaagaccagactgcagagcctggagcaggagaccggcgacatcgccagactgtgctgccagctgagcgacgccgagagcggcgccgtggtgcagtggctgaaggagggcgtggagctgcacgccggccccaagtacgagatgagaagccagggcgccaccagagagctgctgatccaccagctggaggccaaggacaccggcgagtacgcctgcgtgaccggcggccagaagaccgccgccagcctgagagtgaccgagcccgaggtgaccatcgtgagaggcctggtggacgccgaggtgaccgccgacgaggacgtggagttcagctgcgaggtgagcagagccggcgccaccggcgtgcagtggtgcctgcagggcctgcccctgcagagcaacgaggtgaccgaggtggccgtgagagacggcagaatccacaccctgagactgaagggcgtgacccccgaggacgccggcaccgtgagcttccacctgggcaaccacgccagcagcgcccagctgaccgtgagagcccccgaggtgaccatcctggagcccctgcaggacgtgcagctgagcgagggccaggacgccagcttccagtgcagactgagcagagccagcggccaggaggccagatgggccctgggcggcgtgcccctgcaggccaacgagatgaacgacatcaccgtggagcagggcaccctgcacctgctgaccctgcacaaggtgaccctggaggacgccggcaccgtgagcttccacgtgggcacctgcagcagcgaggcccagctgaaggtgaccgccaagaacaccgtggtgagaggcctggagaacgtggaggccctggagggcggcgaggccctgttcgagtgccagctgagccagcccgaggtggccgcccacacctggctgctggacgacgagcccgtgcacaccagcgagaacgccgaggtggtgttcttcgagaacggcctgagacacctgctgctgctgaagaacctgagaccccaggacagctgcagagtgaccttcctggccggcgacatggtgaccagcgccttcctgaccgtgagaggctggagactggagatcctggagcccctgaagaacgccgccgtgagagccggcgcccaggcctgcttcacctgcaccctgagcgaggccgtgcccgtgggcgaggccagctggtacatcaacggcgccgccgtgcagcccgacgacagcgactggaccgtgaccgccgacggcagccaccacgccctgctgctgagaagcgcccagccccaccacgccggcgaggtgaccttcgcctgcagagacgccgtggccagcgccagactgaccgtgctgggcctgcccgacccccccgaggacgccgaggtggtggccagaagcagccacaccgtgaccctgagctgggccgcccccatgagcgacggcggcggcggcctgtgcggctacagagtggaggtgaaggagggcgccaccggccagtggagactgtgccacgagctggtgcccggccccgagtgcgtggtggacggcctggcccccggcgagacctacagattcagagtggccgccgtgggccccgtgggcgccggcgagcccgtgcacctgccccagaccgtgagactggccgagccccccaagcccgtgcccccccagcccagcgcccccgagagcagacaggtggccgccggcgaggacgtgagcctggagctggaggtggtggccgaggccggcgaggtgatctggcacaagggcatggagagaatccagcccggcggcagattcgaggtggtgagccagggcagacagcagatgctggtgatcaagggcttcaccgccgaggaccagggcgagtaccactgcggcctggcccagggcagcatctgccccgccgccgccaccttccaggtggccctgagccccgccagcgtggacgaggccccccagcccagcctgccccccgaggccgcccaggagggcgacctgcacctgctgtgggaggccctggccagaaagagaagaatgagcagagagcccaccctggacagcatcagcgagctgcccgaggaggacggcagaagccagagactgccccaggaggccgaggaggtggcccccgacctgagcgagggctacagcaccgccgacgagctggccagaaccggcgacgccgacctgagccacaccagcagcgacgacgagagcagagccggcacccccagcctggtgacctacctgaagaaggccggcagacccggcaccagccccctggccagcaaggtgggcgcccccgccgcccccagcgtgaagccccagcagcagcaggagcccctggccgccgtgagaccccccctgggcgacctgagcaccaaggacctgggcgaccccagcatggacaaggccgccgtgaagatccaggccgccttcaagggctacaaggtgagaaaggagatgaagcagcaggagggccccatgttcagccacaccttcggcgacaccgaggcccaggtgggcgacgccctgagactggagtgcgtggtggccagcaaggccgacgtgagagccagatggctgaaggacggcgtggagctgaccgacggcagacaccaccacatcgaccagctgggcgacggcacctgcagcctgctgatcaccggcctggacagagccgacgccggctgctacacctgccaggtgagcaacaagttcggccaggtgacccacagcgcctgcgtggtggtgagcggcagcgagagcgaggccgagagcagcagcggcggcgagctggacgacgccttcagaagagccgccagaagactgcacagactgttcagaaccaagagccccgccgaggtgagcgacgaggagctgttcctgagcgccgacgagggccccgccgagcccgaggagcccgccgactggcagacctacagagaggacgagcacttcatctgcatcagattcgaggccctgaccgaggccagacaggccgtgaccagattccaggagatgttcgccaccctgggcatcggcgtggagatcaagctggtggagcagggccccagaagagtggagatgtgcatcagcaaggagacccccgcccccgtggtgccccccgagcccctgcccagcctgctgaccagcgacgccgcccccgtgttcctgaccgagctgcagaaccaggaggtgcaggacggctaccccgtgagcttcgactgcgtggtgaccggccagcccatgcccagcgtgagatggttcaaggacggcaagctgctggaggaggacgaccactacatgatcaacgaggaccagcagggcggccaccagctgatcatcaccgccgtggtgcccgccgacatgggcgtgtacagatgcctggccgagaacagcatgggcgtgagcagcaccaaggccgagctgagagtggacctgaccagcaccgactacgacaccgccgccgacgccaccgagagcagcagctacttcagcgcccagggctacctgagcagcagagagcaggagggcaccgagagcaccaccgacgagggccagctgccccaggtggtggaggagctgagagacctgcaggtggcccccggcaccagactggccaagttccagctgaaggtgaagggctaccccgcccccagactgtactggttcaaggacggccagcccctgaccgccagcgcccacatcagaatgaccgacaagaagatcctgcacaccctggagatcatcagcgtgaccagagaggacagcggccagtacgccgcctacatcagcaacgccatgggcgccgcctacagcagcgccagactgctggtgagaggccccgacgagcccgaggagaagcccgccagcgacgtgcacgagcagctggtgccccccagaatgctggagagattcacccccaagaaggtgaagaagggcagcagcatcaccttcagcgtgaaggtggagggcagacccgtgcccaccgtgcactggctgagagaggaggccgagagaggcgtgctgtggatcggccccgacacccccggctacaccgtggccagcagcgcccagcagcacagcctggtgctgctggacgtgggcagacagcaccagggcacctacacctgcatcgccagcaacgccgccggccaggccctgtgcagcgccagcctgcacgtgagcggcctgcccaaggtggaggagcaggagaaggtgaaggaggccctgatcagcaccttcctgcagggcaccacccaggccatcagcgcccagggcctggagaccgccagcttcgccgacctgggcggccagagaaaggaggagcccctggccgccaaggaggccctgggccacctgagcctggccgaggtgggcaccgaggagttcctgcagaagctgaccagccagatcaccgagatggtgagcgccaagatcacccaggccaagctgcaggtgcccggcggcgacagcgacgaggacagcaagacccccagcgccagccccagacacggcagaagcagacccagcagcagcatccaggagagcagcagcgagagcgaggacggcgacgccagaggcgagatcttcgacatctacgtggtgaccgccgactacctgcccctgggcgccgagcaggacgccatcaccctgagagagggccagtacgtggaggtgctggacgccgcccaccccctgagatggctggtgagaaccaagcccaccaagagcagccccagcagacagggctgggtgagccccgcctacctggacagaagactgaagctgagccccgagtggggcgccgccgaggcccccgagttccccggcgaggccgtgagcgaggacgagtacaaggccagactgagcagcgtgatccaggagctgctgagcagcgagcaggccttcgtggaggagctgcagttcctgcagagccaccacctgcagcacctggagagatgcccccacgtgcccatcgccgtggccggccagaaggccgtgatcttcagaaacgtgagagacatcggcagattccacagcagcttcctgcaggagctgcagcagtgcgacaccgacgacgacgtggccatgtgcttcatcaagaaccaggccgccttcgagcagtacctggagttcctggtgggcagagtgcaggccgagagcgtggtggtgagcaccgccatccaggagttctacaagaagtacgccgaggaggccctgctggccggcgaccccagccagcccccccccccccccctgcagcactacctggagcagcccgtggagagagtgcagagataccaggccctgctgaaggagctgatcagaaacaaggccagaaacagacagaactgcgccctgctggagcaggcctacgccgtggtgagcgccctgccccagagagccgagaacaagctgcacgtgagcctgatggagaactaccccggcaccctgcaggccctgggcgagcccatcagacagggccacttcatcgtgtgggagggcgcccccggcgccagaatgccctggaagggccacaacagacacgtgttcctgttcagaaaccacctggtgatctgcaagcccagaagagacagcagaaccgacaccgtgagctacgtgttcagaaacatgatgaagctgagcagcatcgacctgaacgaccaggtggagggcgacgacagagccttcgaggtgtggcaggagagagaggacagcgtgagaaagtacctgctgcaggccagaaccgccatcatcaagagcagctgggtgaaggagatctgcggcatccagcagagactggccctgcccgtgtggagaccccccgacttcgaggaggagctggccgactgcaccgccgagctgggcgagaccgtgaagctggcctgcagagtgaccggcacccccaagcccgtgatcagctggtacaaggacggcaaggccgtgcaggtggacccccaccacatcctgatcgaggaccccgacggcagctgcgccctgatcctggacagcctgaccggcgtggacagcggccagtacatgtgcttcgccgccagcgccgccggcaactgcagcaccctgggcaagatcctggtgcaggtgccccccagattcgtgaacaaggtgagagccagccccttcgtggagggcgaggacgcccagttcacctgcaccatcgagggcgccccctacccccagatcagatggtacaaggacggcgccctgctgaccaccggcaacaagttccagaccctgagcgagcccagaagcggcctgctggtgctggtgatcagagccgccagcaaggaggacctgggcctgtacgagtgcgagctggtgaacagactgggcagcgccagagccagcgccgagctgagaatccagagccccatgctgcaggcccaggagcagtgccacagagagcagctggtggccgccgtggaggacaccaccctggagagagccgaccaggaggtgaccagcgtgctgaagagactgctgggccccaaggcccccggccccagcaccggcgacctgaccggccccggcccctgccccagaggcgcccccgccctgcaggagaccggcagccagccccccgtgaccggcaccagcgaggcccccgccgtgccccccagagtgccccagcccctgctgcacgagggccccgagcaggagcccgaggccatcgccagagcccaggagtggaccgtgcccatcagaatggagggcgccgcctggcccggcgccggcaccggcgagctgctgtgggacgtgcacagccacgtggtgagagagaccacccagagaacctacacctaccaggccatcgacacccacaccgccagaccccccagcatgcaggtgaccatcgaggacgtgcaggcccagaccggcggcaccgcccagttcgaggccatcatcgagggcgacccccagcccagcgtgacctggtacaaggacagcgtgcagctggtggacagcaccagactgagccagcagcaggagggcaccacctacagcctggtgctgagacacgtggccagcaaggacgccggcgtgtacacctgcctggcccagaacaccggcggccaggtgctgtgcaaggccgagctgctggtgctgggcggcgacaacgagcccgacagcgagaagcagagccacagaagaaagctgcacagcttctacgaggtgaaggaggagatcggcagaggcgtgttcggcttcgtgaagagagtgcagcacaagggcaacaagatcctgtgcgccgccaagttcatccccctgagaagcagaaccagagcccaggcctacagagagagagacatcctggccgccctgagccaccccctggtgaccggcctgctggaccagttcgagaccagaaagaccctgatcctgatcctggagctgtgcagcagcgaggagctgctggacagactgtacagaaagggcgtggtgaccgaggccgaggtgaaggtgtacatccagcagctggtggagggcctgcactacctgcacagccacggcgtgctgcacctggacatcaagcccagcaacatcctgatggtgcaccccgccagagaggacatcaagatctgcgacttcggcttcgcccagaacatcacccccgccgagctgcagttcagccagtacggcagccccgagttcgtgagccccgagatcatccagcagaaccccgtgagcgaggccagcgacatctgggccatgggcgtgatcagctacctgagcctgacctgcagcagccccttcgccggcgagagcgacagagccaccctgctgaacgtgctggagggcagagtgagctggagcagccccatggccgcccacctgagcgaggacgccaaggacttcatcaaggccaccctgcagagagccccccaggccagacccagcgccgcccagtgcctgagccacccctggttcctgaagagcatgcccgccgaggaggcccacttcatcaacaccaagcagctgaagttcctgctggccagaagcagatggcagagaagcctgatgagctacaagagcatcctggtgatgagaagcatccccgagctgctgagaggcccccccgacagccccagcctgggcgtggccagacacctgtgcagagacaccggcggcagcagcagcagcagcagcagcagcgacaacgagctggcccccttcgccagagccaagagcctgccccccagccccgtgacccacagccccctgctgcaccccagaggcttcctgagacccagcgccagcctgcccgaggaggccgaggccagcgagagaagcaccgaggcccccgccccccccgccagccccgagggcgccggcccccccgccgcccagggctgcgtgcccagacacagcgtgatcagaagcctgttctaccaccaggccggcgagagccccgagcacggcgccctggcccccggcagcagaagacaccccgccagaagaagacacctgctgaagggcggctacatcgccggcgccctgcccggcctgagagagcccctgatggagcacagagtgctggaggaggaggccgccagagaggagcaggccaccctgctggccaaggcccccagcttcgagaccgccctgagactgcccgccagcggcacccacctggcccccggccacagccacagcctggagcacgacagccccagcacccccagacccagcagcgaggcctgcggcgaggcccagagactgcccagcgcccccagcggcggcgcccccatcagagacatgggccacccccagggcagcaagcagctgcccagcaccggcggccaccccggcaccgcccagcccgagagacccagccccgacagcccctggggccagcccgcccccttctgccaccccaagcagggcagcgccccccaggagggctgcagcccccaccccgccgtggccccctgcccccccggcagcttcccccccggcagctgcaaggaggcccccctggtgcccagcagccccttcctgggccagccccaggccccccccgcccccgccaaggccagcccccccctggacagcaagatgggccccggcgacatcagcctgcccggcagacccaagcccggcccctgcagcagccccggcagcgccagccaggccagcagcagccaggtgagcagcctgagagtgggcagcagccaggtgggcaccgagcccggccccagcctggacgccgagggctggacccaggaggccgaggacctgagcgacagcacccccaccctgcagagaccccaggagcaggccaccatgagaaagttcagcctgggcggcagaggcggctacgccggcgtggccggctacggcaccttcgccttcggcggcgacgccggcggcatgctgggccagggccccatgtgggccagaatcgcctgggccgtgagccagagcgaggaggaggagcaggaggaggccagagccgagagccagagcgaggagcagcaggaggccagagccgagagccccctgccccaggtgagcgccagacccgtgcccgaggtgggcagagcccccaccagaagcagccccgagcccaccccctgggaggacatcggccaggtgagcctggtgcagatcagagacctgagcggcgacgccgaggccgccgacaccatcagcctggacatcagcgaggtggaccccgcctacctgaacctgagcgacctgtacgacatcaagtacctgcccttcgagttcatgatcttcagaaaggtgcccaagagcgcccagcccgagccccccagccccatggccgaggaggagctggccgagttccccgagcccacctggccctggcccggcgagctgggcccccacgccggcctggagatcaccgaggagagcgaggacgtggacgccctgctggccgaggccgccgtgggcagaaagagaaagtggagcagccccagcagaagcctgttccacttccccggcagacacctgcccctggacgagcccgccgagctgggcctgagagagagagtgaaggccagcgtggagcacatcagcagaatcctgaagggcagacccgagggcctggagaaggagggcccccccagaaagaagcccggcctggccagcttcagactgagcggcctgaagagctgggacagagcccccaccttcctgagagagctgagcgacgagaccgtggtgctgggccagagcgtgaccctggcctgccaggtgagcgcccagcccgccgcccaggccacctggagcaaggacggcgcccccctggagagcagcagcagagtgctgatcagcgccaccctgaagaacttccagctgctgaccatcctggtggtggtggccgaggacctgggcgtgtacacctgcagcgtgagcaacgccctgggcaccgtgaccaccaccggcgtgctgagaaaggccgagagacccagcagcagcccctgccccgacatcggcgaggtgtacgccgacggcgtgctgctggtgtggaagcccgtggagagctacggccccgtgacctacatcgtgcagtgcagcctggagggcggcagctggaccaccctggccagcgacatcttcgactgctgctacctgaccagcaagctgagcagaggcggcacctacaccttcagaaccgcctgcgtgagcaaggccggcatgggcccctacagcagccccagcgagcaggtgctgctgggcggccccagccacctggccagcgaggaggagagccagggcagaagcgcccagcccctgcccagcaccaagaccttcgccttccagacccagatccagagaggcagattcagcgtggtgagacagtgctgggagaaggccagcggcagagccctggccgccaagatcatcccctaccaccccaaggacaagaccgccgtgctgagagagtacgaggccctgaagggcctgagacacccccacctggcccagctgcacgccgcctacctgagccccagacacctggtgctgatcctggagctgtgcagcggccccgagctgctgccctgcctggccgagagagccagctacagcgagagcgaggtgaaggactacctgtggcagatgctgagcgccacccagtacctgcacaaccagcacatcctgcacctggacctgagaagcgagaacatgatcatcaccgagtacaacctgctgaaggtggtggacctgggcaacgcccagagcctgagccaggagaaggtgctgcccagcgacaagttcaaggactacctggagaccatggcccccgagctgctggagggccagggcgccgtgccccagaccgacatctgggccatcggcgtgaccgccttcatcatgctgagcgccgagtaccccgtgagcagcgagggcgccagagacctgcagagaggcctgagaaagggcctggtgagactgagcagatgctacgccggcctgagcggcggcgccgtggccttcctgagaagcaccctgtgcgcccagccctggggcagaccctgcgccagcagctgcctgcagtgcccctggctgaccgaggagggccccgcctgcagcagacccgcccccgtgaccttccccaccgccagactgagagtgttcgtgagaaacagagagaagagaagagccctgctgtacaagagacacaacctggcccaggtgagatag

SEQ ID NO: 10592 - DNA, 11220 bp, synthetic construct
  source 1..11220: mol_type = other DNA; note = Synthetic coding sequence
atgctggtgatcagaggcgccagcctgaaggacgccggcgagtacacctgcgaggtggaggccagcaagagcaccgccagcctgcacgtggaggagaaggccaactgcttcaccgaggagctgaccaacctgcaggtggaggagaagggcaccgccgtgttcacctgcaagaccgagcaccccgccgccaccgtgacctggagaaagggcctgctggagctgagagccagcggcaagcaccagcccagccaggagggcctgaccctgagactgaccatcagcgccctggagaaggccgacagcgacacctacacctgcgacatcggccaggcccagagcagagcccagctgctggtgcagggcagaagagtgcacatcatcgaggacctggaggacgtggacgtgcaggagggcagcagcgccaccttcagatgcagaatcagccccgccaactacgagcccgtgcactggttcctggacaagacccccctgcacgccaacgagctgaacgagatcgacgcccagcccggcggctaccacgtgctgaccctgagacagctggccctgaaggacagcggcaccatctacttcgaggccggcgaccagagagccagcgccgccctgagagtgaccgagaagcccagcgtgttcagcagagagctgaccgacgccaccatcaccgagggcgaggacctgaccctggtgtgcgagaccagcacctgcgacatccccgtgtgctggaccaaggacggcaagaccctgagaggcagcgccagatgccagctgagccacgagggccacagagcccagctgctgatcaccggcgccaccctgcaggacagcggcagatacaagtgcgaggccggcggcgcctgcagcagcagcatcgtgagagtgcacgccagacccgtgagattccaggaggccctgaaggacctggaggtgctggagggcggcgccgccaccctgagatgcgtgctgagcagcgtggccgcccccgtgaagtggtgctacggcaacaacgtgctgagacccggcgacaagtacagcctgagacaggagggcgccatgctggagctggtggtgagaaacctgagaccccaggacagcggcagatacagctgcagcttcggcgaccagaccaccagcgccaccctgaccgtgaccgccctgcccgcccagttcatcggcaagctgagaaacaaggaggccaccgagggcgccaccgccaccctgagatgcgagctgagcaaggccgcccccgtggagtggagaaagggcagcgagaccctgagagacggcgacagatactgcctgagacaggacggcgccatgtgcgagctgcagatcagaggcctggccatggtggacgccgccgagtacagctgcgtgtgcggcgaggagagaaccagcgccagcctgaccatcagacccatgcccgcccacttcatcggcagactgagacaccaggagagcatcgagggcgccaccgccaccctgagatgcgagctgagcaaggccgcccccgtggagtggagaaagggcagagagagcctgagagacggcgacagacacagcctgagacaggacggcgccgtgtgcgagctgcagatctgcggcctggccgtggccgacgccggcgagtacagctgcgtgtgcggcgaggagagaaccagcgccaccctgaccgtgaaggccctgcccgccaagttcaccgagggcctgagaaacgaggaggccgtggagggcgccaccgccatgctgtggtgcgagctgagcaaggtggcccccgtggagtggagaaagggccccgagaacctgagagacggcgacagatacatcctgagacaggagggcaccagatgcgagctgcagatctgcggcctggccatggccgacgccggcgagtacctgtgcgtgtgcggccaggagagaaccagcgccaccctgaccatcagagccctgcccgccagattcatcgaggacgtgaagaaccaggaggccagagagggcgccaccgccgtgctgcagtgcgagctgaacagcgccgcccccgtggagtggagaaagggcagcgagaccctgagagacggcgacagatacagcctgagacaggacggcaccaagtgcgagctgcagatcagaggcctggccatggccgacaccggcgagtacagctgcgtgtgcggccaggagagaaccagcgccatgctgaccgtgagagccctgcccatcaagttcaccgagggcctgagaaacgaggaggccaccgagggcgccaccgccgtgctgagatgcgagctgagcaagatggcccccgtggagtggtggaagggccacgagaccctgagagacggcgacagacacagcctgagacaggacggcgccagatgcgagctgcagatcagaggcctggtggccgaggacgccggcgagtacctgtgcatgtgcggcaaggagagaaccagcgccatgctgaccgtgagagccatgcccagcaagttcatcgagggcctgagaaacgaggaggccaccgagggcgacaccgccaccctgtggtgcgagctgagcaaggccgcccccgtggagtggagaaagggccacgagaccctgagagacggcgacagacacagcctgagacaggacggcagcagatgcgagctgcagatcagaggcctggccgtggtggacgccggcgagtacagctgcgtgtgcggccaggagagaaccagcgccaccctgaccgtgagagccctgcccgccagattcatcgaggacgtgaagaaccaggaggccagagagggcgccaccgccgtgctgcagtgcgagctgagcaaggccgcccccgtggagtggagaaagggcagcgagaccctgagaggcggcgacagatacagcctgagacaggacggcaccagatgcgagctgcagatccacggcctgagcgtggccgacaccggcgagtacagctgcgtgtgcggccaggagagaaccagcgccaccctgaccgtgagagccccccagcccgtgttcagagagcccctgcagagcctgcaggccgaggagggcagcaccgccaccctgcagtgcgagctgagcgagcccaccgccaccgtggtgtggagcaagggcggcctgcagctgcaggccaacggcagaagagagcccagactgcagggctgcaccgccgagctggtgctgcaggacctgcagagagaggacaccggcgagtacacctgcacctgcggcagccaggccaccagcgccaccctgaccgtgaccgccgcccccgtgagattcctgagagagctgcagcaccaggaggtggacgagggcggcaccgcccacctgtgctgcgagctgagcagagccggcgccagcgtggagtggagaaagggcagcctgcagctgttcccctgcgccaagtaccagatggtgcaggacggcgccgccgccgagctgctggtgagaggcgtggagcaggaggacgccggcgactacacctgcgacaccggccacacccagagcatggccagcctgagcgtgagagtgcccagacccaagttcaagaccagactgcagagcctggagcaggagaccggcgacatcgccagactgtgctgccagctgagcgacgccgagagcggcgccgtggtgcagtggctgaaggagggcgtggagctgcacgccggccccaagtacgagatgagaagccagggcgccaccagagagctgctgatccaccagctggaggccaaggacaccggcgagtacgcctgcgtgaccggcggccagaagaccgccgccagcctgagagtgaccgagcccgaggtgaccatcgtgagaggcctggtggacgccgaggtgaccgccgacgaggacgtggagttcagctgcgaggtgagcagagccggcgccaccggcgtgcagtggtgcctgcagggcctgcccctgcagagcaacgaggtgaccgaggtggccgtgagagacggcagaatccacaccctgagactgaagggcgtgacccccgaggacgccggcaccgtgagcttccacctgggcaaccacgccagcagcgcccagctgaccgtgagagcccccgaggtgaccatcctggagcccctgcaggacgtgcagctgagcgagggccaggacgccagcttccagtgcagactgagcagagccagcggccaggaggccagatgggccctgggcggcgtgcccctgcaggccaacgagatgaacgacatcaccgtggagcagggcaccctgcacctgctgaccctgcacaaggtgaccctggaggacgccggcaccgtgagcttccacgtgggcacctgcagcagcgaggcccagctgaaggtgaccgccaagaacaccgtggtgagaggcctggagaacgtggaggccctggagggcggcgaggccctgttcgagtgccagctgagccagcccgaggtggccgcccacacctggctgctggacgacgagcccgtgcacaccagcgagaacgccgaggtggtgttcttcgagaacggcctgagacacctgctgctgctgaagaacctgagaccccaggacagctgcagagtgaccttcctggccggcgacatggtgaccagcgccttcctgaccgtgagaggctggagactggagatcctggagcccctgaagaacgccgccgtgagagccggcgcccaggcctgcttcacctgcaccctgagcgaggccgtgcccgtgggcgaggccagctggtacatcaacggcgccgccgtgcagcccgacgacagcgactggaccgtgaccgccgacggcagccaccacgccctgctgctgagaagcgcccagccccaccacgccggcgaggtgaccttcgcctgcagagacgccgtggccagcgccagactgaccgtgctgggcctgcccgacccccccgaggacgccgaggtggtggccagaagcagccacaccgtgaccctgagctgggccgcccccatgagcgacggcggcggcggcctgtgcggctacagagtggaggtgaaggagggcgccaccggccagtggagactgtgccacgagctggtgcccggccccgagtgcgtggtggacggcctggcccccggcgagacctacagattcagagtggccgccgtgggccccgtgggcgccggcgagcccgtgcacctgccccagaccgtgagactggccgagccccccaagcccgtgcccccccagcccagcgcccccgagagcagacaggtggccgccggcgaggacgtgagcctggagctggaggtggtggccgaggccggcgaggtgatctggcacaagggcatggagagaatccagcccggcggcagattcgaggtggtgagccagggcagacagcagatgctggtgatcaagggcttcaccgccgaggaccagggcgagtaccactgcggcctggcccagggcagcatctgccccgccgccgccaccttccaggtggccctgagccccgccagcgtggacgaggccccccagcccagcctgccccccgaggccgcccaggagggcgacctgcacctgctgtgggaggccctggccagaaagagaagaatgagcagagagcccaccctggacagcatcagcgagctgcccgaggaggacggcagaagccagagactgccccaggaggccgaggaggtggcccccgacctgagcgagggctacagcaccgccgacgagctggccagaaccggcgacgccgacctgagccacaccagcagcgacgacgagagcagagccggcacccccagcctggtgacctacctgaagaaggccggcagacccggcaccagccccctggccagcaaggtgggcgcccccgccgcccccagcgtgaagccccagcagcagcaggagcccctggccgccgtgagaccccccctgggcgacctgagcaccaaggacctgggcgaccccagcatggacaaggccgccgtgaagatccaggccgccttcaagggctacaaggtgagaaaggagatgaagcagcaggagggccccatgttcagccacaccttcggcgacaccgaggcccaggtgggcgacgccctgagactggagtgcgtggtggccagcaaggccgacgtgagagccagatggctgaaggacggcgtggagctgaccgacggcagacaccaccacatcgaccagctgggcgacggcacctgcagcctgctgatcaccggcctggacagagccgacgccggctgctacacctgccaggtgagcaacaagttcggccaggtgacccacagcgcctgcgtggtggtgagcggcagcgagagcgaggccgagagcagcagcggcggcgagctggacgacgccttcagaagagccgccagaagactgcacagactgttcagaaccaagagccccgccgaggtgagcgacgaggagctgttcctgagcgccgacgagggccccgccgagcccgaggagcccgccgactggcagacctacagagaggacgagcacttcatctgcatcagattcgaggccctgaccgaggccagacaggccgtgaccagattccaggagatgttcgccaccctgggcatcggcgtggagatcaagctggtggagcagggccccagaagagtggagatgtgcatcagcaaggagacccccgcccccgtggtgccccccgagcccctgcccagcctgctgaccagcgacgccgcccccgtgttcctgaccgagctgcagaaccaggaggtgcaggacggctaccccgtgagcttcgactgcgtggtgaccggccagcccatgcccagcgtgagatggttcaaggacggcaagctgctggaggaggacgaccactacatgatcaacgaggaccagcagggcggccaccagctgatcatcaccgccgtggtgcccgccgacatgggcgtgtacagatgcctggccgagaacagcatgggcgtgagcagcaccaaggccgagctgagagtggacctgaccagcaccgactacgacaccgccgccgacgccaccgagagcagcagctacttcagcgcccagggctacctgagcagcagagagcaggagggcaccgagagcaccaccgacgagggccagctgccccaggtggtggaggagctgagagacctgcaggtggcccccggcaccagactggccaagttccagctgaaggtgaagggctaccccgcccccagactgtactggttcaaggacggccagcccctgaccgccagcgcccacatcagaatgaccgacaagaagatcctgcacaccctggagatcatcagcgtgaccagagaggacagcggccagtacgccgcctacatcagcaacgccatgggcgccgcctacagcagcgccagactgctggtgagaggccccgacgagcccgaggagaagcccgccagcgacgtgcacgagcagctggtgccccccagaatgctggagagattcacccccaagaaggtgaagaagggcagcagcatcaccttcagcgtgaaggtggagggcagacccgtgcccaccgtgcactggctgagagaggaggccgagagaggcgtgctgtggatcggccccgacacccccggctacaccgtggccagcagcgcccagcagcacagcctggtgctgctggacgtgggcagacagcaccagggcacctacacctgcatcgccagcaacgccgccggccaggccctgtgcagcgccagcctgcacgtgagcggcctgcccaaggtggaggagcaggagaaggtgaaggaggccctgatcagcaccttcctgcagggcaccacccaggccatcagcgcccagggcctggagaccgccagcttcgccgacctgggcggccagagaaaggaggagcccctggccgccaaggaggccctgggccacctgagcctggccgaggtgggcaccgaggagttcctgcagaagctgaccagccagatcaccgagatggtgagcgccaagatcacccaggccaagctgcaggtgcccggcggcgacagcgacgaggacagcaagacccccagcgccagccccagacacggcagaagcagacccagcagcagcatccaggagagcagcagcgagagcgaggacggcgacgccagaggcgagatcttcgacatctacgtggtgaccgccgactacctgcccctgggcgccgagcaggacgccatcaccctgagagagggccagtacgtggaggtgctggacgccgcccaccccctgagatggctggtgagaaccaagcccaccaagagcagccccagcagacagggctgggtgagccccgcctacctggacagaagactgaagctgagccccgagtggggcgccgccgaggcccccgagttccccggcgaggccgtgagcgaggacgagtacaaggccagactgagcagcgtgatccaggagctgctgagcagcgagcaggccttcgtggaggagctgcagttcctgcagagccaccacctgcagcacctggagagatgcccccacgtgcccatcgccgtggccggccagaaggccgtgatcttcagaaacgtgagagacatcggcagattccacagcagcttcctgcaggagctgcagcagtgcgacaccgacgacgacgtggccatgtgcttcatcaagaaccaggccgccttcgagcagtacctggagttcctggtgggcagagtgcaggccgagagcgtggtggtgagcaccgccatccaggagttctacaagaagtacgccgaggaggccctgctggccggcgaccccagccagcccccccccccccccctgcagcactacctggagcagcccgtggagagagtgcagagataccaggccctgctgaaggagctgatcagaaacaaggccagaaacagacagaactgcgccctgctggagcaggcctacgccgtggtgagcgccctgccccagagagccgagaacaagctgcacgtgagcctgatggagaactaccccggcaccctgcaggccctgggcgagcccatcagacagggccacttcatcgtgtgggagggcgcccccggcgccagaatgccctggaagggccacaacagacacgtgttcctgttcagaaaccacctggtgatctgcaagcccagaagagacagcagaaccgacaccgtgagctacgtgttcagaaacatgatgaagctgagcagcatcgacctgaacgaccaggtggagggcgacgacagagccttcgaggtgtggcaggagagagaggacagcgtgagaaagtacctgctgcaggccagaaccgccatcatcaagagcagctgggtgaaggagatctgcggcatccagcagagactggccctgcccgtgtggagaccccccgacttcgaggaggagctggccgactgcaccgccgagctgggcgagaccgtgaagctggcctgcagagtgaccggcacccccaagcccgtgatcagctggtacaaggacggcaaggccgtgcaggtggacccccaccacatcctgatcgaggaccccgacggcagctgcgccctgatcctggacagcctgaccggcgtggacagcggccagtacatgtgcttcgccgccagcgccgccggcaactgcagcaccctgggcaagatcctggtgcaggtgccccccagattcgtgaacaaggtgagagccagccccttcgtggagggcgaggacgcccagttcacctgcaccatcgagggcgccccctacccccagatcagatggtacaaggacggcgccctgctgaccaccggcaacaagttccagaccctgagcgagcccagaagcggcctgctggtgctggtgatcagagccgccagcaaggaggacctgggcctgtacgagtgcgagctggtgaacagactgggcagcgccagagccagcgccgagctgagaatccagagccccatgctgcaggcccaggagcagtgccacagagagcagctggtggccgccgtggaggtgaccgagcaggagaccaaggtgcccaagaagaccgtgatcatcgaggagaccatcaccaccgtggtgaagagccccagaggccagagaagaagccccagcaagagccccagcagaagccccagcagatgcagcgccagccccctgagacccggcctgctggcccccgacctgctgtacctgcccggcgccggccagcccagaagacccgaggccgagcccggccagaagcccgtggtgcccaccctgtacgtgaccgaggccgaggcccacagccccgccctgcccggcctgagcggcccccagcccaagtgggtggaggtggaggagaccatcgaggtgagagtgaagaagatgggcccccagggcgtgagccccaccaccgaggtgcccagaagcagcagcggccacctgttcaccctgcccggcgccacccccggcggcgaccccaacagcaacaacagcaacaacaagctgctggcccaggaggcctgggcccagggcaccgccatggtgggcgtgagagagcccctggtgttcagagtggacgccagaggcagcgtggactgggccgccagcggcatgggcagcctggaggaggagggcaccatggaggaggccggcgaggaggagggcgaggacggcgacgccttcgtgaccgaggagagccaggacacccacagcctgggcgacagagaccccaagatcctgacccacaacggcagaatgctgaccctggccgacctggaggactacgtgcccggcgagggcgagaccttccactgcggcggccccggccccggcgcccccgacgaccccccctgcgaggtgagcgtgatccagagagagatcggcgagcccaccgtgggccagcccgtgctgctgagcgtgggccacgccctgggccccagaggccccctgggcctgttcagacccgagcccagaggcgccagcccccccggcccccaggtgagaagcctggagggcaccagcttcctgctgagagaggcccccgccagacccgtgggcagcgccccctggacccagagcttctgcaccagaatcagaagaagcgccgacagcggccagagcagcttcaccaccgagctgagcacccagaccgtgaacttcggcaccgtgggcgagaccgtgaccctgcacatctgccccgacagagacggcgacgaggccgcccagccctag

SEQ ID NO: 10593 - DNA, 1071 bp, synthetic construct
  source 1..1071: mol_type = other DNA; note = Synthetic coding sequence
atggccaccgccgccctgctgagaggcgccacccccggcagaggcggccccgtgtggagatggagactgagagccgcccccagatgcagactggcccacagcagctgcagccccggcggcgaccccaccgccggcgccgcctgggcctgcttcagactggacggcagaaccctgctgagagtgagaggccccgacgccgcccccttcctgctgggcctgctgaccaacgagctgcccctgcccagccccgccgccgccggcgccccccccgccgccagagccggctacgcccacttcctgaacgtgcagggcagaaccctgtacgacgtgatcctgtacggcctgcaggagcacagcgaggtgagcggcttcctgctggagtgcgacagcagcgtgcagggcgccctgcagaagcacctggccctgtacagaatcagaagaaaggtgaccgtggagccccaccccgagctgagagtgtgggccgtgctgcccagcagccccgaggcctgcggcgccgccagcctgcaggagagagccggcgccgccgccatcctgatcagagaccccagaaccgccagaatgggctggagactgctgacccaggacgagggccccgccctggtgcccggcggcagactgggcgacctgtgggactaccaccagcacagatacctgcagggcgtgcccgagggcgtgagagacctgccccccggcgtggccctgcccctggagagcaacctggccttcatgaacggcgtgagcttcaccaagggctgctacatcggccaggagctgaccgccagaacccaccacatgggcgtgatcagaaagagactgttccccgtgagattcctggaccccctgcccaccagcggcatcacccccggcgccaccgtgctgaccgccagcggccagaccgtgggcaagttcagagccggccagggcaacgtgggcctggccctgctgtggagcgagaagatcaagggccccctgcacatcagagccagcgagggcgcccaggtggccctggccgccagcgtgcccgactggtggcccaccgtgagcaagtag

SEQ ID NO: 10594 - DNA, 1395 bp, synthetic construct
  source 1..1395: mol_type = other DNA; note = Synthetic coding sequence
atgagagccgccagaagaggcctgcactgcgccggcgccgagagacccagaagaagaggcagactgtgggacagcagcggcgtgccccagagacagaagagacccggcccctggagaacccagacccaggagcagatgagcagagacgtgtgcatccacacctggccctgcacctactacctggagcccaagagaagatgggtgaccggccagctgagcctgaccagcctgagcctgagattcatgaccgacagcaccggcgagatcctggtgagcttccccctgagcagcatcgtggagatcaagaaggaggccagccacttcatcttcagcagcatcaccatcctggagaagggccacgccaagcactggttcagcagcctgagacccagcagaaacgtggtgttcagcatcatcgagcacttctggagagagctgctgctgagccagcccggcgccgtggccgacgccagcgtgcccagaaccagaggcgaggagctgaccggcctgatggccggcagccagaagagactggaggacaccgccagagtgctgcaccaccagggccagcagctggacagcgtgatgagaggcctggacaagatggagagcgacctggaggtggccgacagactgctgaccgagctggagagccccgcctggtggcccttcagcagcaagctgtggaagaccccccccgagaccaagcccagagaggacgtgagcatgaccagctgcgagcccttcggcaaggagggcatcctgatcaagatccccgccgtgatcagccacagaaccgagagccacgtgaagcccggcagactgaccgtgctggtgagcggcctggagatccacgacagcagcagcctgctgatgcacagattcgagagagaggacgtggacgacatcaaggtgcacagcccctacgagatcagcatcagacagagattcatcggcaagcccgacatggcctacagactgatcagcgccaagatgcccgaggtgatccccatcctggaggtgcagttcagcaagaagatggagctgctggaggacgccctggtgctgagaagcgccagaaccagcagccccgccgagaagagctgcagcgtgtggcacgccgccagcggcctgatgggcagaaccctgcacagagagccccccgccggcgaccaggagggcaccgccctgcacctgcagaccagcctgcccgccctgagcgaggccgacacccaggagctgacccagatcctgagaagaatgaagggcctggccctggaggccgagagcgagctggagagacaggacgaggccctggacggcgtggccgccgccgtggacagagccaccctgaccatcgacaagcacaacagaagaatgaagagactgacctag

SEQ ID NO: 10595 - DNA, 669 bp, synthetic construct
  source 1..669: mol_type = other DNA; note = Synthetic coding sequence
atgaccagctgcgagcccttcggcaaggagggcatcctgatcaagatccccgccgtgatcagccacagaaccgagagccacgtgaagcccggcagactgaccgtgctggtgagcggcctggagatccacgacagcagcagcctgctgatgcacagattcgagagagaggacgtggacgacatcaaggtgcacagcccctacgagatcagcatcagacagagattcatcggcaagcccgacatggcctacagactgatcagcgccaagatgcccgaggtgatccccatcctggaggtgcagttcagcaagaagatggagctgctggaggacgccctggtgctgagaagcgccagaaccagcagccccgccgagaagagctgcagcgtgtggcacgccgccagcggcctgatgggcagaaccctgcacagagagccccccgccggcgaccaggagggcaccgccctgcacctgcagaccagcctgcccgccctgagcgaggccgacacccaggagctgacccagatcctgagaagaatgaagggcctggccctggaggccgagagcgagctggagagacaggacgaggccctggacggcgtggccgccgccgtggacagagccaccctgaccatcgacaagcacaacagaagaatgaagagactgacctag

SEQ ID NO: 10596 - DNA, 201 bp, synthetic construct
  source 1..201: mol_type = other DNA; note = Synthetic coding sequence
atgccccagtaccagacctgggaggagttcagcagagccgccgagaagctgtacctggccgaccccatgaaggccagagtggtgctgaagtacagacacagcgacggcaacctgtgcgtgaaggtgaccgacgacctggtgcagtggcacctgaactactgcaccctgagacacggcatcgccggcggcctggagacctag

SEQ ID NO: 10597 - DNA, 249 bp, synthetic construct
  source 1..249: mol_type = other DNA; note = Synthetic coding sequence
atgccccagtaccagacctgggaggagttcagcagagccgccgagaagctgtacctggccgaccccatgaaggccagagtggtgctgaagtacagacacagcgacggcaacctgtgcgtgaaggtgaccgacgacctggtgagacagtgcctggccctgctgctgagactgcagtgcagcggcatgatcatcgcccactgcatcctggacctgctgggcagcagcggccccctggccagcgccagctag

SEQ ID NO: 10598 - DNA, 651 bp, synthetic construct
  source 1..651: mol_type = other DNA; note = Synthetic coding sequence
atgcaggccaacggcgccggcggcggcggcggcggcggcggcggcggcggcggcggcggcggcggcggcggcggccagggccagacccccgagctggcctgcctgagcgcccagaacggcgagagcagccccagcagcagcagcagcgccggcgacctggcccacgccaacggcctgctgcccagcgcccccagcgccgccagcaacaacagcaacagcctgaacgtgaacaacggcgtgcccggcggcgccgccgccgccagcagcgccaccgtggccgccgccagcgccaccaccgccgccagcagcagcctggccacccccgagctgggcagcagcctgaagaagaagaagagactgagccagagcgacgaggacgtgatcagactgatcggccagcacctgaacggcctgggcctgaaccagaccgtggacctgctgatgcaggagagcggctgcagactggagcaccccagcgccaccaagttcagaaaccacgtgatggagggcgactgggacaaggccgagaacgacctgaacgagctgaagcccctggtgcacagcccccacgccatcgtggcccagaccttcagcgagaccagcatcaacttcttccccctgaccgccgccttctgccacgtgagaggctag

SEQ ID NO: 10599 - DNA, 2340 bp, synthetic construct; identical to SEQ ID NO: 10369
  source 1..2340: mol_type = other DNA; note = Synthetic coding sequence

SEQ ID NO: 10600 - DNA, 666 bp, synthetic construct
  source 1..666: mol_type = other DNA; note = Synthetic coding sequence
atggccgccgccagcggcagcgtgctgcagagatgcatcgtgagccccgccggcagacacagcgccagcctgatcttcctgcacggcagcggcgacagcggccagggcctgagaatgtggatcaagcaggtgctgaaccaggacctgaccttccagcacatcaagatcatctaccccaccgccccccccagattcaagatcaccaacgactgccccgagcacctggagagcatcgacgtgatgtgccaggtgctgaccgacctgatcgacgaggaggtgaagagcggcatcaagaagaacagaatcctgatcggcggcttcagcatgggcggctgcatggccatccacctggcctacagaaaccaccaggacgtggccggcgtgttcgccctgagcagcttcctgaacaaggccagcgccgtgtaccaggccctgcagaagagcaacggcgtgctgcccgagctgttccagtgccacggcaccgccgacgagctggtgctgcacagctgggccgaggagaccaacagcatgctgaagagcctgggcgtgaccaccaagttccacagcttccccaacgtgtaccacgagctgagcaagaccgagctggacatcctgaagctgtggatcctgaccaagctgcccggcgagatggagaagcagaagtag

SEQ ID NO: 10601 - DNA, 714 bp, synthetic construct
  source 1..714: mol_type = other DNA; note = Synthetic coding sequence
atggccgccgccagcggcagcgtgctgcagagatgcatcgtgagccccgccggcagacacagcgccagcctgatcttcctgcacggcagcggcgacagcggccagggcctgagaatgtggatcaagcaggtgctgaaccaggacctgaccttccagcacatcaagatcatctaccccaccgccccccccagaagctacacccccatgaagggcggcatcagcaacgtgtggttcgacagattcaagatcaccaacgactgccccgagcacctggagagcatcgacgtgatgtgccaggtgctgaccgacctgatcgacgaggaggtgaagagcggcatcaagaagaacagaatcctgatcggcggcttcagcatgggcggctgcatggccatccacctggcctacagaaaccaccaggacgtggccggcgtgttcgccctgagcagcttcctgaacaaggccagcgccgtgtaccaggccctgcagaagagcaacggcgtgctgcccgagctgttccagtgccacggcaccgccgacgagctggtgctgcacagctgggccgaggagaccaacagcatgctgaagagcctgggcgtgaccaccaagttccacagcttccccaacgtgtaccacgagctgagcaagaccgagctggacatcctgaagctgtggatcctgaccaagctgcccggcgagatggagaagcagaagtag

SEQ ID NO: 10602 - DNA, 471 bp, synthetic construct
  source 1..471: mol_type = other DNA; note = Synthetic coding sequence
atggagaccgccaaggagatgaccagagagagcctgcccatcaagtgcctggaggccgtgatcctgggcatctacctgaccaacggccagcccagcatcgagagattccccatcagcttcaagacctacttcagcggcaactacttccaccacgtggtgctgggcatctactgcaacggcagatacggcagcctgggcatgagcagaagagccgagctgatggacaagcccctgaccttcagaaccctgagcgacctgatcttcgacttcgaggacagctacaagaagtacctgcacaccgtgaagaaggtgaagatcggcctgtacgtgccccacgagccccacagcttccagcccatcgagtggaagcagctggtgctgaacgtgagcaagatgctgagagccgacatcagaaaggagctggagaagtacgccagagacatgagaatgaagggcctgtgcagccactag

SEQ ID NO: 10603 - DNA, 936 bp, synthetic construct
  source 1..936: mol_type = other DNA; note = Synthetic coding sequence
atgaccggcagcgccgccgacacccacagatgcccccaccccaagggcgccaagggcaccagaagcagaagcagccacgccagacccgtgagcctggccaccagcggcggcagcgaggaggaggacaaggacggcggcgtgctgttccacgtgaacaagagcggcttccccatcgacagccacacctgggagagaatgtggatgcacgtggccaaggtgcaccccaagggcggcgagatggtgggcgccatcagaaacgccgccttcctggccaagcccagcatcccccaggtgcccaactacagactgagcatgaccatccccgactggctgcaggccatccagaactacatgaagaccctgcactacctgaccaacggccagcccagcatcgagagattccccatcagcttcaagacctacttcagcggcaactacttccaccacgtggtgctgggcatctactgcaacggcagatacggcagcctgggcatgagcagaagagccgagctgatggacaagcccctgaccttcagaaccctgagcgacctgatcttcgacttcgaggacagctacaagaagtacctgcacaccgtgaagaaggtgaagatcggcctgtacgtgccccacgagccccacagcttccagcccatcgagtggaagcagctggtgctgaacgtgagcaagatgctgagagccgacatcagaaaggagctggagaagtacgccagagacatgagaatgaagatcctgaagcccgccagcgcccacagccccacccaggtgagaagcagaggcaagagcctgagccccagaagaagacaggccagcccccccagaagactgggcagaagagagaagagccccgccctgcccgagaagaaggtggccgacctgagcaccctgaacgaggtgggctaccagatcagaatctag

SEQ ID NO: 10604 - DNA, 873 bp, synthetic construct
  source 1..873: mol_type = other DNA; note = Synthetic coding sequence
atgtggatgcacgtggccaaggtgcaccccaagggcggcgagatggtgggcgccatcagaaacgccgccttcctggccaagcccagcatcccccaggtgcccaactacagactgagcatgaccatccccgactggctgcaggccatccagaactacatgaagaccctgcagtacaaccacaccggcacccagttcttcgagatcagaaagatgagacccctgagcggcctgatggagaccgccaaggagatgaccagagagagcctgcccatcaagtgcctggaggccgtgatcctgggcatctacctgaccaacggccagcccagcatcgagagattccccatcagcttcaagacctacttcagcggcaactacttccaccacgtggtgctgggcatctactgcaacggcagatacggcagcctgggcatgagcagaagagccgagctgatggacaagcccctgaccttcagaaccctgagcgacctgatcttcgacttcgaggacagctacaagaagtacctgcacaccgtgaagaaggtgaagatcggcctgtacgtgccccacgagccccacagcttccagcccatcgagtggaagcagctggtgctgaacgtgagcaagatgctgagagccgacatcagaaaggagctggagaagtacgccagagacatgagaatgaagatcctgaagcccgccagcgcccacagccccacccaggtgagaagcagaggcaagagcctgagccccagaagaagacaggccagcccccccagaagactgggcagaagagagaagagccccgccctgcccgagaagaaggtggccgacctgagcaccctgaacgaggtgggctaccagatcagaatctag

SEQ ID NO: 10605 - DNA, 756 bp, synthetic construct
  source 1..756: mol_type = other DNA; note = Synthetic coding sequence
atgaccatccccgactggctgcaggccatccagaactacatgaagaccctgcagtacaaccacaccggcacccagttcttcgagatcagaaagatgagacccctgagcggcctgatggagaccgccaaggagatgaccagagagagcctgcccatcaagtgcctggaggccgtgatcctgggcatctacctgaccaacggccagcccagcatcgagagattccccatcagcttcaagacctacttcagcggcaactacttccaccacgtggtgctgggcatctactgcaacggcagatacggcagcctgggcatgagcagaagagccgagctgatggacaagcccctgaccttcagaaccctgagcgacctgatcttcgacttcgaggacagctacaagaagtacctgcacaccgtgaagaaggtgaagatcggcctgtacgtgccccacgagccccacagcttccagcccatcgagtggaagcagctggtgctgaacgtgagcaagatgctgagagccgacatcagaaaggagctggagaagtacgccagagacatgagaatgaagatcctgaagcccgccagcgcccacagccccacccaggtgagaagcagaggcaagagcctgagccccagaagaagacaggccagcccccccagaagactgggcagaagagagaagagccccgccctgcccgagaagaaggtggccgacctgagcaccctgaacgaggtgggctaccagatcagaatctag

SEQ ID NO: 10606 - DNA, 873 bp, synthetic construct; identical to SEQ ID NO: 10604
  source 1..873: mol_type = other DNA; note = Synthetic coding sequence

SEQ ID NO: 10607 - DNA, 723 bp, synthetic construct
  source 1..723: mol_type = other DNA; note = Synthetic coding sequence
atggccggcagccccgagctggtggtgctggaccccccctgggacaaggagctggccgccggcaccgagagccaggccctggtgagcgccacccccagagaggacttcagagtgagatgcaccagcaagagagccgtgaccgagatgctgcagctgtgcggcagattcgtgcagaagctgggcgacgccctgcccgaggagatcagagagcccgccctgagagacgcccagtggaccttcgagagcgccgtgcaggagaacatcagcatcaacggccaggcctggcaggaggccagcgacaactgcttcatggacagcgacatcaaggtgctggaggaccagttcgacgagatcatcgtggacatcgccaccaagagaaagcagtaccccagaaagatcctggagtgcgtgatcaagaccatcaaggccaagcaggagatcctgagcctgcccgccctgatcgagcagggcgagggcttcagccaggtgctgagaatgcagcccgtgatccacctgcagagaatccaccaggaggtgttcagcagctgccacagaaagcccgacgccaagcccgagaacttcatcacccagatcgagaccacccccaccgagaccgccagcagaaagaccagcgacatggtgctgaagagaaagcagaccaaggactgcccccagagaaagtggtaccccctgagacccaagaagatcaacctggacacctag

SEQ ID NO: 10608 - DNA, 519 bp, synthetic construct
  source 1..519: mol_type = other DNA; note = Synthetic coding sequence
atggccggcagccccgagctggtggtgctggaccccccctgggacaaggagctggccgccggcaccgagagccaggccctggtgagcgccacccccagagaggacttcagagtgagatgcaccagcaagagagccgtgaccgagatgctgcagctgtgcggcagattcgtgcagaagctgggcgacgccctgcccgaggagatcagagagcccgccctgagagacgcccagtggaccttcgagagcgccgtgcaggagaacatcagcatcaacggccaggcctggcaggaggccagcgacaactgcttcatggacagcgacatcaaggtgctggaggaccagttcgacgagatcatcgtggacatcgccaccaagagaaagcagtaccccagaaagatcctggagtgcgtgatcaagaccatcaaggccaagcaggagatcctgaagcagtaccaccccgtggtgcaccccctggacctgaagtacgaccccgaccccgtgctggcctgcatcaactag

SEQ ID NO: 10609 - DNA, 846 bp, synthetic construct
  source 1..846: mol_type = other DNA; note = Synthetic coding sequence
atggccggcagccccgagctggtggtgctggaccccccctgggacaaggagctggccgccggcaccgagagccaggccctggtgagcgccacccccagagaggacttcagagtgagatgcaccagcaagagagccgtgaccgagatgctgcagctgtgcggcagattcgtgcagaagctgggcgacgccctgcccgaggagatcagagagcccgccctgagagacgcccagtggaccttcgagagcgccgtgcaggagaacatcagcatcaacggccaggcctggcaggaggccagcgacaactgcttcatggacagcgacatcaaggtgctggaggaccagttcgacgagatcatcgtggacatcgccaccaagagaaagcagtaccccagaaagatcctggagtgcgtgatcaagaccatcaaggccaagcaggagatcctgaagcagtaccaccccgtggtgcaccccctggacctgaagtacgaccccgaccccgccccccacatggagaacctgaagtgcagaggcgagaccgtggccaaggagatcagcgaggccatgaagagcctgcccgccctgatcgagcagggcgagggcttcagccaggtgctgagaatgcagcccgtgatccacctgcagagaatccaccaggaggtgttcagcagctgccacagaaagcccgacgccaagcccgagaacttcatcacccagatcgagaccacccccaccgagaccgccagcagaaagaccagcgacatggtgctgaagagaaagcagaccaaggactgcccccagagaaagtggtaccccctgagacccaagaagatcaacctggacacctag

SEQ ID NO: 10610 - DNA, 228 bp, synthetic construct
  source 1..228: mol_type = other DNA; note = Synthetic coding sequence
atggacagcgacatcaaggtgctggaggaccagttcgacgagatcatcgtggacatcgccaccaagagaaagcagtaccccagaaagatcctggagtgcgtgatcaagaccatcaaggccaagcaggagatcctgaagcagtaccaccccgtggtgcaccccctggacctgaagtacgaccccgaccccggcgccaagcccggcggcctggccctgggcgccgtgtag

SEQ ID NO: 10611 - DNA, 279 bp, synthetic construct
  source 1..279: mol_type = other DNA; note = Synthetic coding sequence
atggaggactaccaggccgccgaggagaccgccttcgtggtggacgaggtgagcaacatcgtgaaggaggccatcgagagcgccatcggcggcaacgcctaccagcacagcaaggtgaaccagtggaccaccaacgtggtggagcagaccctgagccagctgaccaagctgggcaagcccttcaagtacatcggcaacggcgtgctgttcctgctgtacctgagagacggcttcctgaccctgatcagaggcgccagcagcaccagaaacaacagctag

SEQ ID NO: 10612 - DNA, 204 bp, synthetic construct
  source 1..204: mol_type = other DNA; note = Synthetic coding sequence
atgcagaagaacggcgccggcctgcacaccgccagcagctgcttctgggacagcagcaccgacggcatgatcttcatccacgtgtgcgaggtgctgctgtgcgagatctacgactggaagttccccatcttcgagtgcaacgcctgcctgagccccttcaagaccttcaacaacagactggccaaggtgctgtgcgtggcctag

SEQ ID NO: 10613 - DNA, 342 bp, synthetic construct
  source 1..342: mol_type = other DNA; note = Synthetic coding sequence
atggaggactaccaggccgccgaggagaccgccttcgtggtggacgaggtgagcaacatcgtgaaggaggccatcgagagcgccatcggcggcaacgcctaccagcacagcaaggtgaaccagtggaccaccaacgtggtggagcagaccctgagccagctgaccaagctgggcaagcccttcaagtacatcgtgacctgcgtgatcatgcagaagaacggcgccggcctgcacaccgccagcagctgcttctgggacagcagcaccgacggcagctgcaccgtgagatgggagaacaagaccatgtactgcatcgtgagcgccttcggcctgagcatctag

SEQ ID NO: 10614 - DNA, 2037 bp, synthetic construct
  source 1..2037: mol_type = other DNA; note = Synthetic coding sequence
atgtacgccgccgtggagcacggccccgtgctgtgcagcgacagcaacatcctgtgcctgagctggaagggcagagtgcccaagagcgagaaggagaagcccgtgtgcagaagaagatactacgaggagggctggctggccaccggcaacggcagaggcgtggtgggcgtgaccttcaccagcagccactgcagaagagacagaagcaccccccagagaatcaacttcaacctgagaggccacaacagcgaggtggtgctggtgagatggaacgagccctaccagaagctggccacctgcgacgccgacggcggcatcttcgtgtggatccagtacgagggcagatggagcgtggagctggtgaacgacagaggcgcccaggtgagcgacttcacctggagccacgacggcacccaggccctgatcagctacagagacggcttcgtgctggtgggcagcgtgagcggccagagacactggagcagcgagatcaacctggagagccagatcacctgcggcatctggacccccgacgaccagcaggtgctgttcggcaccgccgacggccaggtgatcgtgatggactgccacggcagaatgctggcccacgtgctgctgcacgagagcgacggcgtgctgggcatgagctggaactaccccatcttcctggtggaggacagcagcgagagcgacaccgacagcgacgactacgcccccccccaggacggccccgccgcctaccccatccccgtgcagaacatcaagcccctgctgaccgtgagcttcaccagcggcgacatcagcctgatgaacaactacgacgacctgagccccaccgtgatcagaagcggcctgaaggaggtggtggcccagtggtgcacccagggcgacctgctggccgtggccggcatggagagacagacccagctgggcgagctgcccaacggccccctgctgaagagcgccatggtgaagttctacaacgtgagaggcgagcacatcttcaccctggacaccctggtgcagagacccatcatcagcatctgctggggccacagagacagcagactgctgatggccagcggccccgccctgtacgtggtgagagtggagcacagagtgagcagcctgcagctgctgtgccagcaggccatcgccagcaccctgagagaggacaaggacgtgagcaagctgaccctgccccccagactgtgcagctacctgagcaccgccttcatccccaccatcaagccccccatccccgaccccaacaacatgagagacttcgtgagctaccccagcgccggcaacgagagactgcactgcaccatgaagagaaccgaggacgaccccgaggtgggcggcccctgctacaccctgtacctggagtacctgggcggcctggtgcccatcctgaagggcagaagaatcagcaagctgagacccgagttcgtgatcatggaccccagaaccgacagcaagcccgacgagatctacggcaacagcctgatcagcaccgtgatcgacagctgcaactgcagcgacagcagcgacatcgagctgagcgacgactgggccgccaagaagagccccaagatcagcagagccagcaagagccccaagctgcccagaatcagcatcgaggccagaaagagccccaagctgcccagagccgcccaggagctgagcagaagccccagactgcccctgagaaagcccagcgtgggcagccccagcctgaccagaagagagttccccttcgaggacatcacccagcacaactacctggcccaggtgaccagcaacatctggggcaccaagttcaagatcgtgggcctggccgccttcctgcccaccaacctgggcgccgtgatctacaagaccagcctgctgcacctgcagcccagacagatgaccatctacctgcccgaggtgagaaagatcagcatggactacatcaacctgcccgtgttcaaccccaacgtgttcagcgaggacgaggacgacctgcccggcgacgccgtgtggaccgactag

SEQ ID NO: 10615 - DNA, 4632 bp, synthetic construct
  source 1..4632: mol_type = other DNA; note = Synthetic coding sequence
atgtacgccgccgtggagcacggccccgtgctgtgcagcgacagcaacatcctgtgcctgagctggaagggcagagtgcccaagagcgagaaggagaagcccgtgtgcagaagaagatactacgaggagggctggctggccaccggcaacggcagaggcgtggtgggcgtgaccttcaccagcagccactgcagaagagacagaagcaccccccagagaatcaacttcaacctgagaggccacaacagcgaggtggtgctggtgagatggaacgagccctaccagaagctggccacctgcgacgccgacggcggcatcttcgtgtggatccagtacgagggcagatggagcgtggagctggtgaacgacagaggcgcccaggtgagcgacttcacctggagccacgacggcacccaggccctgatcagctacagagacggcttcgtgctggtgggcagcgtgagcggccagagacactggagcagcgagatcaacctggagagccagatcacctgcggcatctggacccccgacgaccagcaggtgctgttcggcaccgccgacggccaggtgatcgtgatggactgccacggcagaatgctggcccacgtgctgctgcacgagagcgacggcgtgctgggcatgagctggaactaccccatcttcctggtggaggacagcagcgagagcgacaccgacagcgacgactacgcccccccccaggacggccccgccgcctaccccatccccgtgcagaacatcaagcccctgctgaccgtgagcttcaccagcggcgacatcagcctgatgaacaactacgacgacctgagccccaccgtgatcagaagcggcctgaaggaggtggtggcccagtggtgcacccagggcgacctgctggccgtggccggcatggagagacagacccagctgggcgagctgcccaacggccccctgctgaagagcgccatggtgaagttctacaacgtgagaggcgagcacatcttcaccctggacaccctggtgcagagacccatcatcagcatctgctggggccacagagacagcagactgctgatggccagcggccccgccctgtacgtggtgagagtggagcacagagtgagcagcctgcagctgctgtgccagcaggccatcgccagcaccctgagagaggacaaggacgtgagcaagctgaccctgccccccagactgtgcagctacctgagcaccgccttcatccccaccatcaagccccccatccccgaccccaacaacatgagagacttcgtgagctaccccagcgccggcaacgagagactgcactgcaccatgaagagaaccgaggacgaccccgaggtgggcggcccctgctacaccctgtacctggagtacctgggcggcctggtgcccatcctgaagggcagaagaatcagcaagctgagacccgagttcgtgatcatggaccccagaaccgacagcaagcccgacgagatctacggcaacagcctgatcagcaccgtgatcgacagctgcaactgcagcgacagcagcgacatcgagctgagcgacgactgggccgccaagaagagccccaagatcagcagagccagcaagagccccaagctgcccagaatcagcatcgaggccagaaagagccccaagctgcccagagccgcccaggagctgagcagaagccccagactgcccctgagaaagcccagcgtgggcagccccagcctgaccagaagagagttccccttcgaggacatcacccagcacaactacctggcccaggtgaccagcaacatctggggcaccaagttcaagatcgtgggcctggccgccttcctgcccaccaacctgggcgccgtgatctacaagaccagcctgctgcacctgcagcccagacagatgaccatctacctgcccgaggtgagaaagatcagcatggactacatcaacctgcccgtgttcaaccccaacgtgttcagcgaggacgaggacgacctgcccgtgaccggcgccagcggcgtgcccgagaacagccccccctgcaccgtgaacatccccatcgcccccatccacagcagcgcccaggccatgagccccacccagagcatcggcctggtgcagagcctgctggccaaccagaacgtgcagctggacgtgctgaccaaccagaccaccgccgtgggcaccgccgagcacgccggcgacagcgccacccagtaccccgtgagcaacagatacagcaaccccggccaggtgatcttcggcagcgtggagatgggcagaatcatccagaaccccccccccctgagcctgcccccccccccccagggccccatgcagctgagcaccgtgggccacggcgacagagaccacgagcacctgcagaagagcgccaaggccctgagacccaccccccagctggccgccgagggcgacgccgtggtgttcagcgccccccaggaggtgcaggtgaccaagatcaaccccccccccccctaccccggcaccatccccgccgcccccaccaccgccgccccccccccccccctgccccccccccagccccccgtggacgtgtgcctgaagaagggcgacttcagcctgtaccccaccagcgtgcactaccagacccccctgggctacgagagaatcaccaccttcgacagcagcggcaacgtggaggaggtgtgcagacccagaaccagaatgctgtgcagccagaacacctacaccctgcccggccccggcagcagcgccaccctgagactgaccgccaccgagaagaaggtgccccagccctgcagcagcgccaccctgaacagactgaccgtgcccagatacagcatccccaccggcgacccccccccctaccccgagatcgccagccagctggcccagggcagaggcgccgcccagagaagcgacaacagcctgatccacgccaccctgagaagaaacaacagagaggccaccctgaagatggcccagctggccgacagccccagagcccccctgcagcccctggccaagagcaagggcggccccggcggcgtggtgacccagctgcccgccagacccccccccgccctgtacacctgcagccagtgcagcggcaccggccccagcagccagcccggcgccagcctggcccacaccgccagcgccagccccctggccagccagagcagctacagcctgctgagcccccccgacagcgccagagacagaaccgactacgtgaacagcgccttcaccgaggacgaggccctgagccagcactgccagctggagaagcccctgagacacccccccctgcccgaggccgccgtgaccctgaagagaccccccccctaccagtgggaccccatgctgggcgaggacgtgtgggtgccccaggagagaaccgcccagaccagcggccccaaccccctgaagctgagcagcctgatgctgagccagggccagcacctggacgtgagcagactgcccttcatcagccccaagagccccgccagccccaccgccaccttccagaccggctacggcatgggcgtgccctaccccggcagctacaacaacccccccctgcccggcgtgcaggccccctgcagccccaaggacgccctgagccccacccagttcgcccagcaggagcccgccgtggtgctgcagcccctgtacccccccagcctgagctactgcaccctgccccccatgtaccccggcagcagcacctgcagcagcctgcagctgccccccgtggccctgcacccctggagcagctacagcgcctgcccccccatgcagaacccccagggcaccctgccccccaagccccacctggtggtggagaagcccctggtgagccccccccccgccgacctgcagagccacctgggcaccgaggtgatggtggagaccgccgacaacttccaggaggtgctgagcctgaccgagagccccgtgccccagagaaccgagaagttcggcaagaagaacagaaagagactggacagcagagccgaggagggcagcgtgcaggccatcaccgagggcaaggtgaagaaggaggccagaaccctgagcgacttcaacagcctgatcagcagcccccacctgggcagagagaagaagaaggtgaagagccagaaggaccagctgaagagcaagaagctgaacaagaccaacgagttccaggacagcagcgagagcgagcccgagctgttcatcagcggcgacgagctgatgaaccagagccagggcagcagaaagggctggaagagcaagagaagccccagagccgccggcgagctggaggaggccaagtgcagaagagccagcgagaaggaggacggcagactgggcagccagggcttcgtgtacgtgatggccaacaagcagcccctgtggaacgaggccacccaggtgtaccagctggacttcggcggcagagtgacccaggagagcgccaagaacttccagatcgagctggagggcagacaggtgatgcagttcggcagaatcgacggcagcgcctacatcctggacttccagtaccccttcagcgccgtgcaggccttcgccgtggccctggccaacgtgacccagagactgaagtag

SEQ ID NO: 10616 - DNA, 3234 bp, synthetic construct
  source 1..3234: mol_type = other DNA; note = Synthetic coding sequence
atggacagcaagatgaagaagatggccgagctgcagctgagcgtggtgagcgaccccaagaacagaaaggccatcgagaaccagatccagcagtgggagcagaacctggagaagttccacatggacctgttcagaatgagatgctacctggccagcctgcagggcggcgagctgcccaaccccaagagcctgctggccgccgccagcagacccagcaagctggccctgggcagactgggcatcctgagcgtgagcagcttccacgccctggtgtgcagcagagacgacagcgccctgagaaagagaaccctgagcctgacccagagaggcagaaacaagaagggcatcttcagcagcctgaagggcctggacaccctggccagaaagggcaaggagaagagacccagcatcacccagatcttcgacagcagcggcagccacggcttcagcggcacccagctgccccagaacagcagcaacagcagcgaggtggacgagctgctgcacatctacggcagcaccgtggacggcgtgcccagagacaacgcctgggagatccagacctacgtgcacttccaggacaaccacggcgtgaccgtgggcatcaagcccgagcacagagtggaggacatcctgaccctggcctgcaagatgagacagctggagcccagccactacggcctgcagctgagaaagctggtggacgacaacgtggagtactgcatccccgccccctacgagtacatgcagcagcaggtgtacgacgagatcgaggtgttccccctgaacgtgtacgacgtgcagctgaccaagaccggcagcgtgtgcgacttcggcttcgccgtgaccgcccaggtggacgagagacagcacctgagcagaatcttcatcagcgacgtgctgcccgacggcctggcctacggcgagggcctgagaaagggcaacgagatcatgaccctgaacggcgaggccgtgagcgacctggacctgaagcagatggaggccctgttcagcgagaagagcgtgggcctgaccctgatcgccagaccccccgacaccaaggccaccctgtgcaccagctggagcgacagcgacctgttcagcagagaccagaagagcctgctgcccccccccaaccagagccagctgctggaggagttcctggacaacttcaagaagaacaccgccaacgacttcagcaacgtgcccgacatcaccaccggcctgaagagaagccagaccgacggcaccctggaccaggtgagccacagagagaagatggagcagaccttcagaagcgccgagcagatcaccgccctgtgcagaagcttcaacgacagccaggccaacggcatggagggccccagagagaaccaggaccccccccccagaagcctggccagacacctgagcgacgccgacagactgagaaaggtgatccaggagctggtggacaccgagaagagctacgtgaaggacctgagctgcctgttcgagctgtacctggagcccctgcagaacgagaccttcctgacccaggacgagatggagagcctgttcggcagcctgcccgagatgctggagttccagaaggtgttcctggagaccctggaggacggcatcagcgccagcagcgacttcaacaccctggagacccccagccagttcagaaagctgctgttcagcctgggcggcagcttcctgtactacgccgaccacttcaagctgtacagcggcttctgcgccaaccacatcaaggtgcagaaggtgctggagagagccaagaccgacaaggccttcaaggccttcctggacgccagaaaccccaccaagcagcacagcagcaccctggagagctacctgatcaagcccgtgcagagagtgctgaagtaccccctgctgctgaaggagctggtgagcctgaccgaccaggagagcgaggagcactaccacctgaccgaggccctgaaggccatggagaaggtggccagccacatcaacgagatgcagaagatctacgaggactacggcaccgtgttcgaccagctggtggccgagcagagcggcaccgagaaggaggtgaccgagctgagcatgggcgagctgctgatgcacagcaccgtgagctggctgaaccccttcctgagcctgggcaaggccagaaaggacctggagctgaccgtgttcgtgttcaagagagccgtgatcctggtgtacaaggagaactgcaagctgaagaagaagctgcccagcaacagcagacccgcccacaacagcaccgacctggaccccttcaagttcagatggctgatccccatcagcgccctgcaggtgagactgggcaaccccgccggcaccgagaacaacagcatctgggagctgatccacaccaagagcgagatcgagggcagacccgagaccatcttccagctgtgctgcagcgacagcgagagcaagaccaacatcgtgaaggtgatcagaagcatcctgagagagaacttcagaagacacatcaagtgcgagctgcccctggagaagacctgcaaggacagactggtgcccctgaagaacagagtgcccgtgagcgccaagctggccagcagcagaagcctgaaggtgctgaagaacagcagcagcaacgagtggaccggcgagaccggcaagggcaccctgctggacagcgacgagggcagcctgagcagcggcacccagagcagcggctgccccaccgccgagggcagacaggacagcaagagcaccagccccggcaagtacccccaccccggcctggccgacttcgccgacaacctgatcaaggagagcgacatcctgagcgacgaggacgacgaccacagacagaccgtgaagcagggcagccccaccaaggacatcgagatccagttccagagactgagaatcagcgaggaccccgacgtgcaccccgaggccgagcagcagcccggccccgagagcggcgagggccagaagggcggcgagcagcccaagctggtgagaggccacttctgccccatcaagagaaaggccaacagcaccaagagagacagaggcaccctgctgaaggcccagatcagacaccagagcctggacagccagagcgagaacgccaccatcgacctgaacagcgtgctggagagagagttcagcgtgcagagcctgaccagcgtggtgagcgaggagtgcttctacgagaccgagagccacggcaagagctag

SEQ ID NO: 10617 - DNA, 579 bp, synthetic construct
  source 1..579: mol_type = other DNA; note = Synthetic coding sequence
atgagccagtgcgcctgcctggaggaggtgcacctgcccaacatcaagcccggcgagggcctgggcatgtacatcaagagcacctacgacggcctgcacgtgatcaccggcaccaccgagaacgtgggctggcagctgaagaacctggtgaagaagctgagagagaaccccaccggcgtggtgctgctgctgaagaagagacccaccggcagcttcaacttcacccccgcccccctgaagaacctgagatggaagccccccctggtgcagaccagccccccccccgccaccacccagagccccgagagcaccatggacaccagcctgaagaaggagaagagcgccatcctggacctgtacatcccccccccccccgccgtgccctacagccccagagacgagaacggcagcttcgtgtacggcggcagcagcaagtgcaagcagcccctgcccggccccaagggcagcgagagccccaacagcttcctggaccaggagagcagaagaagaagattcaccatcgccgacagcgaccagctgcccggctacagcgtggagaccaacatcctgcccacctag

SEQ ID NO: 10618 - DNA, 1668 bp, synthetic construct
  source 1..1668: mol_type = other DNA; note = Synthetic coding sequence
atggagcccgtgaccaagtggagccccaagcaggtggtggactggaccagaggcctggacgactgcctgcagcagtacgtgcacaagttcgagagagagaagatcaacggcgagcagctgctgcagatcagccaccaggacctggaggagctgggcgtgaccagaatcggccaccaggagctggtgctggaggccgtggacctgctgtgcgccctgaactacggcctggagaccgacaacatgaagaacctggtgctgaagctgagagccagcagccacaacctgcagaactacatcagcagcagaagaaagagccccgcctacgacggcaacaccagcagaaaggcccccaacgagttcctgaccagcgtggtggagctgatcggcgccgccaaggccctgctggcctggctggacagagcccccttcaccggcatcaccgacttcagcgtgaccaagaacaagatcatccagctgtgcctggacctgaccaccaccgtgcagaaggactgcttcgtggccgagatggaggacaaggtgctgaccgtggtgaaggtgctgaacggcatctgcgacaagaccatcagaagcaccaccgaccccgtgatgagccagtgcgcctgcctggaggaggtgcacctgcccaacatcaagcccggcgagggcctgggcatgtacatcaagagcacctacgacggcctgcacgtgatcaccggcaccaccgagaacagccccgccgacagaagccagaagatccacgccggcgacgaggtgatccaggtgaaccagcagaccgtggtgggctggcagctgaagaacctggtgaagaagctgagagagaaccccaccggcgtggtgctgctgctgaagaagagacccaccggcagcttcaacttcacccccgcccccctgaagaacctgagatggaagccccccctggtgcagaccagccccccccccgccaccacccagagccccgagagcaccatggacaccagcctgaagaaggagaagagcgccatcctggacctgtacatcccccccccccccgccgtgccctacagccccagagacgagaacggcagcttcgtgtacggcggcagcagcaagtgcaagcagcccctgcccggccccaagggcagcgagagccccaacagcttcctggaccaggagagcagaagaagaagattcaccatcgccgacagcgaccagctgcccggctacagcgtggagaccaacatcctgcccaccaagatgagagagaagacccccagctacggcaagcccagacccctgagcatgcccgccgacggcaactggatgggcatcgtggaccccttcgccagacccagaggccacggcagaaagggcgaggacgccctgtgcagatacttcagcaacgagagaatcccccccatcatcgaggagagcagcagccccccctacagattcagcagacccaccaccgagagacacctggtgagaggcgccgactacatcagaggcagcagatgctacatcaacagcgacctgcacagcagcgccaccatccccttccaggaggagggcaccaagaagaagagcggcagcagcgccaccaagagcagcagcaccgagcccagcctgctggtgagctggttcaccagactgaagctgctgacccactag

SEQ ID NO: 10619 - DNA, 708 bp, synthetic construct
  source 1..708: mol_type = other DNA; note = Synthetic coding sequence
atgagaagcagagtgctgtggggcgccgccagatggctgtggcccagaagagccgtgggccccgccagaagacccctgagcagcggcagcccccccctggaggagctgttcaccagaggcggccccctgagaaccttcctggagagacaggccggcagcgaggcccacctgaaggtgagaagacccgagctgctggccgtgatcaagctgctgaacgagaaggagagagagctgagagagaccgagcacctgctgcacgacgagaacgaggacctgagaaagctggccgagaacgagatcaccctgtgccagaaggagatcacccagctgaagcaccagatcatcctgctgctggtgcccagcgaggagaccgacgagaacgacctgatcctggaggtgaccgccggcgtgggcggcggcctgagacacgccagcgccagcatcggcggcagcgaggcctacagacacatgaagttcgagggcggcgtgcacagagtgcagagagtgcccaagaccgagaagcagggcagagtgcacaccagcaccatgaccgtggccatcctgccccagcccaccgagatcaacctggtgatcaaccccaaggacctgagaatcgacaccaagagagccagcggcgccggcggccagcacgtgaacaccaccgacagcgccgtgagaatcgtgcacctgcccaccgactggaagtag

SEQ ID NO: 10620 - DNA, 816 bp, synthetic construct
  source 1..816: mol_type = other DNA; note = Synthetic coding sequence
atgagaagcagagtgctgtggggcgccgccagatggctgtggcccagaagagccgtgggccccgccagaagacccctgagcagcggcagcccccccctggaggagctgttcaccagaggcggccccctgagaaccttcctggagagacaggccggcagcgaggcccacctgaaggtgagaagacccgagctgctggccgtgatcaagctgctgaacgagaaggagagagagctgagagagaccgagcacctgctgcacgacgagaacgaggacctgagaaagctggccgagaacgagatcaccctgtgccagaaggagatcacccagctgaagcaccagatcatcctgctgctggtgcccagcgaggagaccgacgagaacgacctgatcctggaggtgaccgccggcgtgggcggccaggaggccatgctgttcaccagcgagatcttcgacatgtaccagcagtacgccgccttcaagagatggcacttcgagaccctggagtacttccccagcgagctgggcggcctgagacacgccagcgccagcatcggcggcagcgaggcctacagacacatgaagttcgagggcggcgtgcacagagtgcagagagtgcccaagaccgagaagcagggcagagtgcacaccagcaccatgaccgtggccatcctgccccagcccaccgagatcaacctggtgatcaaccccaaggacctgagaatcgacaccaagagagccagcggcgccggcggccagcacgtgaacaccaccgacagcgccgtgagaatcgtgcacctgcccaccgactggaagtag

SEQ ID NO: 10621 - DNA, 1143 bp, synthetic construct
  source 1..1143: mol_type = other DNA; note = Synthetic coding sequence
atgagaagcagagtgctgtggggcgccgccagatggctgtggcccagaagagccgtgggccccgccagaagacccctgagcagcggcagcccccccctggaggagctgttcaccagaggcggccccctgagaaccttcctggagagacaggccggcagcgaggcccacctgaaggtgagaagacccgagctgctggccgtgatcaagctgctgaacgagaaggagagagagctgagagagaccgagcacctgctgcacgacgagaacgaggacctgagaaagctggccgagaacgagatcaccctgtgccagaaggagatcacccagctgaagcaccagatcatcctgctgctggtgcccagcgaggagaccgacgagaacgacctgatcctggaggtgaccgccggcgtgggcggccaggaggccatgctgttcaccagcgagatcttcgacatgtaccagcagtacgccgccttcaagagatggcacttcgagaccctggagtacttccccagcgagctgggcggcctgagacacgccagcgccagcatcggcggcagcgaggcctacagacacatgaagttcgagggcggcgtgcacagagtgcagagagtgcccaagaccgagaagcagggcagagtgcacaccagcaccatgaccgtggccatcctgccccagcccaccgagatcaacctggtgatcaaccccaaggacctgagaatcgacaccaagagagccagcggcgccggcggccagcacgtgaacaccaccgacagcgccgtgagaatcgtgcacctgcccaccggcgtggtgagcgagtgccagcaggagagaagccagctgaagaacaaggagctggccatgaccaagctgagagccaagctgtacagcatgcacctggaggaggagatcaacaagagacagaacgccagaaagatccagatcggcagcaagggcagaagcgagaagatcagaacctacaacttcccccagaacagagtgaccgaccacagaatcaacaagaccctgcacgacctggagaccttcatgcagggcgactacctgctggacgagctggtgcagagcctgaaggagtacgccgactacgagagcctggtggagatcatcagccagaaggtgtag

SEQ ID NO: 10622 - DNA, 3561 bp, synthetic construct
  source 1..3561: mol_type = other DNA; note = Synthetic coding sequence
atgtgcgaggtgatgcccaccatcaacgagggcgacagactgggccccccccacggcgccgacgccgacgccaacttcgagcagctgatggtgaacatgctggacgagagagagaagctgctggagagcctgagagagagccaggagaccctggccgccacccagagcagactgcaggacgccatccacgagagagaccagctgcagagacacctgaacagcgccctgccccaggagttcgccaccctgaccagagagctgagcatgtgcagagagcagctgctggagagagaggaggagatcagcgagctgaaggccgagagaaacaacaccagactgctgctggagcacctggagtgcctggtgagcagacacgagagaagcctgagaatgaccgtggtgaagagacaggcccagagccccagcggcgtgagcagcgaggtggaggtgctgaaggccctgaagagcctgttcgagcaccacaaggccctggacgagaaggtgagagagagactgagagccgccctggagagagtgaccaccctggaggagcagctggccggcgcccaccagcaggtgagcgccctgcagcagggcgccggcgtgagagacggcgccgccgaggaggagggcaccgtggagctgggccccaagagactgtggaaggaggacaccggcagagtggaggagctgcaggagctgctggagaagcagaacttcgagctgagccaggccagagagagactggtgaccctgaccaccaccgtgaccgagctggaggaggacctgggcaccgccagaagagacctgatcaagagcgaggagctgagcagcaagcaccagagagacctgagagaggccctggcccagaaggaggacatggaggagagaatcaccaccctggagaagagatacctggccgcccagagagaggccaccagcatccacgacctgaacgacaagctggagaacgagctggccaacaaggagagcctgcacagacagtgcgaggagaaggccagacacctgcaggagctgctggaggtggccgagcagaagctgcagcagaccatgagaaaggccgagaccctgcccgaggtggaggccgagctggcccagagaatcgccgccctgaccaaggccgaggagagacacggcaacatcgaggagcacctgagacagctggagggccagctggaggagaagaaccaggagctggccagagtgagacagagagagaagatgaacgaggaccacaacaagagactgagcgacaccgtggacagactgctgagcgagagcaacgagagactgcagctgcacctgaaggagagaatggccgccctggaggagaagggcagactgagcgaggagatcgagaagctgagacaggaggtggaccagctgaagggcagaggcggccccttcgtggacggcgtgcacagcagaagccacatgggcagcgccgccgacgtgagattcagcctgggcaccaccacccacgccccccccggcgtgcacagaagatacagcgccctgagagaggagagcgccaaggactgggagaccagccccctgcccggcatgctggcccccgccgccggccccgccttcgacagcgaccccgagatcagcgacgtggacgaggacgagcccggcggcctggtgggcagcgccgacgtggtgagccccagcggccacagcgacgcccagaccctggccatgatgctgcaggagcagctggacgccatcaacgaggagatcagaatgatccaggaggagaaggagagcaccgagctgagagccgaggagatcgagaccagagtgaccagcggcagcatggaggccctgaacctgaagcagctgagaaagagaggcagcatccccaccagcctgaccgccctgagcctggccagcgccagcccccccctgagcggcagaagcacccccaagctgaccagcagaagcgccgcccaggacctggacagaatgggcgtgatgaccctgcccagcgacctgagaaagcacagaagaaagctgctgagccccgtgagcagagaggagaacagagaggacaaggccaccatcaagtgcgagaccagcccccccagcagccccagaaccctgagactggagaagctgggccaccccgccctgagccaggaggagggcaagagcgccctggaggaccagggcagcaaccccagcagcagcaacagcagccaggacagcctgcacaagggcgccaagagaaagggcatcaagagcagcatcggcagactgttcggcaagaaggagaagggcagactgatccagctgagcagagacggcgccaccggccacgtgctgctgaccgacagcgagttcagcatgcaggagcccatggtgcccgccaagctgggcacccaggccgagaaggacagaagactgaagaagaagcaccagctgctggaggacgccagaagaaagggcatgcccttcgcccagtgggacggccccaccgtggtgagctggctggagctgtgggtgggcatgcccgcctggtacgtggccgcctgcagagccaacgtgaagagcggcgccatcatgagcgccctgagcgacaccgagatccagagagagatcggcatcagcaacgccctgcacagactgaagctgagactggccatccaggagatggtgagcctgaccagccccagcgccccccccaccagcagaaccagcagcggcaacgtgtgggtgacccacgaggagatggagaccctggagaccagcaccaagaccgacagcgaggagggcagctgggcccagaccctggcctacggcgacatgaaccacgagtggatcggcaacgagtggctgcccagcctgggcctgccccagtacagaagctacttcatggagtgcctggtggacgccagaatgctggaccacctgaccaagaaggacctgagagtgcacctgaagatggtggacagcttccacagaaccagcctgcagtacggcatcatgtgcctgaagagactgaactacgacagaaaggagctggagaagagaagagaggagagccagcacgagatcaaggacgtgctggtgtggaccaacgaccaggtggtgcactgggtgcagagcatcggcctgagagactacgccggcaacctgcacgagagcggcgtgcacggcgccctgctggccctggacgagaacttcgaccacaacaccctggccctgatcctgcagatccccacccagaacacccaggccagacaggtgatggagagagagttcaacaacctgctggccctgggcaccgacagaaagctggacgacggcgacgacaaggtgttcagaagagcccccagctggagaaagagattcagacccagagagcaccacggcagaggcggcatgctgagcgccagcgccgagaccctgcccgccggcttcagagtgagcaccctgggcaccctgcagcccccccccgccccccccaagaagatcatgcccgaggcccacagccactacctgtacggccacatgctgagcgccttcagagactag

SEQ ID NO: 10623 - DNA, 1803 bp, synthetic construct
  source 1..1803: mol_type = other DNA; note = Synthetic coding sequence
atgagcagagtggccaagtacagaagacaggtgagcgaggaccccgacatcgacagcctgctggagaccctgagccccgaggagatggaggagctggagaaggagctggacgtggtggaccccgacggcagcgtgcccgtgggcctgagacagagaaaccagaccgagaagcagagcaccggcgtgtacaacagagaggccatgctgaacttctgcgagaaggagaccaagaagctgatgcagagagagatgagcatggacgagagcaagcaggtggagaccaagaccgacgccaagaacggcgaggagagaggcagagacgccagcaagaaggccctgggccccagaagagacagcgacctgggcaaggagcccaagagaggcggcctgaagaagagcttcagcagagacagagacgaggccggcggcaagagcggcgagaagcccaaggaggagaagatcatcagaggcatcgacaagggcagagtgagagccgccgtggacaagaaggaggccggcaaggacggcagaggcgaggagagagccgtggccaccaagaaggaggaggagaagaagggcagcgacagaaacaccggcctgagcagagacaaggacaagaagagagaggagatgaaggaggtggccaagaaggaggacgacgagaaggtgaagggcgagagaagaaacaccgacaccagaaaggagggcgagaagatgaagagagccggcggcaacaccgacatgaagaaggaggacgagaaggtgaagagaggcaccggcaacaccgacaccaagaaggacgacgagaaggtgaagaagaacgagcccctgcacgagaaggaggccaaggacgacagcaagaccaagacccccgagaagcagacccccagcggccccaccaagcccagcgagggccccgccaaggtggaggaggaggccgcccccagcatcttcgacgagcccctggagagagtgaagaacaacgaccccgagatgaccgaggtgaacgtgaacaacagcgactgcatcaccaacgagatcctggtgagattcaccgaggccctggagttcaacaccgtggtgaagctgttcgccctggccaacaccagagccgacgaccacgtggccttcgccatcgccatcatgctgaaggccaacaagaccatcaccagcctgaacctggacagcaaccacatcaccggcaagggcatcctggccatcttcagagccctgctgcagaacaacaccctgaccgagctgagattccacaaccagagacacatctgcggcggcaagaccgagatggagatcgccaagctgctgaaggagaacaccaccctgctgaagctgggctaccacttcgagctggccggccccagaatgaccgtgaccaacctgctgagcagaaacatggacaagcagagacagaagagactgcaggagcagagacaggcccaggaggccaagggcgagaagaaggacctgctggaggtgcccaaggccggcgccgtggccaagggcagccccaagcccagcccccagcccagccccaagcccagccccaagaacagccccaagaagggcggcgcccccgccgcccccccccccccccccccccccctggccccccccctgatcatggagaacctgaagaacagcctgagccccgccacccagagaaagatgggcgacaaggtgctgcccgcccaggagaagaacagcagagaccagctgctggccgccatcagaagcagcaacctgaagcagctgaagaaggtggaggtgcccaagctgctgcagtag

SEQ ID NO: 10624 - DNA, 828 bp, synthetic construct
  source 1..828: mol_type = other DNA; note = Synthetic coding sequence
atgggcaccagactgcccctggtgctgagacagctgagaagacccccccagccccccggcccccccagaagactgagagtgccctgcagagccagcagcggcggcggcggcggcggcggcggcggcagagagggcctgctgggccagagaagaccccaggacggccaggccagaagcagctgcagccccggcggcagaacccccgccgccagagacagcatcgtgagagaggtgatccagaacagcaaggaggtgctgagcctgctgcaggagaagaaccccgccttcaagcccgtgctggccatcatccaggccggcgacgacaacctgatgcaggagatcaaccagaacctggccgaggaggccggcctgaacatcacccacatctgcctgccccccgacagcagcgaggccgagatcatcgacgagatcctgaagatcaacgaggacaccagagtgcacggcctggccctgcagatcagcgagaacctgttcagcaacaaggtgctgaacgccctgaagcccgagaaggacgtggacggcgtgaccgacatcaacctgggcaagctggtgagaggcgacgcccacgagtgcttcgtgagccccgtggccaaggccgtgatcgagctgctggagaagagcggcgtgaacctggacggcaagaagatcctggtggtgggcgcccacggcagcctggaggccgccctgcagtgcctgttccagagaaagggcagcatgaccatgagcatccagtggaagaccagacagctgcagagcaagaccgagagcagaagcgtgaccagactggagtgcagaagagtgatctag

SEQ ID NO: 10625 - DNA, 999 bp, synthetic construct
  source 1..999: mol_type = other DNA; note = Synthetic coding sequence
tgaggcagagagggcctgctgggccagagaagaccccaggacggccaggccagaagcagctgcagccccggcggcagaacccccgccgccagagacagcatcgtgagagaggtgatccagaacagcaaggaggtgctgagcctgctgcaggagaagaaccccgccttcaagcccgtgctggccatcatccaggccggcgacgacaacctgatgcaggagatcaaccagaacctggccgaggaggccggcctgaacatcacccacatctgcctgccccccgacagcagcgaggccgagatcatcgacgagatcctgaagatcaacgaggacaccagagtgcacggcctggccctgcagatcagcgagaacctgttcagcaacaaggtgctgaacgccctgaagcccgagaaggacgtggacggcgtgaccgacatcaacctgggcaagctggtgagaggcgacgcccacgagtgcttcgtgagccccgtggccaaggccgtgatcgagctgctggagaagagcgtgggcgtgaacctggacggcaagaagatcctggtggtgggcgcccacggcagcctggaggccgccctgcagtgcctgttccagagaaagggcagcatgaccatgagcatccagtggaagaccagacagctgcagagcaagctgcacgaggccgacatcgtggtgctgggcagccccaagcccgaggagatccccctgacctggatccagcccggcaccaccgtgctgaactgcagccacgacttcctgagcggcaaggtgggctgcggcagccccagaatccacttcggcggcctgatcgaggaggacgacgtgatcctgctggccgccgccctgagaatccagaacatggtgagcagcggcagaagatggctgagagagcagcagcacagaagatggagactgcactgcctgaagctgcagcccctgagccccgtgcccagcgacatcgagatcagcagaggccagaccccctag

SEQ ID NO: 10626 - DNA, 2937 bp, synthetic construct
  source 1..2937: mol_type = other DNA; note = Synthetic coding sequence
atgggcaccagactgcccctggtgctgagacagctgagaagacccccccagccccccggcccccccagaagactgagagtgccctgcagagccagcagcggcggcggcggcggcggcggcggcggcagagagggcctgctgggccagagaagaccccaggacggccaggccagaagcagctgcagccccggcggcagaacccccgccgccagagacagcatcgtgagagaggtgatccagaacagcaaggaggtgctgagcctgctgcaggagaagaaccccgccttcaagcccgtgctggccatcatccaggccggcgacgacaacctgatgcaggagatcaaccagaacctggccgaggaggccggcctgaacatcacccacatctgcctgccccccgacagcagcgaggccgagatcatcgacgagatcctgaagatcaacgaggacaccagagtgcacggcctggccctgcagatcagcgagaacctgttcagcaacaaggtgctgaacgccctgaagcccgagaaggacgtggacggcgtgaccgacatcaacctgggcaagctggtgagaggcgacgcccacgagtgcttcgtgagccccgtggccaaggccgtgatcgagctgctggagaagagcggcgtgaacctggacggcaagaagatcctggtggtgggcgcccacggcagcctggaggccgccctgcagtgcctgttccagagaaagggcagcatgaccatgagcatccagtggaagaccagacagctgcagagcaagctgcacgaggccgacatcgtggtgctgggcagccccaagcccgaggagatccccctgacctggatccagcccggcaccaccgtgctgaactgcagccacgacttcctgagcggcaaggtgggctgcggcagccccagaatccacttcggcggcctgatcgaggaggacgacgtgatcctgctggccgccgccctgagaatccagaacatggtgagcagcggcagaagatggctgagagagcagcagcacagaagatggagactgcactgcctgaagctgcagcccctgagccccgtgcccagcgacatcgagatcagcagaggccagacccccaaggccgtggacgtgctggccaaggagatcggcctgctggccgacgagatcgagatctacggcaagagcaaggccaaggtgagactgagcgtgctggagagactgaaggaccaggccgacggcaagtacgtgctggtggccggcatcacccccacccccctgggcgagggcaagagcaccgtgaccatcggcctggtgcaggccctgaccgcccacctgaacgtgaacagcttcgcctgcctgagacagcccagccagggccccaccttcggcgtgaagggcggcgccgccggcggcggctacgcccaggtgatccccatggaggagttcaacctgcacctgaccggcgacatccacgccatcaccgccgccaacaacctgctggccgccgccatcgacaccagaatcctgcacgagaacacccagaccgacaaggccctgtacaacagactggtgcccctggtgaacggcgtgagagagttcagcgagatccagctggccagactgaagaagctgggcatcaacaagaccgaccccagcaccctgaccgaggaggaggtgagcaagttcgccagactggacatcgaccccagcaccatcacctggcagagagtgctggacaccaacgacagattcctgagaaagatcaccatcggccagggcaacaccgagaagggccactacagacaggcccagttcgacatcgccgtggccagcgagatcatggccgtgctggccctgaccgacagcctggccgacatgaaggccagactgggcagaatggtggtggccagcgacaagagcggccagcccgtgaccgccgacgacctgggcgtgaccggcgccctgaccgtgctgatgaaggacgccatcaagcccaacctgatgcagaccctggagggcacccccgtgttcgtgcacgccggccccttcgccaacatcgcccacggcaacagcagcgtgctggccgacaagatcgccctgaagctggtgggcgaggagggcttcgtggtgaccgaggccggcttcggcgccgacatcggcatggagaagttcttcaacatcaagtgcagagccagcggcctggtgcccaacgtggtggtgctggtggccaccgtgagagccctgaagatgcacggcggcggccccagcgtgaccgccggcgtgcccctgaagaaggagtacaccgaggagaacatccagctggtggccgacggctgctgcaacctgcagaagcagatccagatcacccagctgttcggcgtgcccgtggtggtggccctgaacgtgttcaagaccgacaccagagccgagatcgacctggtgtgcgagctggccaagagagccggcgccttcgacgccgtgccctgctaccactggagcgtgggcggcaagggcagcgtggacctggccagagccgtgagagaggccgccagcaagagaagcagattccagttcctgtacgacgtgcaggtgcccatcgtggacaagatcagaaccatcgcccaggccgtgtacggcgccaaggacatcgagctgagccccgaggcccaggccaagatcgacagatacacccagcagggcttcggcaacctgcccatctgcatggccaagacccacctgagcctgagccaccagcccgacaagaagggcgtgcccagagacttcatcctgcccatcagcgacgtgagagccagcatcggcgccggcttcatctaccccctggtgggcaccatgagcaccatgcccggcctgcccaccagaccctgcttctacgacatcgacctggacaccgagaccgagcaggtgaagggcctgttctag

SEQ ID NO: 10627 - DNA, 408 bp, synthetic construct
  source 1..408: mol_type = other DNA; note = Synthetic coding sequence
atgatccccaacggctacctgatgttcgaggacgagaacttcatcgagagcagcgtggccaagctgaacgccctgagaaagagcggccagttctgcgacgtgagactgcaggtgtgcggccacgagatgctggcccacagagccgtgctggcctgctgcagcccctacctgttcgagatcttcaacagcgacagcgacccccacggcatcagccacgtgaagttcgacgacctgaaccccgaggccgtggaggtgctgctgaactacgcctacaccgcccagctgaaggccgacaaggagctggtgaaggacgtgtacagcgccgccaagaagctgaagatggacagagtgaagcagcacctgctgtacttctgcctgcacagcaccagcaccagcagcctgctgtag

SEQ ID NO: 10628 - DNA, 1929 bp, synthetic construct
  source 1..1929: mol_type = other DNA; note = Synthetic coding sequence
atgatccccaacggctacctgatgttcgaggacgagaacttcatcgagagcagcgtggccaagctgaacgccctgagaaagagcggccagttctgcgacgtgagactgcaggtgtgcggccacgagatgctggcccacagagccgtgctggcctgctgcagcccctacctgttcgagatcttcaacagcgacagcgacccccacggcatcagccacgtgaagttcgacgacctgaaccccgaggccgtggaggtgctgctgaactacgcctacaccgcccagctgaaggccgacaaggagctggtgaaggacgtgtacagcgccgccaagaagctgaagatggacagagtgaagcaggtgtgcggcgactacctgctgagcagaatggacgtgaccagctgcatcagctacagaaacttcgccagctgcatgggcgacagcagactgctgaacaaggtggacgcctacatccaggagcacctgctgcagatcagcgaggaggaggagttcctgaagctgcccagactgaagctggaggtgatgctggaggacaacgtgtgcctgcccagcaacggcaagctgtacaccaaggtgatcaactgggtgcagagaagcatctgggagaacggcgacagcctggaggagctgatggaggaggtgcagaccctgtactacagcgccgaccacaagctgctggacggcaacctgctggacggccaggccgaggtgttcggcagcgacgacgaccacatccagttcgtgcagaagaagccccccagagagaacggccacaagcagatcagcagcagcagcaccggctgcctgagcagccccaacgccaccgtgcagagccccaagcacgagtggaagatcgtggccagcgagaagaccagcaacaacacctacctgtgcctggccgtgctggacggcatcttctgcgtgatcttcctgcacggcagaaacagcccccagagcagccccaccagcacccccaagctgagcaagagcctgagcttcgagatgcagcaggacgagctgatcgagaagcccatgagccccatgcagtacgccagaagcggcctgggcaccgccgagatgaacggcaagctgatcgccgccggcggctacaacagagaggagtgcctgagaaccgtggagtgctacaacccccacaccgaccactggagcttcctggcccccatgagaacccccagagccagattccagatggccgtgctgatgggccagctgtacgtggtgggcggcagcaacggccacagcgacgacctgagctgcggcgagatgtacgacagcaacatcgacgactggatccccgtgcccgagctgagaaccaacagatgcaacgccggcgtgtgcgccctgaacggcaagctgtacatcgtgggcggcagcgacccctacggccagaagggcctgaagaactgcgacgtgttcgaccccgtgaccaagctgtggaccagctgcgcccccctgaacatcagaagacaccagagcgccgtgtgcgagctgggcggctacctgtacatcatcggcggcgccgagagctggaactgcctgaacaccgtggagagatacaaccccgagaacaacacctggaccctgatcgcccccatgaacgtggccagaagaggcgccggcgtggccgtgctgaacggcaagctgttcgtgtgcggcggcttcgacggcagccacgccatcagctgcgtggagatgtacgaccccaccagaaacgagtggaagatgatgggcaacatgaccagccccagaagcaacgccggcatcgccaccgtgggcaacaccatctacgccgtgggcggcttcgacggcaacgagttcctgaacaccgtggaggtgtacaacctggagagcaacgagtggagcccctacaccaagatcttccagttctag

SEQ ID NO: 10629 - DNA, 408 bp, synthetic construct
  source 1..408: mol_type = other DNA; note = Synthetic coding sequence
atgagcaagaacaccgtgagcagcgccagattcagaaaggtggacgtggacgagtacgacgagaacaagttcgtggacgaggaggacggcggcgacggccaggccggccccgacgagggcgaggtggacagctgcctgagacagggcaacatgaccgccgccctgcaggccgccctgaagaacccccccatcaacaccaagagccaggccgtgaaggacagagccggcagcatcgtgctgaaggtgctgatcagcttcaaggccaacgacatcgagaaggccgtgcagagcctggacaagaacggcgtggacctgctgatgaagtacatctacaagggcttcgagagccccagcgacaacagcagcgccatgctgctgcagtggcacgagaaggtgcccctggtgtag

SEQ ID NO: 10630 - DNA, 849 bp, synthetic construct
  source 1..849: mol_type = other DNA; note = Synthetic coding sequence
atggccagcagcttcctgcccgccggcgccatcaccggcgacagcggcggcgagctgagcagcggcgacgacagcggcgaggtggagttcccccacagccccgagatcgaggagaccagctgcctggccgagctgttcgagaaggccgccgcccacctgcagggcctgatccaggtggccagcagagagcagctgctgtacctgtacgccagatacaagcaggtgaaggtgggcaactgcaacacccccaagcccagcttcttcgacttcgagggcaagcagaagtgggaggcctggaaggccctgggcgacagcagccccagccaggccatgcaggagtacatcgccgtggtgaagaagctggaccccggctggaacccccagatccccgagaagaagggcaaggaggccaacaccggcttcggcggccccgtgatcagcagcctgtaccacgaggagaccatcagagaggaggacaagaacatcttcgactactgcagagagaacaacatcgaccacatcaccaaggccatcaagagcaagaacgtggacgtgaacgtgaaggacgaggagggcagagccctgctgcactgggcctgcgacagaggccacaaggagctggtgaccgtgctgctgcagcacagagccgacatcaactgccaggacaacgagggccagaccgccctgcactacgccagcgcctgcgagttcctggacatcgtggagctgctgctgcagagcggcgccgaccccaccctgagagaccaggacggctgcctgcccgaggaggtgaccggctgcaagaccgtgagcctggtgctgcagagacacaccaccggcaaggcctag

SEQ ID NO: 10631 - DNA, 9354 bp, synthetic construct
  source 1..9354: mol_type = other DNA; note = Synthetic coding sequence
atgagaagcagcaagagcaaggaggtgcccctgcccaaccccagaaacagccagagcaaggacaccgtgcaggccgacatcaccaccagctgggacgccctgagccagaccaaggccgccctgagacacatcgagaacaagctggaggtggcccccaccagcaccgccgtgtgcgacagcgtgatggacaccaagaagagcagcaccagcgccaccagaaagatcagcagaaaggacggcagatacctggacgacagctgggtgaacgcccccatcagcaagagcaccaagagcagaaaggagaagagcagaagccccctgagagccaccaccctggagagcaacgtgaagaagaacaacagagtggagttcagagagcccctggtgagctacagagagatccacggcgcccccagcaacttcagcagcagccacctggagagcaagcacgtgtactgcgtggacgtgaacgaggagaagaccgagagcggcaactggatgatcggcagcagagaggagagaaacatcagaagctgcgacttcgagagcagccagagcagcgtgatcaacgacaccgtggtgagattcctgaacgacagacccgccatcgacgccctgcagaacagcgagtgcctgatcagaatgggcgccagcatgagaaccgaggaggagatgcccaacagaaccaagggcagcgagaacaacctgaagctgagcgtgaacaacatggcccacgacaccgaccccaaggccctgagactgaccgacagcagccccagcagcaccagcaccagcaacagccagagactggacatcctgaagagaagacagcacgacgtgaagctggagaagctgaaggagagaatcagaaagcagtgggagcacagcgaggagaccaacggcagaggccagaagctgggccacatcgaccaccccgtgatggtggtgaacgtggacaacagcgtgaccgccaaggtgagaaaggtggccaccgccccccccgcccccgcctacaagggcttcaaccccagcgagaccaagatcagaacccccgacggcaaggtgtggcaggaggccgagttccagaacatgagcagagagctgtacagagacctggccctgcacttcgccgacgacatcagcatcaaggagaagcccgccgagaagagcaaggagaagaaggtggtgaagcccgtgagaaaggtgcagaaggtggcccagctgagcagcaccgagtgcagaaccggcagcagccacctgatcagcaccagcagctggagagacggccagaagctggtgaagaagatcctgggccccgcccccagaatggagcccaaggagcagagaaccgccagcagcgacagaggcggcagagagagaaccgccaagagcggcggccacatcggcagagccgagagcgaccccagactggacgtgctgcacagacacctgcagagaaacagcgagagaagcagaagcaagagcagaagcgagaacaacatcaagaagctggccagcagcctgcccgacaacaagcaggaggagaacaccgccctgaacaaggacttcctgcccatcgagatcagaggcatcctggacgacctgcagctggacagcaccgcccacaccgccaagcaggacaccgtggagctgcagaaccagaagagcagcgcccccgtgcacgcccccagaagccacagccccgtgaagagaaagcccgacaagatcaccgccaacgaggacccccccgtgatcagcaagagaagacactacgacaccgacgaggtgagacagtacatcgtgagacagcaggaggagagaaagagaaagcagaacgaggagaagaaggcccagaaggaggccaccgagcagaagaacaagagactgcaggagctgtacagaaagcagaaggaggccttcaccaaggtgaagaacgtgccccccagcgagcccagcgccaccagaagactgcaggagacctacagcaagctgctgctggagaagaccctgctggaggagcccagccaccagcacgtgacccaggagacccaggccaagcccggctaccagcccagcggcgagagcgacaaggagaacaaggtgcaggagagaccccccagcgccagcagcagcagcgacatgagcctgagcgagcccccccagcccctggccagaaaggacctgatggagagcacctggatgcagcccgagagactgagcccccaggtgcaccacagccagccccagcccttcgccggcaccgccggcagcctgctgagccacctgctgagcctggagcacgtgggcatcctgcacaaggacttcgagagcatcctgcccaccagaaagaaccacaacatggccagcagacccctgaccttcaccccccagccctacgtgaccagccccgccgcctacaccgacgccctgctgaagcccagcgccagccagtacaagagcaagctggacagaatcgaggccctgaaggccaccgccgccagcctgagcagcagaatcgagagcgaggccaagaagctggccggcgccagcatcaactacggcagcgcctggaacaccgagtacgacgtgcagcaggccccccaggaggacggcccctggaccaaggccgtgaccccccccgtgaaggacgacaacgaggacgtgttcagcgccagaatccagaagatgctgggcagctgcgtgagccacgccaccttcgacgacgacctgcccggcgtgggcaacctgagcgagttcaagaagctgcccgagatgatcagaccccagagcgccatcagcagcttcagagtgagaagccccggccccaagcccgagggcctgctggcccagctgtgcaagagacagaccgacagcagcagcagcgacatgcaggcctgcagccaggacaaggccaagatcagcctgggcagcagcatcgacagcgtgagcgagggccccctgctgagcgagggcagcctgagcgaggaggagggcgaccaggacggccagcccctgctgaaggtggccgagatcctgaaggagaaggagttctgccccggcgagagaaacagctacgagcccatcaaggagttccagaaggaggccgagaagttcctgcccctgttcggccacatcggcggcacccagagcaagggcccctgggaggagctggccaagggcagcccccacagcgtgatcaacatcttcaccaagagctaccagctgtacggcaagggcttcgaggacaagctggacagaggcaccagcaccagcagacccctgaacgccaccgccacccccctgagcggcgtgagctacgaggacgacttcgtgagcagccccggcaccggcaccagcaccgagaagaagagcaccctggagccccacagcaccctgagcccccaggaggaccacagcaacagaaagagcgcctacgaccccagcagcgtggacgtgaccagccagcacagcagcggcgcccagagcgccgccagcagcagaagcagcaccagcagcaagggcaagaagggcaagaaggagaagaccgagtggctggacagcttcaccggcaacgtgcagaacagcctgctggacgaggagaaggccgagagaggcagccaccagggcaagaagagcggcaccagcagcaagctgagcgtgaaggacttcgagcagaccctggacaccgacagcaccctggaggacctgagcggccacagcgtgagcgtgagcagcgacaagggcagaagccagaagacccccaccagccccctgagccccagcagccagaagagcctgcagttcgacgtggccggcaccagcagcgagagaagcaagagcagcgtgatgccccccaccatcaccggcttcaagcccaacgcccccctgaccgacctgaaccccgccgccagcagaaccaccaccgagaacatggcccccatccccggcagcaagagattcagccccgccggcctgcaccacagaatggccgccgagctgagctacctgaacgccatcgaggagagcgtgagacagctgagcgacgtggagagagtgagaggcatcagcctggcccagcaggagagcgtgagcctggcccagatcatcaaggcccagcagcagagacacgagagagacctggccctgctgaagctgaaggccgagcaggaggccctggagagccagagacagctggaggagaccagaaacaaggccgcccaggtgcacgccgagagcctgcagcaggtggtgcagagccagagagaggtgaccgaggtgctgcaggaggccacctgcaagatcgccgcccagcagagcgagaccgccagactgaccaccgacgccgccagacagatctgcgagatggccgagctgaccagaacccacatcagcgacgccgtggtggccagcggcgcccccctggccatcctgtacgaccaccagagacagcacctgcccgacttcgtgaagcagctgagaaccagaaccgagaccgacagaaagagccccagcgtgagcctgagccagagcaaggagggcaccctggacagcaagcaccagaagtacagcgccagctacgacagctacagcgagagcagcggctacaagaaccacgacagaagaagcagcagcggcagcagcagacaggagagccccagcgtgcccagctgcaaggagaacgagaagaagctgaacggcgagaagatcgagagcagcatcgacgagcaggtgcagaccgccgccgacgacagcctgagaagcgacagcgtgcccagcctgcccgacgagaaggacagcaccagcatcgccaccgagtacagcctgaagttcgacgagagcatgaccgaggacgagatcgaggagcagagcttcagaagcctgctgcccagcgagagccacagaagattcaacatggagaagagaagaggccaccacgacgacagcgacgaggaggccagccccgagaagaccaccctgagcaccgccaaggagctgaacatgcccttcagcggcggccaggacagcttcagcaagttcaccatggagatggtgagacagtacatgaaggaggaggagatgagagccgcccaccagagcagcctgctgagactgagagagaaggccctgaaggagaagaccaaggccgagctggcctggctggagcaccagaagaagcacctgagagacaagggcgaggacgacaagatgccccccctgagaaagaagcagagaggcctgctgctgagactgcagcaggagaaggccgagatcaagagactgcaggaggccaacaaggccgccagaaaggagagacagctgatcctgaagcagcaggaggagatcgagaagatcagacagaccaccatcaagctgcaggagaagctgaagagcgccggcgagagcaagctggacagccacagcgacgacgacaccaaggacaacaaggccaccagccccggccccaccgacctggagaccagaagccccagccccatcagcatcagcagcagcgagaccagcagcatcatgcagaagctgaagaagatgagaagcagaatggacgagaagttcctgaccaagagagagcagaagctgatgcagagaagacagcacgccgaggagctgctggagtggaagagaagactggacgccgaggaggccgagatcagacagatggagaagcaggccctggccgcctgggacaaggagctgatcaagcccaagacccccaagaaggagctggaggaccagagaaccgagcagaaggagatcgccagcgaggaggagagccccgtgcccctgtacagccacctgaacagcgagagcagcatccccgaggagctgggcagccccgccgtggagtacgtgcccagcgagagcatcggccaggagcagcccggcagccccgaccacagcatcctgaccgaggagatgatctgcagccaggagctggagagcagcaccagccccagcaagcacagcctgcccaagagctgcaccagcgtgagcaagcaggagagcagcaagggcagccacagaaccggcggccagtgccacctgcccatcaagagccaccagcactgctacagctggagcgacgagagcctgagcatgacccagagcgagaccaccagcgaccagagcgacatcgagggcagaatcagagccctgaaggacgagctgagaaagagaaagagcgtggtgaaccagctgaagaaggagcagaagaagagacagaaggagagactgaaggcccaggaggccagcctgatcaagcagctggagagctacgacgagttcatcaagaagaccgaggccgagctgagccaggacctggagaccagccccaccgccaagccccagatcaagaccctgagcagcgccagcgagaagcccaagatcaagcccctgacccccctgcacagaagcgagaccgccaagaactggaagagcctgaccgagagcgagagaagcagaggcagcctggagagcatcgccgagcacgtggacgccagcctgagcggcagcgagagaagcgtgagcgagagaagcctgagcgcctacgccaagagagtgaacgagtgggacagcagaaccgaggacttccagacccccagccccgtgctgagaagcagcagaaagatcagagaggagagcggcgacagcctggagaacgtgcccgccctgcacctgctgaaggagctgaacgccaccagcagaatcctggacatgagcgacggcaaggtgggcgagagcagcaagaagagcgagatcaaggagatcgagtacaccaagctgaagaagagcaagatcgaggacgccttcagcaaggagggcaagagcgacgtgctgctgaagctggtgctggagcagggcgacagcagcgagatcctgagcaagaaggacctgcccctggacagcgagaacgtgcagaaggacctggtgggcctggccatcgagaacctgcacaagagcgaggagatgctgaaggagagacagagcgaccaggacatgaaccacagccccaacatccagagcggcaaggacatccacgagcagaagaacaccaaggagaaggacctgagctggagcgagcacctgttcgcccccaaggagatcccctacagcgaggacttcgaggtgagcagcttcaagaaggagatcagcgccgagctgtacaaggacgacttcgaggtgagcagcctgctgagcctgagaaaggacagccagagctgcagagacaagccccagcccatgagaagcagcaccagcggcgccaccagcttcggcagcaacgaggagatcagcgagtgcctgagcgagaagagcctgagcatccacagcaacgtgcacagcgacagactgctggagctgaagagccccaccgagctgatgaagagcaaggagagaagcgacgtggagcacgagcagcaggtgaccgagagccccagcctggccagcgtgcccaccgccgacgagctgttcgacttccacatcggcgacagagtgctgatcggcaacgtgcagcccggcatcctgagattcaagggcgagaccagcttcgccaagggcttctgggccggcgtggagctggacaagcccgagggcaacaacaacggcacctacgacggcatcgcctacttcgagtgcaaggagaagcacggcatcttcgcccccccccagaagatcagccacatccccgagaacttcgacgactacgtggacatcaacgaggacgaggactgctacagcgacgagagataccagtgctacaaccaggagcagaacgacaccgagggccccaaggacagagagaaggacgtgagcgagtacttctacgagaagagcctgcccagcgtgaacgacatcgaggccagcgtgaacagaagcagaagcctgaagatcgagaccgacaacgtgcaggacatcagcggcgtgctggaggcccacgtgcaccagcagagcagcgtggacagccagatcagcagcaaggagaacaaggacctgatcagcgacgccaccgagaaggtgagcatcgccgccgaggacgacaccctggacaacaccttcagcgaggagctggagaagcagcagcagttcaccgaggaggaggacaacctgtacgccgaggccagcgagaagctgtgcacccccctgctggacctgctgaccagagagaagaaccagctggaggcccagctgaagagcagcctgaacgaggagaagaagagcaagcagcagctggagaagatcagcctgctgaccgacagcctgctgaaggtgttcgtgaaggacaccgtgaaccagctgcagcagatcaagaagaccagagacgagaagatccagctgagcaaccaggagctgctgggcgacgaccagaagaaggtgaccccccaggacctgagccagaacgtggaggagcagagccccagcatcagcggctgcttcctgagcagcgagctggaggacgagaaggaggagatcagcagccccgacatgtgccccagacccgagagccccgtgttcggcgccagcggccaggaggagctggccaagagactggccgagctggagctgagcagagagttcctgagcgccctgggcgacgaccaggactggttcgacgaggacttcggcctgagcagcagccacaagatccagaagaacaaggccgaggagaccatcgtgcccctgatggccgagcccaagagagtgacccagcagccctgcgagaccctgctggccgtgccccacaccgccgaggaggtggagatcctggtgcacaacgccgccgaggagctgtggaagtggaaggagctgggccacgacctgcacagcatcagcatccccaccaagctgctgggctgcgccagcaagggcctggacatcgagagcaccagcaagagagtgtacaagcaggccgtgttcgacctgaccaaggagatcttcgaggagatcttcgccgaggaccccaacctgaaccagcccgtgtggatgaagccctgcagaatcaacagcagctacttcagaagagtgaagaaccccaacaacctggacgagatcaagagcttcatcgccagcgaggtgctgaagctgttcagcctgaagaaggagcccaaccacaagaccgactggcagaagatgatgaagttcggcagaaagaagagagacagagtggaccacatcctggtgcaggagctgcacgaggaggaggcccagtgggtgaactacgacgaggacgagctgtgcgtgaagatgcagctggccgacggcatcttcgagaccctgatcaaggacaccatcgacgtgctgaaccagatcagcgagaagcagggcagaatgctgctggtgtag

SEQ ID NO: 10632 - DNA, 2946 bp, synthetic construct; identical to SEQ ID NO: 9659
  source 1..2946: mol_type = other DNA; note = Synthetic coding sequence

SEQ ID NO: 10633 - DNA, 648 bp, synthetic construct
  source 1..648: mol_type = other DNA; note = Synthetic coding sequence
atgagcgccaagagagccgagctgaagaagacccacctggtgaaggagagacactgctggaccagcaagaactacaaggccgtgtgcctggagctgaagcccgagcccaccaagaccttcgactacaaggccgtgaagcaggagggcagattcaccaaggccggcgtgacccaggacctgaagaacgagctgagagaggtgagagaggagctgaaggagaagatggaggagatcaagcagatcaaggacctgatggacaaggacttcgacaagctgcacgagttcgtggagatcatgaaggagatgcagaaggacatggacgagaagatggacatcctgatcaacacccagaagaactacaagctgcccctgagaagagcccccaaggagcagcaggagctgagactgatgggcaagacccacagagagccccagctgagacccaagaagatggacggcgccagcggcgtgaacggcgccccctgcgccctgcacaagaagaccatggccccccagaagaccaagcagggcagcctggaccccctgcaccactgcggcacctgctgcgagaagtgcctgctgtgcgccctgaagaacaactacaacagaggcatctacgccgccgtgggcctgctggacctgtggtag

SEQ ID NO: 10634 - DNA, 606 bp, synthetic construct
  source 1..606: mol_type = other DNA; note = Synthetic coding sequence
atgagcgccaagagagccgagctgaagaagacccacctgagcaagaactacaaggccgtgtgcctggagctgaagcccgagcccaccaagaccttcgactacaaggccgtgaagcaggagggcagattcaccaaggccggcgtgacccaggacctgaagaacgagctgagagaggtgagagaggagctgaaggagaagatggaggagatcaagcagatcaaggacctgatggacaaggacttcgacaagctgcacgagttcgtggagatcatgaaggagatgcagaaggacatggacgagaagatggacatcctgatcaacacccagaagaactacaagctgcccctgagaagagcccccaaggagcagcaggagctgagactgatgggcaagacccacagagagccccagctgagacccaagaagatggacggcgccagcggcgtgaacggcgccccctgcgccctgcacaagaagaccatggccccccagaagaccaagcagggcagcctggaccccctgcaccactgcggcacctgctgcgtgagcgagaccctgcccgagcccagcaccggcgccagacccctggcccccgccccctggtag

SEQ ID NO: 10635 - DNA, 300 bp, synthetic construct
  source 1..300: mol_type = other DNA; note = Synthetic coding sequence
atgagcgccaagagagccgagctgaagaagacccacctgagcaagaactacaaggccgtgtgcctggagctgaagcccgagcccaccaaggtgagaagccccttcgaggccatgcaggccgccagacccgagatccacggcgaggtgaccagaagccagggcagcttcgccgaccccagcggccaggacctgagccagaccttcgactacaaggccgtgaagcaggagggcagattcaccaaggccggcagaacccccagactgctggaggagctgagcctgctgctgctgcccctgtag

SEQ ID NO: 10636 - DNA, 639 bp, synthetic construct
  source 1..639: mol_type = other DNA; note = Synthetic coding sequence
atgagcgccaagagagccgagctgaagaagacccacctgagcaagaactacaaggccgtgtgcctggagctgaagcccgagcccaccaagaccttcgactacaaggccgtgaagcaggagggcagattcaccaaggccggcgtgacccaggacctgaagaacgagctgagagaggtgagagaggagctgaaggagaagatggaggagatcaagcagatcaaggacctgatggacaaggacttcgacaagctgcacgagttcgtggagatcatgaaggagatgcagaaggacatggacgagaagatggacatcctgatcaacacccagaagaactacaagctgcccctgagaagagcccccaaggagcagcaggagctgagactgatgggcaagacccacagagagccccagctgagacccaagaagatggacggcgccagcggcgtgaacggcgccccctgcgccctgcacaagaagaccatggccccccagaagaccaagcagggcagcctggaccccctgcaccactgcggcacctgctgcgagaagtgcctgctgtgcgccctgaagaacaactacaacagagcccagctgcagaacctgcccgccgtgcccatccaccacctgcaggccccctag

SEQ ID NO: 10637 - DNA, 402 bp, synthetic construct
  source 1..402: mol_type = other DNA; note = Synthetic coding sequence
tgatacgagctgagagaggagcacctggacaagatcttcaagcacagagagctgcagcagaagctggtggacgccaagctggagcaggcccaggagatgatgaaggaggccgaggagagacacaagagagagaaggagtacctgctgaaccaggccgccgagtggaagctgcaggccaaggtgctgaaggagcaggagaccgtgctgcaggcccaggtgagacccggcggcagaggcatgggcgtgctgagcagcctgagccccgacaagaaggccggcgccaagggcggccagcagaagagcagctacgtggccggcgacggcggcatgggcatcggcaacgaggagcagctgcacatctacagctacttccaggtgaagatcaaggcccagtactactag

SEQ ID NO: 10638 - DNA, 687 bp, synthetic construct
  source 1..687: mol_type = other DNA; note = Synthetic coding sequence
atggccagcgaggagctgcagaaggacctggaggaggtgaaggtgctgctggagaaggccaccagaaagagagtgagagacgccctgaccgccgagaagagcaagatcgagaccgagatcaagaacaagatgcagcagaagagccagaagaaggccgagctgctggacaacgagaagcccgccgccgtggtggcccccatcaccaccggctacaccgtgaagatcagcaactacggctgggaccagagcgacaagttcgtgaagatctacatcaccctgaccggcgtgcaccaggtgcccaccgagaacgtgcaggtgcacttcaccgagagaagcttcgacctgctggtgaagaacctgaacggcaagagctacagcatgatcgtgaacaacctgctgaagcccatcagcgtggagggcagcagcaagaaggtgaagaccgacaccgtgctgatcctgtgcagaaagaaggtggagaacaccagatgggactacctgacccaggtggagaaggagtgcaaggagaaggagaagcccagctacgacaccgagaccgaccccagcgagggcctgatgaacgtgctgaagaagatctacgaggacggcgacgacgacatgaagagaaccatcaacaaggcctgggtggagagcagagagaagcaggccaagggcgacaccgagttctag

SEQ ID NO: 10639 - DNA, 558 bp, synthetic construct
  source 1..558: mol_type = other DNA; note = Synthetic coding sequence
atgcagcagaagagccagaagaaggccgagctgctggacaacgagaagcccgccgccgtggtggcccccatcaccaccggctacaccgtgaagatcagcaactacggctgggaccagagcgacaagttcgtgaagatctacatcaccctgaccggcgtgcaccaggtgcccaccgagaacgtgcaggtgcacttcaccgagagaagcttcgacctgctggtgaagaacctgaacggcaagagctacagcatgatcgtgaacaacctgctgaagcccatcagcgtggagggcagcagcaagaaggtgaagaccgacaccgtgctgatcctgtgcagaaagaaggtggagaacaccagatgggactacctgacccaggtggagaaggagtgcaaggagaaggagaagcccagctacgacaccgagaccgaccccagcgagggcctgatgaacgtgctgaagaagatctacgaggacggcgacgacgacatgaagagaaccatcaacaaggcctgggtggagagcagagagaagcaggccaagggcgacaccgagttctag

SEQ ID NO: 10640 - DNA, 1134 bp, synthetic construct
  source 1..1134: mol_type = other DNA; note = Synthetic coding sequence
atggagcagctgcccgacctgcacagccacttcagcgacctgaacctggaggcccacatgtacgccagccagtggttcctgaccctgttcaccgccaagttccccctgtgcatggtgttccacatcatcgacctgctgctgtgcgagggcctgaacatcatcttccacgtggccctggccctgctgaagaccagcaaggaggacctgctgcaggccgacttcgagggcgccctgaagttcttcagagtgcagctgcccaagagatacagagccgaggagaacgccagaagactgatggagcaggcctgcaacatcaaggtgcccaccaagaagctgaagaagtacgagaaggagtaccagaccatgagagagagccagctgcagcaggaggaccccatggacagatacaagagagagaacagaagactgcaggaggccagcatgagactggagcaggagaacgacgacctggcccacgagctggtgaccagcaagatcgccctgagaaacgacctggaccaggccgaggacaaggccgacgtgctgaacaaggagctgctgctgaccaagcagagactggtggagaccgaggaggagaagagaaagcaggaggaggagaccgcccagctgaaggaggtgttcagaaagcagctggagaaggccgagtacgagatcaagaagaccaccgccatcatcgccgagtacaagcagatctgcagccagctgagcaccagactggagaagcagcaggccgccagcaaggaggagctggaggtggtgaagggcaagatgatggcctgcaagcactgcagcgacatcttcagcaaggagggcgccctgaagctggccgccaccggcagagaggaccagggcatcgagaccgacgacgagaaggacagcctgaagaagcagctgagagagatggagctggagctggcccagaccaagctgcagctggtggaggccaagtgcaagatccaggagctggagcaccagagaggcgccctgatgaacgagatccaggccgccaagaacagctggttcagcaagaccctgaacagcatcaagaccgccaccggcacccagcccctgcagcccgcccccgtgacccagccccccaaggagagcacctag

SEQ ID NO: 10641 - DNA, 762 bp, synthetic construct
  source 1..762: mol_type = other DNA; note = Synthetic coding sequence
atgatcgagaacagcagctggagcatgaccttcgaggagagagagaacagaagactgcaggaggccagcatgagactggagcaggagaacgacgacctggcccacgagctggtgaccagcaagatcgccctgagaaacgacctggaccaggccgaggacaaggccgacgtgctgaacaaggagctgctgctgaccaagcagagactggtggagaccgaggaggagaagagaaagcaggaggaggagaccgcccagctgaaggaggtgttcagaaagcagctggagaaggccgagtacgagatcaagaagaccaccgccatcatcgccgagtacaagcagatctgcagccagctgagcaccagactggagaagcagcaggccgccagcaaggaggagctggaggtggtgaagggcaagatgatggcctgcaagcactgcagcgacatcttcagcaaggagggcgccctgaagctggccgccaccggcagagaggaccagggcatcgagaccgacgacgagaaggacagcctgaagaagcagctgagagagatggagctggagctggcccagaccaagctgcagctggtggaggccaagtgcaagatccaggagctggagcaccagagaggcgccctgatgaacgagatccaggccgccaagaacagctggttcagcaagaccctgaacagcatcaagaccgccaccggcacccagcccctgcagcccgcccccgtgacccagccccccaaggagagcacctag

SEQ ID NO: 10642 - DNA, 759 bp, synthetic construct
  source 1..759: mol_type = other DNA; note = Synthetic coding sequence
atgggcaagagctacgacggcagagcctacgtgatcaccggcatgtggaaccccaacgcccccgtgttcctggccctgaacgaggagacccccaaggacaagcaggtgtacatgaccgtggccgtggacatggtggtgaccgaggtggtggagcccgtgagattcctgctggagaccgtggtgagagtgtaccccgccaacgagagattctggtacttcagcagaaagaccttcaccgagaccttcttcatgagactgaagcagagcgagggcaagggccacaccaacgccggcgacgccatctacgaggtggtgagcctgcagagagagagcgacaaggaggagcccgtgacccccaccagcggcggcggccccatgagcccccaggacgacgaggccgaggaggagagcgacaacgagctgagcagcggcaccggcgacgtgagcaaggactgccccgagaagatcctgtacagctggggcgagctgctgggcaagtggcacagcaacctgggcgccagacccaagggcctgagcaccctggtgaagagcggcgtgcccgaggccctgagagccgaggtgtggcagctgctggccggctgccacgacaaccaggccatgctggacagatacagaatcctgatcaccaaggtgtgctggagcctgctggaggtgcacagcagaccctgcctgcccggctaccaccagtggaagctgcagaacagcaagtactgcagaatggccaacgtggccgcctag

SEQ ID NO: 10643 - DNA, 2484 bp, synthetic construct
  source 1..2484: mol_type = other DNA; note = Synthetic coding sequence
atggaggtgagagccagcctgcagaaggtgagcggcagcagcgacagcgtggccaccatgaacagcgaggagttcgtgctggtgccccagtacgccgacgacaacagcaccaagcacgaggagaagccccagctgaagatcgtgagcaacggcgacgagcagctggagaaggccatggaggagatcctgagagacagcgagaagagacccagcagcctgctggtggactgccagagcagcagcgagatcagcgaccacagcttcggcgacatccccgccagccagaccaacaagcccagcctgcagctgatcctggaccccagcaacaccgagatcagcacccccagacccagcagccccggcggcctgcccgaggaggacagcgtgctgttcaacaagctgacctacctgggctgcatgaaggtgagcagccccagaaacgaggtggaggccctgagagccatggccaccatgaagagcagcagccagtaccccttccccgtgaccctgtacgtgcccaacgtgcccgagggcagcgtgagaatcatcgaccagagcagcaacgtggagatcgccagcttccccatctacaaggtgctgttctgcgccagaggccacgacggcaccaccgagagcaactgcttcgccttcaccgagagcagccacggcagcgaggagttccagatccacgtgttcagctgcgagatcaaggaggccgtgagcagaatcctgtacagcttctgcaccgccttcaagagaagcagcagacaggtgagcgacgtgaaggacagcgtgatccccacccccgacagcgacgtgttcaccttcagcgtgagcctggaggtgaaggaggacgacggcaagggcaacttcagactgctggtgatccccatccccttcgagtacttcagccccgtgcccaaggacagagacaagttctacttcaagctgaagcagggcatcgagaagaaggtggtgatcaccgtgcagcagctgagcaacaaggagctggccatcgagagatgcttcggcatgctgctgagccccggcagaaacgtgaagaacagcgacatgcacctgctggacatggagagcatgggcaagagctacgacggcagagcctacgtgatcaccggcatgtggaaccccaacgcccccgtgttcctggccctgaacgaggagacccccaaggacaagcaggtgtacatgaccgtggccgtggacatggtggtgaccgaggtggtggagcccgtgagattcctgctggagaccgtggtgagagtgtaccccgccaacgagagattctggtacttcagcagaaagaccttcaccgagaccttcttcatgagactgaagcagagcgagggcaagggccacaccaacgccggcgacgccatctacgaggtggtgagcctgcagagagagagcgacaaggaggagcccgtgacccccaccagcggcggcggccccatgagcccccaggacgacgaggccgaggaggagagcgacaacgagctgagcagcggcaccggcgacgtgagcaaggactgccccgagaagatcctgtacagctggggcgagctgctgggcaagtggcacagcaacctgggcgccagacccaagggcctgagcaccctggtgaagagcggcgtgcccgaggccctgagagccgaggtgtggcagctgctggccggctgccacgacaaccaggccatgctggacagatacagaatcctgatcaccaaggacagcgcccaggagagcgtgatcaccagagacatccacagaaccttccccgcccacgactacttcaaggacaccggcggcgacggccaggagagcctgtacaagatctgcaaggcctacagcgtgtacgacgaggacatcggctactgccagggccagagcttcctggccgccgtgctgctgctgcacatgcccgaggagcaggccttctgcgtgctggtgaagatcatgtacgactacggcctgagagacctgtacagaaacaacttcgaggacctgcactgcaagttctaccagctggagagactgatgcaggagcagctgcccgacctgcacagccacttcagcgacctgaacctggaggcccacatgtacgccagccagtggttcctgaccctgttcaccgccaagttccccctgtgcatggtgttccacatcatcgacctgctgctgtgcgagggcctgaacatcatcttccacgtggccctggccctgctgaagaccagcaaggaggacctgctgcaggccgacttcgagggcgccctgaagttcttcagagtgcagctgcccaagagatacagagccgaggagaacgccagaagactgatggagcaggcctgcaacatcaaggtgcccaccaagaagctgaagaagtacgagaaggagtaccagaccatgagagagagccagctgcagcaggaggaccccatggacagatacaagttcttcttcctgtag

SEQ ID NO: 10644 - DNA, 2580 bp, synthetic construct
  source 1..2580: mol_type = other DNA; note = Synthetic coding sequence
atgggcaacagagagatggaggagctgatccccctggtgaacagactgcaggacgccttcagcgccctgggccagagctgcctgctggagctgccccagatcgccgtggtgggcggccagagcgccggcaagagcagcgtgctggagaacttcgtgggcagagacttcctgcccagaggcagcggcatcgtgaccagaagacccctggtgctgcagctggtgaccagcaaggccgagtacgccgagttcctgcactgcaagggcaagaagttcaccgacttcgacgaggtgagactggagatcgaggccgagaccgacagagtgaccggcatgaacaagggcatcagcagcatccccatcaacctgagagtgtacagcccccacgtgctgaacctgaccctgatcgacctgcccggcatcaccaaggtgcccgtgggcgaccagccccccgacatcgagtaccagatcagagagatgatcatgcagttcatcaccagagagaactgcctgatcctggccgtgacccccgccaacaccgacctggccaacagcgacgccctgaagctggccaaggaggtggacccccagggcctgagaaccatcggcgtgatcaccaagctggacctgatggacgagggcaccgacgccagagacgtgctggagaacaagctgctgcccctgagaagaggctacgtgggcgtggtgaacagaagccagaaggacatcgacggcaagaaggacatcaaggccgccatgctggccgagagaaagttcttcctgagccaccccgcctacagacacatcgccgacagaatgggcaccccccacctgcagaaggtgctgaaccagcagctgaccaaccacatcagagacaccctgcccaacttcagaaacaagctgcagggccagctgctgagcatcgagcacgaggtggaggcctacaagaacttcaagcccgaggaccccaccagaaagaccaaggccctgctgcagatggtgcagcagttcgccgtggacttcgagaagagaatcgagggcagcggcgaccaggtggacaccctggagctgagcggcggcgccaagatcaacagaatcttccacgagagattccccttcgagatcgtgaagatggagttcaacgagaaggagctgagaagagagatcagctacgccatcaagaacatccacggcatcagaaccggcctgttcacccccgacatggccttcgaggccatcgtgaagaagcagatcgtgaagctgaagggccccagcctgaagagcgtggacctggtgatccaggagctgatcaacaccgtgaagaagtgcaccaagaagctggccaacttccccagactgtgcgaggagaccgagagaatcgtggccaaccacatcagagagagagagggcaagaccaaggaccaggtgctgctgctgatcgacatccaggtgagctacatcaacaccaaccacgaggacttcatcggcttcgccaacgcccagcagagaagcagccaggtgcacaagaagaccaccgtgggcaaccaggtgatcagaaagggctggctgaccatcagcaacatcggcatcatgaagggcggcagcaagggctactggttcgtgctgaccgccgagagcctgagctggtacaaggacgacgaggagaaggagaagaagtacatgctgcccctggacaacctgaaggtgagagacgtggagaagagcttcatgagcagcaagcacatcttcgccctgttcaacaccgagcagagaaacgtgtacaaggactacagattcctggagctggcctgcgacagccaggaggacgtggacagctggaaggccagcctgctgagagccggcgtgtaccccgacaagagcgtggccgagaacgacgagaacggccaggccgagaacttcagcatggacccccagctggagagacaggtggagaccatcagaaacctggtggacagctacatgagcatcatcaacaagtgcatcagagacctgatccccaagaccatcatgcacctgatgatcaacaacgtgaaggacttcatcaacagcgagctgctggcccagctgtacagcagcgaggaccagaacaccctgatggaggagagcgccgagcaggcccagagaagagacgagatgctgagaatgtaccaggccctgaaggaggccctgggcatcatcggcgacatcagcaccgccaccgtgagcacccccgcccccccccccgtggacgacagctggatccagcacagcagaagaagccccccccccagccccaccacccagagaagacccaccctgagcgcccccctggccagacccaccagcggcagaggccccgcccccgccatccccagccccggcccccacagcggcgccccccccgtgcccttcagacccggccccctgccccccttccccagcagcagcgacagcttcggcgcccccccccaggtgcccagcagacccaccagagccccccccagcgtgcccagcagaagacccccccccagccccaccagacccaccatcatcagacccctggagagcagcctgctggactag

SEQ ID NO: 10645 - DNA, 1761 bp, synthetic construct
  source 1..1761: mol_type = other DNA; note = Synthetic coding sequence
agcgagagcctgagcagcgccgtgttcgtggagggcctgaagagacagggcggctgcgccagactggaggaggcctgcctgagcgaggccggcgaggacctgaccggcgtgagattcagcctgcccggcaagaacttcccctgcggcagcagcagcagcagcagcagaagcagaaacagcagcagcagcaacagcagcagcagcagcagcaccaccaccaccaccaccagcagcagcggcgcccaggacagaatgcccgtgctggagagatacttccaccccgccgagctgggcagaagatggaccggccccgagggcgtgctgcccagcagccccggcagcagacccggctgccagcagggccccctgccctgggacctgcccgagatgatcagaatggtgaagctggtgtggaagagcaagagcgagctgcaggccaccaagcagagaggcatcctggacaacgaggacgccctgagaagcttccccggcgacatcagactgagaggccagaccggcgtgagagccgagagaagaggcagctaccccttcatcgacttcagactgctgaacagcaccacctacagcggcgagatcggcaccaagaagaaggtgaagagactgctgagcttccagagatacttccacgccagcagactgctgagaggcatcatcccccaggcccccctgcacctgctggacgaggactacctgggccaggccagacacatgctgagcaaggtgggcatgtgggacttcgacatcttcctgttcgacagactgaccaacggcaacagcctggtgaccctgctgtgccacctgttcaacacccacggcctgatccaccacttcaagctggacatggtgaccctgcacagattcctggtgatggtgcaggaggactaccacagccagaacccctaccacaacgccgtgcacgccgccgacgtgacccaggccatgcactgctacctgaaggagcccaagctggccagcttcctgacccccctggacatcatgctgggcctgctggccgccgccgcccacgacgtggaccaccccggcgtgaaccagcccttcctgatcaagaccaaccaccacctggccaacctgtaccagaacatgagcgtgctggagaaccaccactggagaagcaccatcggcatgctgagagagagcagactgctggcccacctgcccaaggagatgacccaggacatcgagcagcagctgggcagcctgatcctggccaccgacatcaacagacagaacgagttcctgaccagactgaaggcccacctgcacaacaaggacctgagactggaggacgcccaggacagacacttcatgctgcagatcgccctgaagtgcgccgacatctgcaacccctgcagaatctgggagatgagcaagcagtggagcgagagagtgtgcgaggagttctacagacagggcgagctggagcagaagttcgagctggagatcagccccctgtgcaaccagcagaaggacagcatccccagcatccagatcggcttcatgagctacatcgtggagcccctgttcagagagtgggcccacttcaccggcaacagcaccctgagcgagaacatgctgggccacctggcccacaacaaggcccagtggaagagcctgctgcccagacagcacagaagcagaggcagcagcggcagcggccccgaccacgaccacgccggccagggcaccgagagcgaggagcaggagggcgacagcccctag

SEQ ID NO: 10646 - DNA, 525 bp, synthetic construct
  source 1..525: mol_type = other DNA; note = Synthetic coding sequence
atgaccaccaagaacctggagaccaaggtgaccgtgaccagcagccccatcagaggcgccggcgacggcatggagaccgaggagccccccaagagcgtggaggtgaccagcggcgtgcagagcagaaagcaccacagcctgcagagcccctggaagaaggccgtgcccagcgagagccccggcgtgctgcagctgggcaagatgctgaccgagaaggccatggaggtgaaggccgtgagaatcctggtgcccaaggccgccatcacccacgacatccccaacaagaacaccaaggtgaagagcctgggccaccacaagggcgagttcctgggccagagcgagggcgtgatcgagcccaacaaggagctgagcgaggtgaagaacgtgctggagaagctgaagaacagcgagagaagactgctgcaggacaaggagggcctgagcaaccagctgagagtgcagaccgaggtgagaagagccctgatcgacaagatgagcaccaccctgtacgtgtggaccttctag

SEQ ID NO: 10647 - DNA, 1203 bp, synthetic construct; identical to SEQ ID NO: 10043
  source 1..1203: mol_type = other DNA; note = Synthetic coding sequence

SEQ ID NO: 10648 - DNA, 276 bp, synthetic construct
  source 1..276: mol_type = other DNA; note = Synthetic coding sequence
atggacgccgacagcgacgtggccctggacatcctgatcaccaacgtggtgtgcgtgttcagaaccagatgccacctgaacctgagaaagatcgccctggagggcgccaacgtgatctacaagagagacgtgggcaaggtgctgatgaagctgagaaagcccagaatcaccgccaccatctggagcagcggcaagatcatctgcaccggcgccaccagcgaggaggaggccaagttcggcgccagaagactggccagaagcctgcagaagctgtag

SEQ ID NO: 10649 - DNA, 492 bp, synthetic construct
  source 1..492: mol_type = other DNA; note = Synthetic coding sequence
atggacgccgacagcgacgtggccctggacatcctgatcaccaacgtggtgtgcgtgttcagaaccagatgccacctgaacctgagaaagatcgccctggagggcgccaacgtgatctacaagagagacgtgggcaaggtgctgatgaagctgagaaagcccagaatcaccgccaccatctggagcagcggcaagatcatctgcaccggcgccaccagcgaggaggaggccaagttcggcgccagaagactggccagaagcctgcagaagctgggcttccaggtgatcttcaccgacttcaaggtggtgaacgtgctggccgtgtgcaacatgcccttcgagatcagactgcccgagttcaccaagaacaacagaccccacgccagctacgagcccgagctgcaccccgccgtgtgctacagaatcaagagcctgagagccaccctgcagatcttcagcaccggcagcatcaccgtgaccggcatcctgtag

SEQ ID NO: 10650 - DNA, 1023 bp, synthetic construct
  source 1..1023: mol_type = other DNA; note = Synthetic coding sequence
atgctggaggcccccggccccagcgacggctgcgagctgagcaaccccagcgccagcagagtgagctgcgccggccagatgctggaggtgcagcccggcctgtacttcggcggcgccgccgccgtggccgagcccgaccacctgagagaggccggcatcaccgccgtgctgaccgtggacagcgaggagcccagcttcaaggccggccccggcgtggaggacctgtggagactgttcgtgcccgccctggacaagcccgagaccgacctgctgagccacctggacagatgcgtggccttcatcggccaggccagagccgagggcagagccgtgctggtgcactgccacgccggcgtgagcagaagcgtggccatcatcaccgccttcctgatgaagaccgaccagctgcccttcgagaaggcctacgagaagctgcagatcctgaagcccgaggccaagatgaacgagggcttcgagtggcagctgaagctgtaccaggccatgggctacgaggtggacaccagcagcgccatctacaagcagtacagactgcagaaggtgaccgagaagtaccccgagctgcagaacctgccccaggagctgttcgccgtggaccccaccaccgtgagccagggcctgaaggacgaggtgctgtacaagtgcagaaagtgcagaagaagcctgttcagaagcagcagcatcctggaccacagagagggcagcggccccatcgccttcgcccacaagagaatgacccccagcagcatgctgaccaccggcagacaggcccagtgcaccagctacttcatcgagcccgtgcagtggatggagagcgccctgctgggcgtgatggacggccagctgctgtgccccaagtgcagcgccaagctgggcagcttcaactggtacggcgagcagtgcagctgcggcagatggatcacccccgccttccagatccacaagaacagagtggacgagatgaagatcctgcccgtgctgggcagccagaccggcaagatctag

SEQ ID NO: 10651 - DNA, 807 bp, synthetic construct
  source 1..807: mol_type = other DNA; note = Synthetic coding sequence
atgtggcccctgaccgccctgctgctgctggccaccctggagaagcccatcctgagcctgcaccccccctggaccaccatcttcaagggcgagagagtgaccctgaagtgcgacggctaccaccccctgctgctggagctgcagcccatcagcaccctgtggtacctgggccacctgctgctgcccagccacaagaagagcatcgaggtgcagacccccggcgtgtacagatgccagaccagaggcgcccccgtgagcgaccccatccacctgagcgtgagcaacgactggctgatcctgcaggtgccctacgcccccgtgttcgagggcgagcccctggtgctgagatgcagaggctggtacgacaaggtggtgtacaagctgcactactaccacgacggccaggccgtgagatacttccacagcagcgccaactacaccgtgctgcaggccagagccagcgacagcggcagataccagtgcagcggcaccatgagaatccccgtggagagcgcccccatgttcagcgccaaggtggccgtgaccgtgcaggaggccagacacgccgccgccgtgagagtgctgcaggtgcagcccagaggcgcccccctgagactgggcagaagagtgcacagccccggcgccagaggcagaggcgccagaatcgtgctggtgagaggcggctacagacacccccagtgccccgagacccagagcgtggccgccgcccccggcgccggcttcagccccggccccggcctgcaccacagacccagcagcatgggcagaagcctgggcagctggtag

SEQ ID NO: 10652 - DNA, 936 bp, synthetic construct
  source 1..936: mol_type = other DNA; note = Synthetic coding sequence
atgtggcccctgaccgccctgctgctgctggccaccctggagaagcccatcctgagcctgcaccccccctggaccaccatcttcaagggcgagagagtgaccctgaagtgcgacggctaccaccccctgctgctggagctgcagcccatcagcaccctgtggtacctgggccacctgctgctgcccagccacaagaagagcatcgaggtgcagacccccggcgtgtacagatgccagaccagaggcgcccccgtgagcgaccccatccacctgagcgtgagcaacgactggctgatcctgcaggtgccctacgcccccgtgttcgagggcgagcccctggtgctgagatgcagaggctggtacgacaaggtggtgtacaagctgcactactaccacgacggccaggccgtgagatacttccacagcagcgccaactacaccgtgctgcaggccagagccagcgacagcggcagataccagtgcagcggcaccatgagaatccccgtggagagcgcccccatgttcagcgccaaggtggccgtgaccgtgcaggccgccagatgcgccgccagcaccggcgcccccagcacccagagcagaagccccagaagcagaagcagcaacagaaccggcgccagaagactgcccccccccgccgtgagcggcaacgccgtgagaggctgcagcagcagaggcagagtgctgccctggaccagaccccccccccccccccagctgcacggcccccagccctggctgctggtgatcggcagattccccagcgagagccccagatgccccgacagaagcagatggagcccccccagcggcaccccccccccccccggctgcagcagcagaagagccgcccccagactgagaggccacccccccgccctgagaagaagaccctggaacaacagactggagccctag

SEQ ID NO: 10653 - DNA, 957 bp, synthetic construct
  source 1..957: mol_type = other DNA; note = Synthetic coding sequence
atgtggcccctgaccgccctgctgctgctggtgcccagcagcggccaggccgccaccctggagaagcccatcctgagcctgcaccccccctggaccaccatcttcaagggcgagagagtgaccctgaagtgcgacggctaccaccccctgctgctggagctgcagcccatcagcaccctgtggtacctgggccacctgctgctgcccagccacaagaagagcatcgaggtgcagacccccggcgtgtacagatgccagaccagaggcgcccccgtgagcgaccccatccacctgagcgtgagcaacgactggctgatcctgcaggtgccctacgcccccgtgttcgagggcgagcccctggtgctgagatgcagaggctggtacgacaaggtggtgtacaagctgcactactaccacgacggccaggccgtgagatacttccacagcagcgccaactacaccgtgctgcaggccagagccagcgacagcggcagataccagtgcagcggcaccatgagaatccccgtggagagcgcccccatgttcagcgccaaggtggccgtgaccgtgcaggccgccagatgcgccgccagcaccggcgcccccagcacccagagcagaagccccagaagcagaagcagcaacagaaccggcgccagaagactgcccccccccgccgtgagcggcaacgccgtgagaggctgcagcagcagaggcagagtgctgccctggaccagaccccccccccccccccagctgcacggcccccagccctggctgctggtgatcggcagattccccagcgagagccccagatgccccgacagaagcagatggagcccccccagcggcaccccccccccccccggctgcagcagcagaagagccgcccccagactgagaggccacccccccgccctgagaagaagaccctggaacaacagactggagccctag

SEQ ID NO: 10654 - DNA, 1281 bp, synthetic construct
  source 1..1281: mol_type = other DNA; note = Synthetic coding sequence
atgtggcccctgaccgccctgctgctgctggtgcccagcagcggccaggccgccaccctggagaagcccatcctgagcctgcaccccccctggaccaccatcttcaagggcgagagagtgaccctgaagtgcgacggctaccaccccctgctgctggagctgcagcccatcagcaccctgtggtacctgggccacctgctgctgcccagccacaagaagagcatcgaggtgcagacccccggcgtgtacagatgccagaccagaggcgcccccgtgagcgaccccatccacctgagcgtgagcaacgactggctgatcctgcaggtgccctacgcccccgtgttcgagggcgagcccctggtgctgagatgcagaggctggtacgacaaggtggtgtacaagctgcactactaccacgacggccaggccgtgagatacttccacagcagcgccaactacaccgtgctgcaggccagagccagcgacagcggcagataccagtgcagcggcaccatgagaatccccgtggagagcgcccccatgttcagcgccaaggtggccgtgaccgtgcaggagctgttcagagcccccgtgctgagagtgatgggccccagagaggccagaggcgccgccctgggcggcgtggtgctgagatgcgacaccagactgcacccccagaagagagacacccccctgcagttcgccttctacaagtacagcagagccgtgagaagattcgactggggcgccgagtacaccgtgcccgagcccgaggtggaggagctggagagctactggtgcgaggccgccaccgccaccagaagcgtgagaaagagaagcccctggctgcagctgcccggccccggcagccccctggaccccgccagcaccaccgcccccgccccctgggccgccgccctggcccccggcaacagacccctgagcttcagaaagccccccgtgagcagaagcgtgcccctggtgaccagcgtgagaaacaccaccagcaccggcctgcagttccccgccagcggcgcccccaccgccggcccccccgcctgcgccccccccacccccctggagcagagcgccggcgccctgaagcccgacgtggacctgctgctgagagagatgcagctgctgaagggcctgctgagcagagtggtgctggagctgaaggagccccaggccctgagagagctgagaggcacccccgagacccccaccagccacttcgccgtgagccccggcacccccgagaccacccccgtggagagctag

SEQ ID NO: 10655 - DNA, 369 bp, synthetic construct
  source 1..369: mol_type = other DNA; note = Synthetic coding sequence
atggccggcggctgcagagcccccagcagcgcccccaccgtgagcctgcccgagctgagaagcctgctggccagcggcagagccagactgttcgacgtgagaagcagagaggaggccgccgccggcaccatccccggcgccctgaacatccccgtgagcgagctggagagcgccctgcagatggagcccgccgccttccaggccctgtacagcgccgagaagcccaagctggaggacgagcacctggtgttcttctgccagatgggcaagagaggcctgcaggccacccagctggccagaagcctgggctacaccggcgccagaaactacgccggcgcctacagagagtggctggagaaggagagctag

SEQ ID NO: 10656 - DNA, 225 bp, synthetic construct
  source 1..225: mol_type = other DNA; note = Synthetic coding sequence
atggccggcgtgagcgagctggagagcgccctgcagatggagcccgccgccttccaggccctgtacagcgccgagaagcccaagctggaggacgagcacctggtgttcttctgccagatgggcaagagaggcctgcaggccacccagctggccagaagcctgggctacaccggcgccagaaactacgccggcgcctacagagagtggctggagaaggagagctag

SEQ ID NO: 10657 - DNA, 1794 bp, synthetic construct; identical to SEQ ID NO: 10010
  source 1..1794: mol_type = other DNA; note = Synthetic coding sequence

SEQ ID NO: 10658 - DNA, 1794 bp, synthetic construct; identical to SEQ ID NO: 10010
  source 1..1794: mol_type = other DNA; note = Synthetic coding sequence

SEQ ID NO: 10659 - DNA, 453 bp, synthetic construct
  source 1..453: mol_type = other DNA; note = Synthetic coding sequence
atgggcgtgcagccccccaacttcagctgggtgctgcccggcagactggccggcctggccctgcccagactgcccgcccactaccagttcctgctggacctgggcgtgagacacctggtgagcctgaccgagagaggccccccccacagcgacagctgccccggcctgaccctgcacagactgagaatccccgacttctgcccccccgcccccgaccagatcgacagattcgtgcagatcgtggacgaggccaacgccagaggcgaggccgtgggcgtgcactgcgccctgggcttcggcagaaccggcaccatgctggcctgctacctggtgaaggagagaggcctggccgccggcgacgccatcgccgagatcagaagactgagacccggcagcatcgagacctacgagcaggagaaggccgtgttccagttctaccagagaaccaagtag

SEQ ID NO: 10660 - DNA, 453 bp, synthetic construct; identical to SEQ ID NO: 10659
  source 1..453: mol_type = other DNA; note = Synthetic coding sequence

SEQ ID NO: 10661 - DNA, 453 bp, synthetic construct; identical to SEQ ID NO: 10659
  source 1..453: mol_type = other DNA; note = Synthetic coding sequence

SEQ ID NO: 10662 - DNA, 4866 bp, synthetic construct
  source 1..4866: mol_type = other DNA; note = Synthetic coding sequence
atggagggctgcatgggcgaggagagcttccagatgtgggagctgaacagaagactggaggcctacctggccagagtgaaggccctggaggagcagaacgagctgctgagcgccgagctgggcggcctgagagcccagagcgccgacaccagctggagagcccacgccgacgacgagctggccgccctgagagccctggtggaccagagatggagagagaagcacgccgccgaggtggccagagacaacctggccgaggagctggagggcgtggccggcagatgccagcagctgagactggccagagagagaaccaccgaggaggtggccagaaacagaagagccgtggaggccgagaagtgcgccagagcctggctgagcagccaggtggccgagctggagagagagctggaggccctgagagtggcccacgaggaggagagagtgggcctgaacgcccaggccgcctgcgcccccagatgccccgccccccccagaggcccccccgcccccgcccccgaggtggaggagctggccagaagactgggcgaggcctggagaggcgccgtgagaggctaccaggagagagtggcccacatggagaccagcctgggccaggccagagagagactgggcagagccgtgcagggcgccagagagggcagactggagctgcagcagctgcaggccgagagaggcggcctgctggagagaagagccgccctggagcagagactggagggcagatggcaggagagactgagagccaccgagaagttccagctggccgtggaggccctggagcaggagaagcagggcctgcagagccagatcgcccaggtgctggagggcagacagcagctggcccacctgaagatgagcctgagcctggaggtggccacctacagaaccctgctggaggccgagaacagcagactgcagacccccggcggcggcagcaagaccagcctgagcttccaggaccccaagctggagctgcagttccccagaacccccgagggcagaagactgggcagcctgctgcccgtgctgagccccaccagcctgcccagccccctgcccgccaccctggagacccccgtgcccgccttcctgaagaaccaggagttcctgcaggccagaacccccaccctggccagcacccccatcccccccaccccccaggcccccagccccgccgtggacgccgagatcagagcccaggacgcccccctgagcctgctgcagacccagggcggcagaaagcaggcccccgagcccctgagagccgaggccagagtggccatccccgccagcgtgctgcccggccccgaggagcccggcggccagagacaggaggccagcaccggccagagccccgaggaccacgccagcctggccccccccctgagccccgaccacagcagcctggaggccaaggacggcgagagcggcggcagcagagtgttcagcatctgcagaggcgagggcgagggccagatctggggcctggtggagaaggagaccgccatcgagggcaaggtggtgagcagcctgcagcaggagatctgggaggaggaggacctgaacagaaaggagatccaggacagccaggtgcccctggagaaggagaccctgaagagcctgggcgaggagatccaggagagcctgaagaccctggagaaccagagccacgagaccctggagagagagaaccaggagtgccccagaagcctggaggaggacctggagaccctgaagagcctggagaaggagaacaaggagctgctgaaggacgtggaggtggtgagacccctggagaaggaggccgtgggccagctgaagcccaccggcaaggaggacacccagaccctgcagagcctgcagaaggagaaccaggagctgatgaagagcctggagggcaacctggagaccttcctgttccccggcaccgagaaccaggagctggtgagcagcctgcaggagaacctggagagcctgaccgccctggagaaggagaaccaggagcccctgagaagccccgaggtgggcgacgaggaggccctgagacccctgaccaaggagaaccaggagcccctgagaagcctggaggacgagaacaaggaggccttcagaagcctggagaaggagaaccaggagcccctgaagaccctggaggaggaggaccagagcatcgtgagacccctggagaccgagaaccacaagagcctgagaagcctggaggagcaggaccaggagaccctgagaaccctggagaaggagacccagcagagaagaagaagcctgggcgagcaggaccagatgaccctgagaccccccgagaaggtggacctggagcccctgaagagcctggaccaggagatcgccagacccctggagaacgagaaccaggagttcctgaagagcctgaaggaggagagcgtggaggccgtgaagagcctggagaccgagatcctggagagcctgaagagcgccggccaggagaacctggagaccctgaagagccccgagacccaggcccccctgtggacccccgaggagatcaaccagggcgccatgaaccccctggagaaggagatccaggagcccctggagagcgtggaggtgaaccaggagaccttcagactgctggaggaggagaaccaggagagcctgagaagcctgggcgcctggaacctggagaacctgagaagccccgaggaggtggacaaggagagccagagaaacctggaggaggaggagaacctgggcaagggcgagtaccaggagagcctgagaagcctggaggaggagggccaggagctgccccagagcgccgacgtgcagagatgggaggacaccgtggagaaggaccaggagctggcccaggagagcccccccggcatggccggcgtggagaacgaggacgaggccgagctgaacctgagagagcaggacggcttcaccggcaaggaggaggtggtggagcagggcgagctgaacgccaccgaggaggtgtggatccccggcgagggccaccccgagagccccgagcccaaggagcagagaggcctggtggagggcgccagcgtgaagggcggcgccgagggcctgcaggaccccgagggccagagccagcaggtgggcgcccccggcctgcaggccccccagggcctgcccgaggccatcgagcccctggtggaggacgacgtggcccccggcggcgaccaggccagccccgaggtgatgctgggcagcgagcccgccatgggcgagagcgccgccggcgccgagcccggccccggccagggcgtgggcggcctgggcgaccccggccacctgaccagagaggaggtgatggagccccccctggaggaggagagcctggaggccaagagagtgcagggcctggagggccccagaaaggacctggaggaggccggcggcctgggcaccgagttcagcgagctgcccggcaagagcagagacccctgggagccccccagagagggcagagaggagagcgaggccgaggcccccagaggcgccgaggaggccttccccgccgagaccctgggccacaccggcagcgacgcccccagcccctggcccctgggcagcgaggaggccgaggaggacgtgccccccgtgctggtgagccccagccccacctacacccccatcctggaggacgcccccggcccccagccccaggccgagggcagccaggaggccagctggggcgtgcagggcagagccgaggccctgggcaaggtggagagcgagcaggaggagctgggcagcggcgagatccccgagggcccccaggaggagggcgaggagagcagagaggagagcgaggaggacgagctgggcgagaccctgcccgacagcacccccctgggcttctacctgagaagccccaccagccccagatgggaccccaccggcgagcagagaccccccccccagggcgagaccggcaaggagggctgggaccccgccgtgctggccagcgagggcctggaggccccccccagcgagaaggaggagggcgaggagggcgaggaggagtgcggcagagacagcgacctgagcgaggagttcgaggacctgggcaccgaggcccccttcctgcccggcgtgcccggcgaggtggccgagcccctgggccaggtgccccagctgctgctggaccccgccgcctgggacagagacggcgagagcgacggcttcgccgacgaggaggagagcggcgaggagggcgaggaggaccaggaggagggcagagagcccggcgccggcagatggggccccggcagcagcgtgggcagcctgcaggccctgagcagcagccagagaggcgagttcctggagagcgacagcgtgagcgtgagcgtgccctgggacgacagcctgagaggcgccgtggccggcgcccccaagaccgccctggagaccgagagccaggacagcgccgagcccagcggcagcgaggaggagagcgaccccgtgagcctggagagagaggacaaggtgcccggccccctggagatccccagcggcatggaggacgccggccccggcgccgacatcatcggcgtgaacggccagggccccaacctggagggcaagagccagcacgtgaacggcggcgtgatgaacggcctggagcagagcgaggaggtgggccagggcatgcccctggtgagcgagggcgacagaggcagccccttccaggaggaggagggcagcgccctgaagaccagctgggccggcgcccccgtgcacctgggccagggccagttcctgaagttcacccagagagagggcgacagagagagctggagcagcggcgaggactag

SEQ ID NO: 10663 - DNA, 378 bp, synthetic construct
  source 1..378: mol_type = other DNA; note = Synthetic coding sequence
atggagagacacaccagccaccccaacagaaaggtgcccgccaaggaggaggccaacgccgtgcccctgtgcagagccaagcccagccccagctacatcaacctgcaggccagcagcccccccgccaccttcctgaacatccagaccaccaagctgcccagcgtggaccacaagcccaaggagtgcctgggcctgctggagtgcatgtacgccaacctgcagctgcagacccagctggcccagcagcagatggccgtgctggagcacctgcaggccagcgtgacccagctggcccccggcagaggcagcaacaacagcagcctgcccgccctgagccccaaccccctgctgaaccacctgccccagttcagcaagtag

SEQ ID NO: 10664 - DNA, 378 bp, synthetic construct; identical to SEQ ID NO: 10663
  source 1..378: mol_type = other DNA; note = Synthetic coding sequence

SEQ ID NO: 10665 - DNA, 378 bp, synthetic construct; identical to SEQ ID NO: 10663
  source 1..378: mol_type = other DNA; note = Synthetic coding sequence

SEQ ID NO: 10666 - DNA, 378 bp, synthetic construct; identical to SEQ ID NO: 10663
  source 1..378: mol_type = other DNA; note = Synthetic coding sequence

SEQ ID NO: 10667 - DNA, 378 bp, synthetic construct; identical to SEQ ID NO: 10663
  source 1..378: mol_type = other DNA; note = Synthetic coding sequence

SEQ ID NO: 10668 - DNA, 624 bp, synthetic construct
  source 1..624: mol_type = other DNA; note = Synthetic coding sequence
atggccgaggccagcagcgccaacctgggcagcggctgcgaggagaagagacacgagggcagcagcagcgagagcgtgccccccggcaccaccatcagcagagtgaagctgctggacaccatggtggacaccttcctgcagaagctggtggccgccggcagcagccccctgctgcactgggacggcagcgccggccccagactgcccagcggcggccagagcgtgaagcaggccttcagctgggccgcctgcagactgccccagggcagaaaggaggagatcagcgacatcaaggaggagggcaacctggaggccgtgctgaacgccctggacaagatcgtggaggagggcaaggtgagaaaggagcccgcctggagacccagcggcatccccgagaaggacctgcacagcgtgatggccccctacttcctgcagcagagagacaccctgagaagacacgtgcagaagcaggaggccgagaaccagcagctggccgacgccgtgctggccggcagaagacaggtggaggagctgcagctgcaggtgcaggcccagcagcaggcctggcaggccctgcacagagagcagagagagctggtggccgtgctgagagagcccgagtag

SEQ ID NO: 10669 - DNA, 618 bp, synthetic construct
  source 1..618: mol_type = other DNA; note = Synthetic coding sequence
atggccgaggccagcagcgccaacctgggcagcggctgcgaggagaagagacacgagggcagcagcagcgagagcgtgccccccggcaccaccatcagcagagtgaagctgctggacaccatggtggacaccttcctgcagaagctggtggccgccggcagctaccagagattcaccgactgctacaagtgcttctaccagctgcagcccgccatgacccagcagatctacgacaagttcatcgcccagctgcagaccagcatcagagaggagatcagcgacatcaaggaggagggcaacctggaggccgtgctgaacgccctggacaagatcgtggaggagggcaaggtgagaaaggagcccgcctggagacccagcggcatccccgagaaggacctgcacagcgtgatggccccctacttcctgcagcagagagacaccctgagaagacacgtgcagaagcaggaggccgagaaccagcagctggccgacgccgtgctggccggcagaagacaggtggaggagctgcagctgcaggtgcaggcccagcagcaggcctggcaggccctgcacagagagcagagagagctggtggccgtgctgagagagcccgagtag

SEQ ID NO: 10670 - DNA, 543 bp, synthetic construct
  source 1..543: mol_type = other DNA; note = Synthetic coding sequence
atggccgaggccagcagcgccaacctgggcagcggctgcgaggagaagagacacgagggcagcagcagcgagagcgtgccccccggcaccaccatcagcagagtgaagctgctggacaccatggtggacaccttcctgcagaagctggtggccgccggcagctaccagagattcaccgactgctacaagtgcttctaccagctgcagcccgccatgacccagcagatctacgacaagttcatcgcccagctgcagaccagcatcagagaggagatcagcgacatcaaggaggagggcaacctggaggccgtgctgaacgccctggacaagatcgtggaggagggcaaggtgagaaaggagcccgcctgcaacggcaccccctgcggcgccatgtgcagaaacagaagacccagaaccagcagctggcagatgcccagctggcagggcggcggcagatggagaagctgcagctacagaagcagacccagcagcagacccggcagactgtacaccgagaacagaggcagctggctgctgtgctag

SEQ ID NO: 10671 - DNA, 2253 bp, synthetic construct; identical to SEQ ID NO: 10318
  source 1..2253: mol_type = other DNA; note = Synthetic coding sequence

SEQ ID NO: 10672 - DNA, 2667 bp, synthetic construct
  source 1..2667: mol_type = other DNA; note = Synthetic coding sequence
atggccggcgtgggcagaagcggcggcccctggggcagaaccagaggcggcagaagcggcagactgggcgtgagcctgggcgccctgagcagcctgcccctggaggagctgcccagacccctgtgctgcagaagatgcagaagacacttcggcttcgccctgagaggcgagaccatccccgtgagcgtggccggcagcgccagcagccagttcgcccccctggccctgcacctgagcctgctgctgagcagaatcagcgccagcagactgaccagatggcccccccccgacaagagagagggcagcgccgtggaccccggcaagagaagaagcctggccgccacccccagcagcagcctgccctgcaccctgatcgccctgggcctgagacacgagaaggaggccaacgagctgatggaggacctgttcgagaccttccaggacgagatgggcttcagcaacatggaggacgacggccccgaggaggaggagagagtggccgagccccaggccaacttcaacaccccccaggccctgagattcgaggagctgctggccaacctgctgaacgagcagcaccagatcgccaaggagctgttcgagcagctgaagatgaagaagcccagcgccaagcagcagaaggaggtggagaaggtgaagccccagtgcaaggaggtgcaccagaccctgatcctggaccccgcccagagaaagagactgcagcagcagatgcagcagcacgtgcagctgctgacccagatccacctgctggccacctgcaaccccaacctgaaccccgaggccagcagcaccagaatctgcctgaaggagctgggcaccttcgcccagagcagcatcgccctgcaccaccagtacaaccccaagttccagaccctgttccagccctgcaacctgatgggcgccatgcagctgatcgaggacttcagcacccacgtgagcatcgactgcagcccccacaagaccgtgaagaagaccgccaacgagttcccctgcctgcccaagcaggtggcctggatcctggccaccagcaaggtgttcatgtaccccgagctgctgcccgtgtgcagcctgaaggccaagaacccccaggacaagatcctgttcaccaaggccgaggacaacctgctggccctgggcctgaagcacttcgagggcaccgagttcctgaaccccctgatcagcaagtacctgctgacctgcaagaccgccagacagctgaccgtgagaatcaagaacctgaacatgaacagagcccccgacaacatcatcaagttctacaagaagaccaagcagctgcccgtgctgggcaagtgctgcgaggagatccagccccaccagtggaagccccccatcgagagagaggagcacagactgcccttctggctgaaggccagcctgcccagcatccaggaggagctgagacacatggccgacggcgccagagaggtgggcaacatgaccggcaccaccgagatcaacagcgaccagggcctggagaaggacaacagcgagctgggcagcgagaccagataccccctgctgctgcccaagggcgtggtgctgaagctgaagcccgtggccgacagattccccaagaaggcctggagacagaagagaagcagcgtgctgaagcccctgctgatccagcccagccccagcctgcagcccagcttcaaccccggcaagacccccgcccagagcacccacagcgaggccccccccagcaagatggtgctgagaatcccccaccccatccagcccgccaccgtgctgcagaccgtgcccggcgtgccccccctgggcgtgagcggcggcgagagcttcgagagccccgccgccctgcccgccatgccccccgaggccagaaccagcttccccctgagcgagagccagaccctgctgagcagcgcccccgtgcccaaggtgatgatgcccagccccgccagcagcatgttcagaaagccctacgtgagaagaagacccagcaagagaagaggcgccagagccttcagatgcatcaagcccgcccccgtgatccaccccgccagcgtgatcttcaccgtgcccgccaccaccgtgaagatcgtgagcctgggcggcggctgcaacatgatccagcccgtgaacgccgccgtggcccagagcccccagaccatccccatcgccaccctgctggtgaaccccaccagcttcccctgccccctgaaccagcccctggtggccagcagcgtgagccccctgatcgtgagcggcaacagcgtgaacctgcccatccccagcacccccgaggacaaggcccacatgaacgtggacatcgcctgcgccgtggccgacggcgagaacgccttccagggcctggagcccaagctggagccccaggagctgagccccctgagcgccaccgtgttccccaaggtggagcacagccccggccccccccccgtggacaagcagtgccaggagggcctgagcgagaacagcgcctacagatggaccgtggtgaagaccgaggagggcagacaggccctggagcccctgccccagggcatccaggagagcctgaacaacagcagccccggcgacctggaggaggtggtgaagatggagcccgaggacgccaccgaggagatcagcggcttcctgtag

SEQ ID NO: 10673 - DNA, 2607 bp, synthetic construct
  source 1..2607: mol_type = other DNA; note = Synthetic coding sequence
atggccggcgtgggcagaagcggcggcccctggggcagaaccagaggcggcagaagcggcagactgggcgtgagcctgggcgccctgagcagcctgcccctggaggagctgcccagacccctgtgctgcagaagatgcagaagacacttcggcttcgccctgagaggcgagaccatccccgtgagcgtggccggcagcgccagcagccagttcgcccccctggccctgcacctgagcctgctgctgagcagaatcagcgccagcagactgaccagatggcccccccccgacaagagagagggcagcgccgtggaccccggcaagagaagaagcctggccgccacccccagcagcagcctgccctgcaccctgatcgccctgggcctgagacacgagaaggaggccaacgagctgatggaggacctgttcgagaccttccaggacgagatgggcttcagcaacatggaggacgacggccccgaggaggaggagagagtggccgagccccaggccaacttcaacaccccccaggccctgagattcgaggagctgctggccaacctgctgaacgagcagcaccagatcgccaaggagctgttcgagcagctgaagatgaagaagcccagcgccaagcagcagaaggaggtggagaaggtgaagccccagtgcaaggaggtgcaccagaccctgatcctggaccccgcccagagaaagagactgcagcagcagatgcagcagcacgtgcagctgctgacccagatccacctgctggccacctgcaaccccaacctgaaccccgaggccagcagcaccagaatctgcctgaaggagctgggcaccttcgcccagagcagcatcgccctgcaccaccagtacaaccccaagttccagaccctgttccagccctgcaacctgatgggcgccatgcagctgatcgaggacttcagcacccacgtgagcatcgactgcagcccccacaagaccgtgaagaagaccgccaacgagttcccctgcctgcccaagcaggtggcctggatcctggccaccagcaaggtgttcatgtaccccgagctgctgcccgtgtgcagcctgaaggccaagaacccccaggacaagatcctgttcaccaaggccgaggacaacaagtacctgctgacctgcaagaccgccagacagctgaccgtgagaatcaagaacctgaacatgaacagagcccccgacaacatcatcaagttctacaagaagaccaagcagctgcccgtgctgggcaagtgctgcgaggagatccagccccaccagtggaagccccccatcgagagagaggagcacagactgcccttctggctgaaggccagcctgcccagcatccaggaggagctgagacacatggccgacggcgccagagaggtgggcaacatgaccggcaccaccgagatcaacagcgaccagggcctggagaaggacaacagcgagctgggcagcgagaccagataccccctgctgctgcccaagggcgtggtgctgaagctgaagcccgtggccgacagattccccaagaaggcctggagacagaagagaagcagcgtgctgaagcccctgctgatccagcccagccccagcctgcagcccagcttcaaccccggcaagacccccgcccagagcacccacagcgaggccccccccagcaagatggtgctgagaatcccccaccccatccagcccgccaccgtgctgcagaccgtgcccggcgtgccccccctgggcgtgagcggcggcgagagcttcgagagccccgccgccctgcccgccatgccccccgaggccagaaccagcttccccctgagcgagagccagaccctgctgagcagcgcccccgtgcccaaggtgatgatgcccagccccgccagcagcatgttcagaaagccctacgtgagaagaagacccagcaagagaagaggcgccagagccttcagatgcatcaagcccgcccccgtgatccaccccgccagcgtgatcttcaccgtgcccgccaccaccgtgaagatcgtgagcctgggcggcggctgcaacatgatccagcccgtgaacgccgccgtggcccagagcccccagaccatccccatcgccaccctgctggtgaaccccaccagcttcccctgccccctgaaccagcccctggtggccagcagcgtgagccccctgatcgtgagcggcaacagcgtgaacctgcccatccccagcacccccgaggacaaggcccacatgaacgtggacatcgcctgcgccgtggccgacggcgagaacgccttccagggcctggagcccaagctggagccccaggagctgagccccctgagcgccaccgtgttccccaaggtggagcacagccccggccccccccccgtggacaagcagtgccaggagggcctgagcgagaacagcgcctacagatggaccgtggtgaagaccgaggagggcagacaggccctggagcccctgccccagggcatccaggagagcctgaacaacagcagccccggcgacctggaggaggtggtgaagatggagcccgaggacgccaccgaggagatcagcggcttcctgtag

SEQ ID NO: 10674 - DNA, 1575 bp, synthetic construct
  source 1..1575: mol_type = other DNA; note = Synthetic coding sequence
atggccggcggcgccagagaggtgctgaccctgcagctgggccacttcgccggcttcgtgggcgcccactggtggaaccagcaggacgccgccctgggcagagccaccgacagcaaggagccccccggcgagctgtgccccgacgtgctgtacagaaccggcagaaccctgcacggccaggagacctacacccccagactgatcctgatggacctgaagggcagcctgagcagcctgaaggaggagggcggcctgtacagagacaagcagctggacgccgccatcgcctggcagggcaagctgaccacccacaagggcagcagccccctgcccaccgccaccacccccaagcccctgatccccaccgaggccagcatcagagtgtggagcgacttcctgagagtgcacctgcaccccagaagcatctgcatgatccagaagtacaaccacgacggcgaggccggcagactggaggccttcggccagggcgagagcgtgctgaaggagcccaagtaccaggaggagctggaggacagactgcacttctacgtggaggagtgcgactacctgcagggcttccagatcctgtgcgacctgcacgacggcttcagcggcgtgggcgccaaggccgccgagctgctgcaggacgagtacagcggcagaggcatcatcacctggggcctgctgcccggcccctaccacagaggcgaggcccagagaaacatctacagactgctgaacaccgccttcggcctggtgcacctgaccgcccacagcagcctggtgtgccccctgagcctgggcggcagcctgggcctgagacccgagccccccgtgagcttcccctacctgcactacgacgccaccctgcccttccactgcagcgccatcctggccaccgccctggacaccgtgaccgtgccctacagactgtgcagcagccccgtgagcatggtgcacctggccgacatgctgagcttctgcggcaagaaggtggtgaccgccggcgccatcatccccttccccctggcccccggccagagcctgcccgacagcctgatgcagttcggcggcgccaccccctggacccccctgagcgcctgcggcgagcccagcggcaccagatgcttcgcccagagcgtggtgctgagaggcatcgacagagcctgccacaccagccagctgacccccggcacccccccccccagcgccctgcacgcctgcaccaccggcgaggagatcctggcccagtacctgcagcagcagcagcccggcgtgatgagcagcagccacctgctgctgaccccctgcagagtggcccccccctacccccacctgttcagcagctgcagcccccccgccgtggagagcatccccgtgttcggcgccctgtgcagcagcagcagcctgcaccagaccctggaggccctggccagagacctgaccaagctggacctgagaagatgggccagcttcatggacgccggcgtggagcacgacgacgtggccgagctgctgcaggagctgcagagcctggcccagtgctaccagggcggcgacagcctggtggactag

SEQ ID NO: 10675 - DNA, 1479 bp, synthetic construct
  source 1..1479: mol_type = other DNA; note = Synthetic coding sequence
atgccccccacctgcagccccggcctgagaagacaggactgggcccccggcagatgcgccggcctgcacctgccccccagagcccccagcagccccgccctgcaggccctggccggccaggccggcgtgagaagcagctggagcttcgccggcgtgcccggcgcccagagactgtggatggccgaggcccagagcggcaccggccagctgcaggagcagaagaagggcctgctgatcgccgtgagcgtgagcgtggacaagatcatcagccacttcggcgccgccagaaacctggtgcagaaggcccagctgggcgacagcagactgagccccgacgtgggccacctggtgctgaccaccctgtgccccgccctgcacgccctggtggccgacggcctgaagcccttcagaaaggacctgatcaccggccagagaagaagcagcccctggagcgtggtggaggccagcgtgaagcccggcagcagcaccagaagcctgggcaccctgtacagccaggtgagcagactggcccccctgagcagcagcagaagcagattccacgccttcatcctgggcctgctgaacaccaagcagctggagctgtggttcagcagcctgcaggaggacgccggcctgctgagcctgctgtacctgcccaccggcttcttcagcctggccagaggcggctgccccagcctgagcaccgagctgctgctgctgctgcagcccctgagcgtgctgaccttccacctggacctgctgttcgagcaccaccaccacctgcccctgggccccccccaggcccccgccccccccggccccccccccgccctgcagcagaccatgcaggccatgctgcacttcggcggcagactggcccagagcctgagaggcaccagcaaggaggccgccagcgaccccagcgacagccccaacctgcccacccccggcagctggtgggagcagctgacccaggccagcagagtgtacgccagcggcggcaccgagggcttccccctgagcagatgggcccccggcagacacggcaccgccgccgaggagggcgcccaggagagacccctgcccaccgacgagatggcccccggcagaggcctgtggctgggcagactgttcggcgtgcccggcggccccgccgagaacgagaacggcgccctgaagagcagaagacccagcagctggctgccccccaccgtgagcgtgctggccctggtgaagagaggcgccccccccgagatgcccagcccccaggagctggaggccagcgcccccagaatggtgcagacccacagagccgtgagagccctgtgcgaccacaccgccgccagacccgaccagctgagcttcagaagaggcgaggtgctgagagtgatcaccaccgtggacgaggactggctgagatgcggcagagacggcatggagggcctggtgcccgtgggctacaccagcctggtgctgtag

SEQ ID NO: 10676 - DNA, 1302 bp, synthetic construct; identical to SEQ ID NO: 9646
  source 1..1302: mol_type = other DNA; note = Synthetic coding sequence

SEQ ID NO: 10677 - DNA, 2709 bp, synthetic construct
  source 1..2709: mol_type = other DNA; note = Synthetic coding sequence
atgctgagcccccagagagccctgctgtgcaacctgaaccacatccacctgcagcacgtgagcctgggcctgcacctgagcagaagacccgagctgcaggagggccccctgagcaccccccccccccccggcgacaccggcggcaaggagagcagaggcccctgcagcggcaccctggtggacgccaacagcaacagccccgccgtgccctgcagatgctgccaggagcacggccccggcctggagaacagacaggaccccagccaggaggaggagggcgccgccagccccagcgaccccggctgcagcagcagcctgagcagctgcagcgacctgagccccgacgagagccccgtgagcgtgtacctgagagacctgcccggcgacgaggacgcccacccccagcccagcatcatccccctggagcagggcagccccctggccagcgccggccccggcacctgcagccccgacagcttctgctgcagccccgacagctgcagcggcgccagcagcagccccgaccccggcctggacagcaactgcaacgccctgaccacctgccaggacgtgcccagccccggcctggaggaggaggacgagagagccgagcaggacctgcccaccagcgagctgctggaggccgacgacggcaagatcgacgccggcaagaccgagcccagctggaagatcaaccccatctggaagatcgacaccgagaagaccaaggccgagtggaagaccaccgagaacaacaacaccggctggaagaacaacggcaacgtgaacagcagctggaagagcgagcccgagaagttcgacagcggctggaagaccaacaccagaatcaccgacagcggcagcaagaccgacgccggcaagatcgacggcggctggagaagcgacgtgagcgaggagcccgtgccccacagaaccatcaccagcttccacgagctggcccagaagagaaagagaggccccggcctgcccctggtgccccaggccaagaaggacagaagcgactggctgatcgtgttcagccccgacaccgagctgccccccagcggcagccccggcggcagcagcgccccccccagagaggtgaccaccttcaaggagctgagaagcagaagcagagcccccgccccccccgtgccccccagagacccccccgtgggctgggccctggtgccccccagacccccccccccccccgtgccccccagaagaaagaagaacagacccggcctgcagcccatcgccgagggccagagcgaggagggcagagccgtgagccccgccgccggcgaggaggcccccgccgccaaggagcccggcgcccaggccggcctggaggtgagaagcagctggagcttcgccggcgtgcccggcgcccagagactgtggatggccgaggcccagagcggcaccggccagctgcaggagcagaagaagggcctgctgatcgccgtgagcgtgagcgtggacaagatcatcagccacttcggcgccgccagaaacctggtgcagaaggcccagctgggcgacagcagactgagccccgacgtgggccacctggtgctgaccaccctgtgccccgccctgcacgccctggtggccgacggcctgaagcccttcagaaaggacctgatcaccggccagagaagaagcagcccctggagcgtggtggaggccagcgtgaagcccggcagcagcaccagaagcctgggcaccctgtacagccaggtgagcagactggcccccctgagcagcagcagaagcagattccacgccttcatcctgggcctgctgaacaccaagcagctggagctgtggttcagcagcctgcaggaggacgccggcctgctgagcctgctgtacctgcccaccggcttcttcagcctggccagaggcggctgccccagcctgagcaccgagctgctgctgctgctgcagcccctgagcgtgctgaccttccacctggacctgctgttcgagcaccaccaccacctgcccctgggccccccccaggcccccgccccccccggccccccccccgccctgcagcagaccatgcaggccatgctgcacttcggcggcagactggcccagagcctgagaggcaccagcaaggaggccgccagcgaccccagcgacagccccaacctgcccacccccggcagctggtgggagcagctgacccaggccagcagagtgtacgccagcggcggcaccgagggcttccccctgagcagatgggcccccggcagacacggcaccgccgccgaggagggcgcccaggagagacccctgcccaccgacgagatggcccccggcagaggcctgtggctgggcagactgttcggcgtgcccggcggccccgccgagaacgagaacggcgccctgaagagcagaagacccagcagctggctgccccccaccgtgagcgtgctggccctggtgaagagaggcgccccccccgagatgcccagcccccaggagctggaggccagcgcccccagaatggtgcagacccacagagccgtgagagccctgtgcgaccacaccgccgccagacccgaccagctgagcttcagaagaggcgaggtgctgagagtgatcaccaccgtggacgaggactggctgagatgcggcagagacggcatggagggcctggtgcccgtgggctacaccagcctggtgctgtag

SEQ ID NO: 10678 - DNA, 2391 bp, synthetic construct
  source 1..2391: mol_type = other DNA; note = Synthetic coding sequence
atgctgagcccccagagagccctgctgtgcaacctgaaccacatccacctgcagcacgtgagcctgggcctgcacctgagcagaagacccgagctgcaggagggccccctgagcaccccccccccccccggcgacaccggcggcaaggagagcagaggcccctgcagcggcaccctggtggacgccaacagcaacagccccgccgtgccctgcagatgctgccaggagcacggccccggcctggagaacagacaggaccccagccaggaggaggagggcgccgccagccccagcgaccccggctgcagcagcagcctgagcagctgcagcgacctgagccccgacgagagccccgtgagcgtgtacctgagagacctgcccggcgacgaggacgcccacccccagcccagcatcatccccctggagcagggcagccccctggccagcgccggccccggcacctgcagccccgacagcttctgctgcagccccgacagctgcagcggcgccagcagcagccccgaccccggcctggacagcaactgcaacgccctgaccacctgccaggacgtgcccagccccggcctggaggaggaggacgagagagccgagcaggacctgcccaccagcgagctgctggaggccgacgacggcaagatcgacgccggcaagaccgagcccagctggaagatcaaccccatctggaagatcgacaccgagaagaccaaggccgagtggaagaccaccgagaacaacaacaccggctggaagaacaacggcaacgtgaacagcagctggaagagcgagcccgagaagttcgacagcggctggaagaccaacaccagaatcaccgacagcggcagcaagaccgacgccggcaagatcgacggcggctggagaagcgacgtgagcgaggagcccgtgccccacagaaccatcaccagcttccacgagctggcccagaagagaaagagaggccccggcctgcccctggtgccccaggccaagaaggacagaagcgactggctgatcgtgttcagccccgacaccgagctgccccccagcggcagccccggcggcagcagcgccccccccagagaggtgaccaccttcaaggagctgagaagcagaagcagagcccccgccccccccgtgccccccagagacccccccgtgggctgggccctggtgccccccagacccccccccccccccgtgccccccagaagaaagaagaacagacccggcctgcagcccatcgccgagggccagagcgaggagggcagagccgtgagccccgccgccggcgaggaggcccccgccgccaaggagcccggcgcccaggccggcctggaggtgagaagcagctggagcttcgccggcgtgcccggcgcccagagactgtggatggccgaggcccagagcggcaccggccagctgcaggagcagaagaagggcctgctgatcgccgtgagcgtgagcgtggacaagatcatcagccacttcggcgccgccagaaacctggtgcagaaggcccagctgggcgacagcagactgagccccgacgtgggccacctggtgctgaccaccctgtgccccgccctgcacgccctggtggccgacggcctgaagcccttcagaaaggacctgatcaccggccagagaagaagcagcccctggagcgtggtggaggccagcgtgaagcccggcagcagcaccagaagcctgggcaccctgtacagccaggtgagcagactggcccccctgagcagcagcagaagcagattccacgccttcatcctgggcctgctgaacaccaagcagctggagctgtggttcagcagcctgcaggaggacgccggcagctggtgggagcagctgacccaggccagcagagtgtacgccagcggcggcaccgagggcttccccctgagcagatgggcccccggcagacacggcaccgccgccgaggagggcgcccaggagagacccctgcccaccgacgagatggcccccggcagaggcctgtggctgggcagactgttcggcgtgcccggcggccccgccgagaacgagaacggcgccctgaagagcagaagacccagcagctggctgccccccaccgtgagcgtgctggccctggtgaagagaggcgccccccccgagatgcccagcccccaggagctggaggccagcgcccccagaatggtgcagacccacagagccgtgagagccctgtgcgaccacaccgccgccagacccgaccagctgagcttcagaagaggcgaggtgctgagagtgatcaccaccgtggacgaggactggctgagatgcggcagagacggcatggagggcctggtgcccgtgggctacaccagcctggtgctgtag

SEQ ID NO: 10679 - DNA, 513 bp, synthetic construct
  source 1..513: mol_type = other DNA; note = Synthetic coding sequence
atggccagcgtgagcagcgccaccttcagcggccacggcgccagaagcctgctgcagttcctgagactggtgggccagctgaagagagtgcccagaaccggctgggtgtacagaaacgtgcagagacccgagagcgtgagcgaccacatgtacagaatggccgtgatggccatggtgatcaaggacgacagactgaacaaggacagagaggccatgaagcagatcacccagctgctgcccgaggacctgagaaaggagctgtacgagctgtgggaggagtacgagacccagagcagcgccgaggccaagttcgtgaagcagctggaccagtgcgagatgatcctgcaggccagcgagtacgaggacctggagcacaagcccggcagactgcaggacttctacgacagcaccgccggcaagttcaaccaccccgagatcgtgcagctggtgagcgagctggaggccgagagaagcaccaacatcgccgccgccgccagcgagccccacagctag

SEQ ID NO: 10680 - DNA, 396 bp, synthetic construct
  source 1..396: mol_type = other DNA; note = Synthetic coding sequence
atggaggcccaggcccagggcctgctggagaccgagcccctgcagggcaccgacgaggacgccgtggccagcgccgacttcagcagcatgctgagcgaggaggagaaggaggagctgaaggccgagctggtgcagctggaggacgagatcaccaccctgagacaggtgctgagcgccaaggagagacacctggtggagatcaagcagaagctgggcatgaacctgatgaacgagctgaagcagaacttcagcaagagctggcacgacatgcagaccaccaccgcctacaagaagacccacgagaccctgagccacgccggccagaaggccaccgccgccttcagcaacgtgggcaccgccatcagcaagaagttcggcgacatgagaagaaagtag

SEQ ID NO: 10681 - DNA, 435 bp, synthetic construct
  source 1..435: mol_type = other DNA; note = Synthetic coding sequence
atggaggcccaggcccagggcctgctggagaccgagcccctgcagggcaccgacgaggacgccgtggccagcgccgacttcagcagcatgctgagcgaggaggagaaggaggagctgaaggccgagctggtgcagctggaggacgagatcaccaccctgagacaggtgctgagcgccaaggagagacacctggtggagatcaagcagaagctgggcatgaacctgatgaacgagctgaagcagaacttcagcaagagctggcacgacatgcagaccaccaccgcctacaagaagacccacgagaccctgagccacgccggccagaaggccaccgccgccttcagcaacgtgggcaccgccatcagcaagaagttcggcgacatgagctacagcatcagacacagcatcagcatgcccgccatgagaagaaagtag

SEQ ID NO: 10682 - DNA, 948 bp, synthetic construct
  source 1..948: mol_type = other DNA; note = Synthetic coding sequence
atggccagctgccccgacagcgacaacagctgggtgctggccggcagcgagagcctgcccgtggagaccctgggccccgccagcagaatggaccccgagagcgagagagccctgcaggccccccacagccccagcaagaccgacggcaaggagctggccggcaccatggacggcgagggcaccctgttccagaccgagagcccccagagcggcagcatcctgaccgaggagaccgaggtgaagggcaccctggagggcgacgtgtgcggcgtggagccccccggccccggcgacaccgtggtgcagggcgacctgcaggagaccaccgtggtgaccggcctgggccccgacacccaggacctggagggccagagccccccccagagcctgcccagcacccccaaggccgcctggatcagagaggagggcagatgcagcagcagcgacgacgacaccgacgtggacatggagggcctgagaagaagaagaggcagagaggccggccccccccagcccatggtgcccctggccgtggagaaccaggccggcggcggcctgagcgagagcgagaccggccccatggaggaggtggagagacaggtgctgcccgaccccgaggtgctggaggccgtgggcgacagacaggacggcctgagagagcagctgcaggcccccgtgccccccgacagcgtgcccagcctgcagaacatgggcctgctgctggacaagctggccaaggagaaccaggacatcagactgctgcaggcccagctgcaggtgggcaccggcagaagaggctgggccagagtgacccacctgggccaggccagcgtgctggccagcagccccaagagaaacgtgagctacctgcccacccaccccgacccccccctgagccactacagccagggcgtgttccccgtgctgggcagccaccccctgtgctag

SEQ ID NO: 10683 - DNA, 2196 bp, synthetic construct
  source 1..2196: mol_type = other DNA; note = Synthetic coding sequence
atggccagctgccccgacagcgacaacagctgggtgctggccggcagcgagagcctgcccgtggagaccctgggccccgccagcagaatggaccccgagagcgagagagccctgcaggccccccacagccccagcaagaccgacggcaaggagctggccggcaccatggacggcgagggcaccctgttccagaccgagagcccccagagcggcagcatcctgaccgaggagaccgaggtgaagggcaccctggagggcgacgtgtgcggcgtggagccccccggccccggcgacaccgtggtgcagggcgacctgcaggagaccaccgtggtgaccggcctgggccccgacacccaggacctggagggccagagccccccccagagcctgcccagcacccccaaggccgcctggatcagagaggagggcagatgcagcagcagcgacgacgacaccgacgtggacatggagggcctgagaagaagaagaggcagagaggccggccccccccagcccatggtgcccctggccgtggagaaccaggccggcggcgagggcgccggcggcgagctgggcatcagcctgaacatgtgcctgctgggcgccctggtgctgctgggcctgggcgtgctgctgttcagcggcggcctgagcgagagcgagaccggccccatggaggaggtggagagacaggtgctgcccgaccccgaggtgctggaggccgtgggcgacagacaggacggcctgagagagcagctgcaggcccccgtgccccccgacagcgtgcccagcctgcagaacatgggcctgctgctggacaagctggccaaggagaaccaggacatcagactgctgcaggcccagctgcaggcccagaaggaggagctgcagagcctgatgcaccagcccaagggcctggaggaggagaacgcccagctgagaggcgccctgcagcagggcgaggccttccagagagccctggagagcgagctgcagcagctgagagccagactgcagggcctggaggccgactgcgtgagaggccccgacggcgtgtgcctgagcggcggcagaggcccccagggcgacaaggccatcagagagcagggccccagagagcaggagcccgagctgagcttcctgaagcagaaggagcagctggaggccgaggcccaggccctgagacaggagctggagagacagagaagactgctgggcagcgtgcagcaggacctggagagaagcctgcaggacgccagcagaggcgaccccgcccacgccggcctggccgagctgggccacagactggcccagaagctgcagggcctggagaactggggccaggaccccggcgtgagcgccaacgccagcaaggcctggcaccagaagagccacttccagaacagcagagagtggagcggcaaggagaagtggtgggacggccagagagacagaaaggccgagcactggaagcacaagaaggaggagagcggcagagagagaaagaagaactggggcggccaggaggacagagagcccgccggcagatggaaggagggcagacccagagtggaggagagcggcagcaagaaggagggcaagagacagggccccaaggagccccccagaaagagcggcagcttccacagcagcggcgagaagcagaagcagcccagatggagagagggcaccaaggacagccacgaccccctgcccagctgggccgagctgctgagacccaagtacagagccccccagggctgcagcggcgtggacgagtgcgccagacaggagggcctgaccttcttcggcaccgagctggcccccgtgagacagcaggagctggccagcctgctgagaacctacctggccagactgccctgggccggccagctgaccaaggagctgcccctgagccccgccttcttcggcgaggacggcatcttcagacacgacagactgagattcagagacttcgtggacgccctggaggacagcctggaggaggtggccgtgcagcagaccggcgacgacgacgaggtggacgacttcgaggacttcatcttcagccacttcttcggcgacaaggccctgaagaagagaagcggcaagaaggacaagcacagccagagccccagagccgccggccccagagagggccacagccacagccaccaccaccaccacagaggctag

SEQ ID NO: 10684 - DNA, 2109 bp, synthetic construct
  source 1..2109: mol_type = other DNA; note = Synthetic coding sequence
atggaccccgagagcgagagagccctgcaggccccccacagccccagcaagaccgacggcaaggagctggccggcaccatggacggcgagggcaccctgttccagaccgagagcccccagagcggcagcatcctgaccgaggagaccgaggtgaagggcaccctggagggcgacgtgtgcggcgtggagccccccggccccggcgacaccgtggtgcagggcgacctgcaggagaccaccgtggtgaccggcctgggccccgacacccaggacctggagggccagagccccccccagagcctgcccagcacccccaaggccgcctggatcagagaggagggcagatgcagcagcagcgacgacgacaccgacgtggacatggagggcctgagaagaagaagaggcagagaggccggccccccccagcccatggtgcccctggccgtggagaaccaggccggcggcgagggcgccggcggcgagctgggcatcagcctgaacatgtgcctgctgggcgccctggtgctgctgggcctgggcgtgctgctgttcagcggcggcctgagcgagagcgagaccggccccatggaggaggtggagagacaggtgctgcccgaccccgaggtgctggaggccgtgggcgacagacaggacggcctgagagagcagctgcaggcccccgtgccccccgacagcgtgcccagcctgcagaacatgggcctgctgctggacaagctggccaaggagaaccaggacatcagactgctgcaggcccagctgcaggcccagaaggaggagctgcagagcctgatgcaccagcccaagggcctggaggaggagaacgcccagctgagaggcgccctgcagcagggcgaggccttccagagagccctggagagcgagctgcagcagctgagagccagactgcagggcctggaggccgactgcgtgagaggccccgacggcgtgtgcctgagcggcggcagaggcccccagggcgacaaggccatcagagagcagggccccagagagcaggagcccgagctgagcttcctgaagcagaaggagcagctggaggccgaggcccaggccctgagacaggagctggagagacagagaagactgctgggcagcgtgcagcaggacctggagagaagcctgcaggacgccagcagaggcgaccccgcccacgccggcctggccgagctgggccacagactggcccagaagctgcagggcctggagaactggggccaggaccccggcgtgagcgccaacgccagcaaggcctggcaccagaagagccacttccagaacagcagagagtggagcggcaaggagaagtggtgggacggccagagagacagaaaggccgagcactggaagcacaagaaggaggagagcggcagagagagaaagaagaactggggcggccaggaggacagagagcccgccggcagatggaaggagggcagacccagagtggaggagagcggcagcaagaaggagggcaagagacagggccccaaggagccccccagaaagagcggcagcttccacagcagcggcgagaagcagaagcagcccagatggagagagggcaccaaggacagccacgaccccctgcccagctgggccgagctgctgagacccaagtacagagccccccagggctgcagcggcgtggacgagtgcgccagacaggagggcctgaccttcttcggcaccgagctggcccccgtgagacagcaggagctggccagcctgctgagaacctacctggccagactgccctgggccggccagctgaccaaggagctgcccctgagccccgccttcttcggcgaggacggcatcttcagacacgacagactgagattcagagacttcgtggacgccctggaggacagcctggaggaggtggccgtgcagcagaccggcgacgacgacgaggtggacgacttcgaggacttcatcttcagccacttcttcggcgacaaggccctgaagaagagaagcggcaagaaggacaagcacagccagagccccagagccgccggccccagagagggccacagccacagccaccaccaccaccacagaggctag

SEQ ID NO: 10685 - DNA, 2427 bp, synthetic construct
  source 1..2427: mol_type = other DNA; note = Synthetic coding sequence
atgatctggagaaacaactggaagagcaccaccggcagactgaacgtgaagctgcagagcgacaagctgcagcacggctgcggccccgactacagcagcgcctggctgcccgccaacgagagcctgtggcaggccaccaccgtgcccagcaaccacagaaacaaccacatcagaagacacagcatcgccagcgacagcggcgacaccggcatcggcaccagctgcagcgacagcgtggaggaccacagcaccagcagcggcaccctgagcttcaagcccagccagagcctgatcaccctgcccaccgcccacgtgatgcccagcaacagcagcgccagcatcagcaagctgagagagagcctgacccccgacggcagcaagtggagcaccagcctgatgcagaccctgggcaaccacagcagaggcgagcaggacagcagcctggacatgaaggacttcagacccctgagaaagtggagcagcctgagcaagctgaccgcccccgacaactgcggccagggcggcaccgtgtgcagagaggagagcagaaacggcctggagaagatcggcaaggccaaggccctgaccagccagctgagaaccatcggccccagctgcctgcacgacagcatggagatgctgagactggaggacaaggagatcaacaagaagagaagcagcaccctggactgcaagtacaagttcgagagctgcagcaaggaggacttcagagccagcagcagcaccctgagaagacagcccgtggacatgacctacagcgccctgcccgagagcaagcccatcatgaccagcagcgaggccttcgagccccccaagtacctgatgctgggccagcaggccgtgggcggcgtgcccatccagcccagcgtgagaacccagatgtggctgaccgagcagctgagaaccaaccccctggagggcagaaacaccgaggacagctacagcctggccccctggcagcagcagcagatcgaggacttcagacagggcagcgagacccccatgcaggtgctgaccggcagcagcagacagagctacagccccggctaccaggacttcagcaagtgggagagcatgctgaagatcaaggagggcctgctgagacagaaggagatcgtgatcgacagacagaagcagcagatcacccacctgcacgagagaatcagagacaacgagctgagagcccagcacgccatgctgggccactacgtgaactgcgaggacagctacgtggccagcctgcagccccagtacgagaacaccagcctgcagacccccttcagcgaggagagcgtgagccacagccagcagggcgagttcgagcagaagctggccagcaccgagaaggaggtgctgcagctgaacgagttcctgaagcagagactgagcctgttcagcgaggagaagaagaagctggaggagaagctgaagaccagagacagatacatcagcagcctgaagaagaagtgccagaaggagagcgagcagaacaaggagaagcagagaagaatcgagaccctggagaagtacctggccgacctgcccaccctggacgacgtgcagagccagagcctgcagctgcagatcctggaggagaagaacaagaacctgcaggaggccctgatcgacaccgagaagaagctggaggagatcaagaagcagtgccaggacaaggagacccagctgatctgccagaagaagaaggagaaggagctggtgaccaccgtgcagagcctgcagcagaaggtggagagatgcctggaggacggcatcagactgcccatgctggacgccaagcagctgcagaacgagaacgacaacctgagacagcagaacgagaccgccagcaagatcatcgacagccagcaggacgagatcgacagaatgatcctggagatccagagcatgcagggcaagctgagcaaggagaagctgaccacccagaagatgatggaggagctggagaagaaggagagaaacgtgcagagactgaccaaggccctgctggagaaccagagacagaccgacgagacctgcagcctgctggaccagggccaggagcccgaccagagcagacagcagaccgtgctgagcaagagacccctgttcgacctgaccgtgatcgaccagctgttcaaggagatgagctgctgcctgttcgacctgaaggccctgtgcagcatcctgaaccagagagcccagggcaaggagcccaacctgagcctgctgctgggcatcagaagcatgaactgcagcgccgaggagaccgagaacgaccacagcaccgagaccctgaccaagaagctgagcgacgtgtgccagctgagaagagacatcgacgagctgagaaccaccatcagcgacagatacgcccaggacatgggcgacaactgcatcacccagtag

SEQ ID NO: 10686 - DNA, 2418 bp, synthetic construct
  source 1..2418: mol_type = other DNA; note = Synthetic coding sequence
atgtggggcagattcctggcccccgaggccagcggcagagacagccccggcggcgccagaagcttccccgccggccccgactacagcagcgcctggctgcccgccaacgagagcctgtggcaggccaccaccgtgcccagcaaccacagaaacaaccacatcagaagacacagcatcgccagcgacagcggcgacaccggcatcggcaccagctgcagcgacagcgtggaggaccacagcaccagcagcggcaccctgagcttcaagcccagccagagcctgatcaccctgcccaccgcccacgtgatgcccagcaacagcagcgccagcatcagcaagctgagagagagcctgacccccgacggcagcaagtggagcaccagcctgatgcagaccctgggcaaccacagcagaggcgagcaggacagcagcctggacatgaaggacttcagacccctgagaaagtggagcagcctgagcaagctgaccgcccccgacaactgcggccagggcggcaccgtgtgcagagaggagagcagaaacggcctggagaagatcggcaaggccaaggccctgaccagccagctgagaaccatcggccccagctgcctgcacgacagcatggagatgctgagactggaggacaaggagatcaacaagaagagaagcagcaccctggactgcaagtacaagttcgagagctgcagcaaggaggacttcagagccagcagcagcaccctgagaagacagcccgtggacatgacctacagcgccctgcccgagagcaagcccatcatgaccagcagcgaggccttcgagccccccaagtacctgatgctgggccagcaggccgtgggcggcgtgcccatccagcccagcgtgagaacccagatgtggctgaccgagcagctgagaaccaaccccctggagggcagaaacaccgaggacagctacagcctggccccctggcagcagcagcagatcgaggacttcagacagggcagcgagacccccatgcaggtgctgaccggcagcagcagacagagctacagccccggctaccaggacttcagcaagtgggagagcatgctgaagatcaaggagggcctgctgagacagaaggagatcgtgatcgacagacagaagcagcagatcacccacctgcacgagagaatcagagacaacgagctgagagcccagcacgccatgctgggccactacgtgaactgcgaggacagctacgtggccagcctgcagccccagtacgagaacaccagcctgcagacccccttcagcgaggagagcgtgagccacagccagcagggcgagttcgagcagaagctggccagcaccgagaaggaggtgctgcagctgaacgagttcctgaagcagagactgagcctgttcagcgaggagaagaagaagctggaggagaagctgaagaccagagacagatacatcagcagcctgaagaagaagtgccagaaggagagcgagcagaacaaggagaagcagagaagaatcgagaccctggagaagtacctggccgacctgcccaccctggacgacgtgcagagccagagcctgcagctgcagatcctggaggagaagaacaagaacctgcaggaggccctgatcgacaccgagaagaagctggaggagatcaagaagcagtgccaggacaaggagacccagctgatctgccagaagaagaaggagaaggagctggtgaccaccgtgcagagcctgcagcagaaggtggagagatgcctggaggacggcatcagactgcccatgctggacgccaagcagctgcagaacgagaacgacaacctgagacagcagaacgagaccgccagcaagatcatcgacagccagcaggacgagatcgacagaatgatcctggagatccagagcatgcagggcaagctgagcaaggagaagctgaccacccagaagatgatggaggagctggagaagaaggagagaaacgtgcagagactgaccaaggccctgctggagaaccagagacagaccgacgagacctgcagcctgctggaccagggccaggagcccgaccagagcagacagcagaccgtgctgagcaagagacccctgttcgacctgaccgtgatcgaccagctgttcaaggagatgagctgctgcctgttcgacctgaaggccctgtgcagcatcctgaaccagagagcccagggcaaggagcccaacctgagcctgctgctgggcatcagaagcatgaactgcagcgccgaggagaccgagaacgaccacagcaccgagaccctgaccaagaagctgagcgacgtgtgccagctgagaagagacatcgacgagctgagaaccaccatcagcgacagatacgcccaggacatgggcgacaactgcatcacccagtag

SEQ ID NO: 10687 - DNA, 1488 bp, synthetic construct
  source 1..1488: mol_type = other DNA; note = Synthetic coding sequence
atggtggaggagcacgagctgagaaaggagagaatccaggaggactacaacgacaagtactgggaccagagatacaccatcgtgcagcagcagatccccagcttcctgcagaagatggccgacaagatcctgagcaccggcaagtacctgaacgtggtgagagagtgcggccacgacgtgacctgccccgtggccaaggagatcatctacaccctgaaggagagagcctacgtggagcagatcgagaaggccttcaactacgccagcaaggtgctgctggacttcctgatggaggagaaggagctggtggcccacctgagaagcatcaagagatacttcctgatggaccagggcgacttcttcgtgcacttcatggacctggccgaggaggagctgagaaagcccgtggaggacatcaccccccccagactggaggccctgctggagctggccctgagaatgagcaccgccaacaccgaccccttcaaggacgacctgaagatcgacctgatgccccacgacctgatcacccagctgctgagagtgctggccatcgagaccaagcaggagaaggccatggcccacgccgaccccaccgagctggccctgagcggcctggaggccttcagcttcgactacatcgtgaagtggcccctgagcctgatcatcaacagaaaggccctgaccagataccagatgctgttcagacacatgttctactgcaagcacgtggagagacagctgtgcagcgtgtggatcagcaacaagaccgccaagcagcacagcctgcacagcgcccagtggttcgccggcgccttcaccctgagacagagaatgctgaacttcgtgcagaacatccagtactacatgatgttcgaggtgatggagcccacctggcacatcctggagaagaacctgaagagcgccagcaacatcgacgacgtgctgggccaccacaccggcttcctggacacctgcctgaaggactgcatgctgaccaaccccgagctgctgaaggtgttcagcaagctgatgagcgtgtgcgtgatgttcaccaactgcatgcagaagttcacccagagcatgaagctggacggcgagctgggcggccagaccctggagcacagcaccgtgctgggcctgcccgccggcgccgaggagagagccagaaaggagctggccagaaagcacctggccgagcacgccgacaccgtgcagctggtgagcggcttcgaggccaccatcaacaagttcgacaagaacttcagcgcccacctgctggacctgctggccagactgagcatctacagcaccagcgactgcgagcacggcatggccagcgtgatcagcagactggacttcaacggcttctacaccgagagactggagagactgagcgccgagagaagccagaaggccaccccccaggtgcccgtgctgagaggcccccccgcccccgcccccagagtggccgtgaccgcccagtag

SEQ ID NO: 10688 - DNA, 2709 bp, synthetic construct; identical to SEQ ID NO: 9341
  source 1..2709: mol_type = other DNA; note = Synthetic coding sequence

SEQ ID NO: 10689 - DNA, 1620 bp, synthetic construct; identical to SEQ ID NO: 10413
  source 1..1620: mol_type = other DNA; note = Synthetic coding sequence

SEQ ID NO: 10690 - DNA, 453 bp, synthetic construct
  source 1..453: mol_type = other DNA; note = Synthetic coding sequence
atgagaggcgacagaggcagaggcagaggcggcagattcggcagcagaggcggccccggcggcggcttcagacccttcgtgccccacatccccttcgacttctacctgtgcgagatggccttccccagagtgaagcccgcccccgacgagaccagcttcagcgaggccctgctgaagagaaaccaggacctggcccccaacagcgccgagcaggccagcatcctgagcctggtgaccaagatcaacaacgtgatcgacaacctgatcgtggcccccggcaccttcgaggtgcagatcgaggaggtgagacaggtgggcagctacaagaagggcaccatgaccaccggccacaacgtggccgacctggtggtgatcctgaagatcctgcccacctgcgagtgcgcctgcttctggagctgggagcagaacatcgccctgggcctgggcgtgtag

SEQ ID NO: 10691 - DNA, 348 bp, synthetic construct
  source 1..348: mol_type = other DNA; note = Synthetic coding sequence
atggccttccccagagtgaagcccgcccccgacgagaccagcttcagcgaggccctgctgaagagaaaccaggacctggcccccaacagcgccgagcaggccagcatcctgagcctggtgaccaagatcaacaacgtgatcgacaacctgatcgtggcccccggcaccttcgaggtgcagatcgaggaggtgagacaggtgggcagctacaagaagggcaccatgaccaccggccacaacgtggccgacctggtggtgatcctgaagatcctgcccaccctggaggccgtggccgccctgggcaacaaggtggtggagagcctgagagcccaggaccccagcgagtag

SEQ ID NO: 10692 - DNA, 312 bp, synthetic construct
  source 1..312: mol_type = other DNA; note = Synthetic coding sequence
atgagcgactgctacaccgagctggagaaggccgtgatcgtgctggtggagaacttctacaagtacgtgagcaagtacagcctggtgaagaacaagatcagcaagagcagcttcagagagatgctgcagaaggagctgaaccacatgctgagcgacaccggcaacagaaaggccgccgacaagctgatccagaacctggacgccaaccacgacggcagaatcagcttcgacgagtactggaccctgatcggcggcatcaccggccccatcgccaagctgatccacgagcaggagcagcagagcagcagctag

SEQ ID NO: 10693 - DNA, 312 bp, synthetic construct; identical to SEQ ID NO: 10692
  source 1..312: mol_type = other DNA; note = Synthetic coding sequence

SEQ ID NO: 10694 - DNA, 312 bp, synthetic construct; identical to SEQ ID NO: 10692
  source 1..312: mol_type = other DNA; note = Synthetic coding sequence

SEQ ID NO: 10695 - DNA, 312 bp, synthetic construct; identical to SEQ ID NO: 10692
  source 1..312: mol_type = other DNA; note = Synthetic coding sequence

SEQ ID NO: 10696 - DNA, 306 bp, synthetic construct; identical to SEQ ID NO: 10041
  source 1..306: mol_type = other DNA; note = Synthetic coding sequence

SEQ ID NO: 10697 - DNA, 306 bp, synthetic construct; identical to SEQ ID NO: 10041
  source 1..306: mol_type = other DNA; note = Synthetic coding sequence

SEQ ID NO: 10698 - DNA, 222 bp, synthetic construct
  source 1..222: mol_type = other DNA; note = Synthetic coding sequence
atgagctaccagcagcagcagtgcaagcagccctgccagcccccccccgtgtgccccacccccaagtgccccgagccctgccccccccccaagtgccccgagccctacctgccccccccctgcccccccgagcactgccccccccccccctgccaggacaagtgcccccccgtgcagccctaccccccctgccagcagaagtacccccccaagagcaagtag

SEQ ID NO: 10699 - DNA, 219 bp, synthetic construct
  source 1..219: mol_type = other DNA; note = Synthetic coding sequence
atgagctaccagcagcagcagtgcaagcagccctgccagcccccccccgtgtgccccacccccaagtgccccgagccctgccccccccccaagtgccccgagccctgccccccccccaagtgcccccagccctgccccccccagcagtgccagcagaagtgcccccccgtgacccccagccccccctgccagcccaagtgcccccccaagagcaagtag

SEQ ID NO: 10700 - DNA, 219 bp, synthetic construct; identical to SEQ ID NO: 10699
  source 1..219: mol_type = other DNA; note = Synthetic coding sequence

SEQ ID NO: 10701 - DNA, 219 bp, synthetic construct; identical to SEQ ID NO: 10522
  source 1..219: mol_type = other DNA; note = Synthetic coding sequence

SEQ ID NO: 10702 - DNA, 219 bp, synthetic construct; identical to SEQ ID NO: 10522
  source 1..219: mol_type = other DNA; note = Synthetic coding sequence

SEQ ID NO: 10703 - DNA, 219 bp, synthetic construct; identical to SEQ ID NO: 10522
  source 1..219: mol_type = other DNA; note = Synthetic coding sequence

SEQ ID NO: 10704 - DNA, 8553 bp, synthetic construct
  source 1..8553: mol_type = other DNA; note = Synthetic coding sequence
atgcccaagctgctgcagggcgtgatcaccgtgatcgacgtgttctaccagtacgccacccagcacggcgagtacgacaccctgaacaaggccgagctgaaggagctgctggagaacgagttccaccagatcctgaagaaccccaacgaccccgacaccgtggacatcatcctgcagagcctggacagagaccacaacaagaaggtggacttcaccgagtacctgctgatgatcttcaagctggtgcaggccagaaacaagatcatcggcaaggactactgccaggtgagcggcagcaagctgagagacgacacccaccagcaccaggaggagcaggaggagaccgagaaggaggagaacaagagacaggagagcagcttcagccacagcagctggagcgccggcgagaacgacagctacagcagaaacgtgagaggcagcctgaagcccggcaccgagagcatcagcagaagactgagcttccagagagacttcagcggccagcacaacagctacagcggccagagcagcagctacggcgagcagaacagcgacagccaccagagcagcggcagaggccagtgcggcagcggcagcggccagagccccaactacggccagcacggcagcggcagcggccagagcagcagcaacgacacccacggcagcggcagcggccagagcagcggcttcagccagcacaagagcagcagcggccagagcagcggctacagccagcacggcagcggcagcggccacagcagcggctacggccagcacggcagcagaagcggccagagcagcagaggcgagagacacagaagcagcagcggcagcagcagcagctacggccagcacggcagcggcagcagacagagcctgggccacggcagacagggcagcggcagcagacagagccccagccacgtgagacacggcagcggcagcggccacagcagcagccacggccagcacggcagcggcagcagctacagctacagcagaggccactacgagagcggcagcggccagaccagcggcttcggccagcacgagagcggcagcggccagagcagcggctacagcaagcacggcagcggcagcggccacagcagcagccagggccagcacggcagcaccagcggccaggccagcagcagcggccagcacggcagcagcagcagacagagcagcagctacggccagcacgagagcgccagcagacacagcagcggcagaggccagcacagcagcggcagcggccagagccccggccacggccagagaggcagcggcagcggccagagccccagcagcggccagcacggcaccggcttcggcagaagcagcagcagcggcccctacgtgagcggcagcggctacagcagcggcttcggccaccacgagagcagcagcgagcacagcagcggctacacccagcacggcagcggcagcggccacagcagcggccacggccagcacggcagcagaagcggccagagcagcagaggcgagagacagggcagcagcgccggcagcagcagcagctacggccagcacggcagcggcagcagacagagcctgggccacagcagacacggcagcggcagcggccagagccccagccccagcagaggcagacacgagagcggcagcagacagagcagcagctacggcccccacggctacggcagcggcagaagcagcagcagaggcccctacgagagcggcagcggccacagcagcggcctgggccaccaggagagcagaagcggccagagcagcggctacggccagcacggcagcagcagcggccacagcagcacccacggccagcacggcagcaccagcggccagagcagcagctgcggccagcacggcgccaccagcggccagagcagcagccacggccagcacggcagcggcagcagccagagcagcagatacggccagcagggcagcggcagcggccagagccccagcagaggcagacacggcagcgacttcggccacagcagcagctacggccagcacggcagcggcagcggctggagcagcagcaacggcccccacggcagcgtgagcggccagagcagcggcttcggccacaagagcggcagcggccagagcagcggctacagccagcacggcagcggcagcagccacagcagcggctacagaaagcacggcagcagaagcggccagagcagcagaagcgagcagcacggcagcagcagcggcctgagcagcagctacggccagcacggcagcggcagccaccagagcagcggccacggcagacagggcagcggcagcggccacagccccagcagagtgagacacggcagcagcagcggccacagcagcagccacggccagcacggcagcggcaccagctgcagcagcagctgcggccactacgagagcggcagcggccaggccagcggcttcggccagcacgagagcggcagcggccagggctacagccagcacggcagcgccagcggccacttcagcagccagggcagacacggcagcaccagcggccagagcagcagcagcggccagcacgacagcagcagcggccagagcagcagctacggccagcacgagagcgccagccaccacgccagcggcagaggcagacacggcagcggcagcggccagagccccggccacggccagagaggcagcggcagcggccagagccccagctacggcagacacggcagcggcagcggcagaagcagcagcagcggcagacacggcagcggcagcggccagagcagcggcttcggccacaagagcagcagcggccagagcagcggctacacccagcacggcagcggcagcggccacagcagcagctacgagcagcacggcagcagaagcggccagagcagcagaagcgagcagcacggcagcagcagcggcagcagcagcagctacggccagcacggcagcggcagcagacagagcctgggccacggccagcacggcagcggcagcggccagagccccagccccagcagaggcagacacggcagcggcagcggccagagcagcagctacggcccctacagaagcggcagcggctggagcagcagcagaggcccctacgagagcggcagcggccacagcagcggcctgggccacagagagagcagaagcggccagagcagcggctacggccagcacggcagcagcagcggccacagcagcacccacggccagcacggcagcaccagcggccagagcagcagctgcggccagcacggcgccagcagcggccagagcagcagccacggccagcacggcagcggcagcagccagagcagcggctacggcagacagggcagcggcagcggccagagccccggccacggccagagaggcagcggcagcagacagagccccagctacggcagacacggcagcggcagcggcagaagcagcagcagcggccagcacggcagcggcctgggcgagagcagcggcttcggccaccacgagagcagcagcggccagagcagcagctacagccagcacggcagcggcagcggccacagcagcggctacggccagcacggcagcagaagcggccagagcagcagaggcgagagacacggcagcagcagcggcagcagcagccactacggccagcacggcagcggcagcagacagagcagcggccacggcagacagggcagcggcagcggccacagccccagcagaggcagacacggcagcggcctgggccacagcagcagccacggccagcacggcagcggcagcggcagaagcagcagcagaggcccctacgagagcagaagcggccacagcagcgtgttcggccagcacgagagcggcagcggccacagcagcgcctacagccagcacggcagcggcagcggccacttctgcagccagggccagcacggcagcaccagcggccagagcagcaccttcgaccaggagggcagcagcaccggccagagcagcagctacggccacagaggcagcggcagcagccagagcagcggctacggcagacacggcgccggcagcggccagagccccagcagaggcagacacggcagcggcagcggccacagcagcagctacggccagcacggcagcggcagcggctggagcagcagcagcggcagacacggcagcggcagcggccagagcagcggcttcggccaccacgagagcagcagctggcagagcagcggctgcacccagcacggcagcggcagcggccacagcagcagctacgagcagcacggcagcagaagcggccagagcagcagaggcgagagacacggcagcagcagcggcagcagcagcagctacggccagcacggcagcggcagcagacagagcctgggccacggccagcacggcagcggcagcggccagagccccagccccagcagaggcagacacggcagcggcagcggccagagcagcagctacagcccctacggcagcggcagcggctggagcagcagcagaggcccctacgagagcggcagcagccacagcagcggcctgggccacagagagagcagaagcggccagagcagcggctacggccagcacggcagcagcagcggccacagcagcacccacggccagcacggcagcaccagcggccagagcagcagctgcggccagcacggcgccagcagcggccagagcagcagccacggccagcacggcagcggcagcagccagagcagcggctacggcagacagggcagcggcagcggccagagccccggccacggccagagaggcagcggcagcagacagagccccagctacggcagacacggcagcggcagcggcagaagcagcagcagcggccagcacggcagcggcctgggcgagagcagcggcttcggccaccacgagagcagcagcggccagagcagcagctacagccagcacggcagcggcagcggccacagcagcggctacggccagcacggcagcagaagcggccagagcagcagaggcgagagacacggcagcagcagcagaagcagcagcagatacggccagcacggcagcggcagcagacagagcagcggccacggcagacagggcagcggcagcggccagagccccagcagaggcagacacggcagcggcctgggccacagcagcagccacggccagcacggcagcggcagcggcagaagcagcagcagaggcccctacgagagcagaagcggccacagcagcgtgttcggccagcacgagagcggcagcggccacagcagcgcctacagccagcacggcagcggcagcggccacttctgcagccagggccagcacggcagcaccagcggccagagcagcaccttcgaccaggagggcagcagcaccggccagagcagcagccacggccagcacggcagcggcagcagccagagcagcagctacggccagcagggcagcggcagcggccagagccccagcagaggcagacacggcagcggcagcggccacagcagcagctacggccagcacggcagcggcagcggctggagcagcagcagcggcagacacggcagcggcagcggccagagcagcggcttcggccaccacgagagcagcagctggcagagcagcggctacacccagcacggcagcggcagcggccacagcagcagctacgagcagcacggcagcagaagcggccagagcagcagaggcgagcagcacggcagcagcagcggcagcagcagcagctacggccagcacggcagcggcagcagacagagcctgggccacggccagcacggcagcggcagcggccagagccccagccccagcagaggcagacacggcagcggcagcggccagagcagcagctacggcccctacggcagcggcagcggctggagcagcagcagaggcccctacgagagcggcagcggccacagcagcggcctgggccacagagagagcagaagcggccagagcagcggctacggccagcacggcagcagcagcggccacagcagcacccacggccagcacggcagcgccagcggccagagcagcagctgcggccagcacggcgccagcagcggccagagcagcagccacggccagcacggcagcggcagcagccagagcagcggctacggcagacagggcagcggcagcggccagagccccggccacggccagagaggcagcggcagcagacagagccccagctacggcagacacggcagcggcagcggcagaagcagcagcagcggccagcacggccccggcctgggcgagagcagcggcttcggccaccacgagagcagcagcggccagagcagcagctacagccagcacggcagcggcagcggccacagcagcggctacggccagcacggcagcagaagcggccagagcagcagaggcgagagacacggcagcagcagcggcagcagcagcagatacggccagcacggcagcggcagcagacagagcagcggccacggcagacagggcagcggcagcggccacagccccagcagaggcagacacggcagcggcagcggccacagcagcagccacggccagcacggcagcggcagcggcagaagcagcagcagaggcccctacgagagcagaagcggccacagcagcgtgttcggccagcacgagagcggcagcggccacagcagcgcctacagccagcacggcagcggcagcggccacttctgcagccagggccagcacggcagcaccagcggccagagcagcaccttcgaccaggagggcagcagcaccggccagagcagcagccacggccagcacggcagcggcagcagccagagcagcagctacggccagcagggcagcggcagcggccagagccccagcagaggcagacacggcagcggcagcggccacagcagcagctacggccagcacggcagcggcagcggctggagcagcagcagcggcagacacggcagcggcagcggccagagcagcggcttcggccaccacgagagcagcagctggcagagcagcggctacacccagcacggcagcggcagcggccacagcagcagctacgagcagcacggcagcagaagcggccagagcagcagaggcgagagacacggcagcagcagcggcagcagcagcagctacggccagcacggcagcggcagcagacagagcctgggccacggccagcacggcagcggcagcggccagagccccagccccagcagaggcagacacggcagcggcagcggccagagcagcagctacagcccctacggcagcggcagcggctggagcagcagcagaggcccctacgagagcggcagcggccacagcagcggcctgggccacagagagagcagaagcggccagagcagcggctacggccagcacggcagcagcagcggccacagcagcacccacggccagcacggcagcaccagcggccagagcagcagctgcggccagcacggcgccagcagcggccagagcagcagccacggccagcacggcagcggcagcagccagagcagcggctacggcagacagggcagcggcagcggccagagccccggccacggccagagaggcagcggcagcagacagagccccagctacggcagacacggcagcggcagcggcagaagcagcagcagcggccagcacggcagcggcctgggcgagagcagcggcttcggccaccacgagagcagcagcggccagagcagcagctacagccagcacggcagcggcagcggccacagcagcggctacggccagcacggcagcagaagcggccagagcagcagaggcgagagacacggcagcagcagcggcagcagcagccactacggccagcacggcagcggcagcagacagagcagcggccacggcagacagggcagcggcagcggccagagccccagcagaggcagacacggcagcggcctgggccacagcagcagccacggccagcacggcagcggcagcggcagaagcagcagcagaggcccctacgagagcagactgggccacagcagcgtgttcggccagcacgagagcggcagcggccacagcagcgcctacagccagcacggcagcggcagcggccacttctgcagccagggccagcacggcagcaccagcggccagagcagcaccttcgaccaggagggcagcagcaccggccagagcagcagctacggccacagaggcagcggcagcagccagagcagcggctacggcagacacggcgccggcagcggccagagcctgagccacggcagacacggcagcggcagcggccagagcagcagctacggccagcacggcagcggcagcggccagagcagcggctacagccagcacggcagcggcagcggccaggacggctacagctactgcaagggcggcagcaaccacgacggcggcagcagcggcagctacttcctgagcttccccagcagcaccagcccctacgagtacgtgcaggagcagagatgctacttctaccagtag

SEQ ID NO: 10705 - DNA, 876 bp, synthetic construct
  source 1..876: mol_type = other DNA; note = Synthetic coding sequence
atgagcagcggcgccgacggcggcggcggcgccgccgtggccgccagaagcgacaagggcagccccggcgaggacggcttcgtgcccagcgccctgggcaccagagagcactgggacgccgtgtacgagagagagctgcagaccttcagagagtacggcgacaccggcgagatctggttcggcgaggagagcatgaacagactgatcagatggatgcagaagcacaagatccccctggacgccagcgtgctggacatcggcaccggcaacggcgtgttcctggtggagctggccaagttcggcttcagcaacatcaccggcatcgactacagccccagcgccatccagctgagcggcagcatcatcgagaaggagggcctgagcaacatcaagctgaaggtggaggacttcctgaacctgagcacccagctgagcggcttccacatctgcatcgacaagggcaccttcgacgccatcagcctgaaccccgacaacgccatcgagaagagaaagcagtacgtgaagagcctgagcagagtgctgaaggtgaagggcttcttcctgatcaccagctgcaactggaccaaggaggagctgctgaacgagttcagcgagggctggagcaccgtggccggcttctggctgaccgccgccctgaccagctgggcccaggccatcttcagcaccagcgccagcagagtgggcggcaccaccggcacccaccaccacgcctggatcatcttcgtgttcctggccgagaccagattctgccacgtggtgcaggccggcctggagctgctgggcagcagcgacagccccacctggccccccaaggtgctgggcctgtaccacgccagacccagcctggccttctag

SEQ ID NO: 10706 - DNA, 633 bp, synthetic construct
  source 1..633: mol_type = other DNA; note = Synthetic coding sequence
atggccccctggggcaagagactggccggcgtgagaggcgtgctgctggacatcagcggcgtgctgtacgacagcggcgccggcggcggcaccgccatcgccggcagcgtggaggccgtggccagactgaagagaagcagactgaaggtgagattctgcaccaacgagagccagaagagcagagccgagctggtgggccagctgcagagactgggcttcgacatcagcgagcaggaggtgaccgcccccgcccccgccgcctgccagatcctgaaggagcagggcctgagaccctacctgctgatccacgacggcgtgagaagcgagttcgaccagatcgacaccagcaaccccaactgcgtggtgatcgccgacgccggcgagagcttcagctaccagaacatgaacaacgccttccaggtgctgatggagctggagaagcccgtgctgatcagcctgggcaagggcagatactacaaggagaccagcggcctgatgctggacgtgggcccctacatgaaggccctggagtacgcctgcggcatcaaggccgaggtggtgggcaagcccagccccgagttcttcaagagcgccctgcaggccatcggcgtggaggcccaccaggcccagtag

SEQ ID NO: 10707 - DNA, 813 bp, synthetic construct
  source 1..813: mol_type = other DNA; note = Synthetic coding sequence
atggccccctggggcaagagactggccggcgtgagaggcgtgctgctggacatcagcggcgtgctgtacgacagcggcgccggcggcggcaccgccatcgccggcagcgtggaggccgtggccagactgaagagaagcagactgaaggtgagattctgcaccaacgagagccagaagagcagagccgagctggtgggccagctgcagagactgggcttcgacatcagcgagcaggaggtgaccgcccccgcccccgccgcctgccagatcctgaaggagcagggcctgagaccctacctgctgatccacgacggcgtgagaagcgagttcgaccagatcgacaccagcaaccccaactgcgtggtgatcgccgacgccggcgagagcttcagctaccagaacatgaacaacgccttccaggtgctgatggagctggagaagcccgtgctgatcagcctgggcaagggcagatactacaaggagaccagcggcctgatgctggacgtgggcccctacatgaaggccctggagtacgcctgcggcatcaaggccgaggtggtgggcaagcccagccccgagttcttcaagagcgccctgcaggccatcggcgtggaggcccaccaggccgtgatgatcggcgacgacatcgtgggcgacgtgggcggcgcccagagatgcggcatgagagccctgcaggtgagaaccggcaagttcagacccagcgacgagcaccaccccgaggtgaaggccgacggctacgtggacaacctggccgaggccgtggacctgctgctgcagcacgccgacaagtag

SEQ ID NO: 10708 - DNA, 3948 bp, synthetic construct
  source 1..3948: mol_type = other DNA; note = Synthetic coding sequence
atggccgacaccgacctgttcatggagtgcgaggaggaggagctggagccctggcagaagatcagcgacgtgatcgaggacagcgtggtggaggactacaacagcgtggacaagaccaccaccgtgagcgtgagccagcagcccgtgagcgcccccgtgcccatcgccgcccacgccagcgtggccggccacctgagcaccagcaccaccgtgagcagcagcggcgcccagaacagcgacagcaccaagaagaccctggtgaccctgatcgccaacaacaacgcccccggcacccagttcgtgaagcccaccgtgggcgtgccccaggtgttcagccagatgacccccgtgagacccggcagcaccatgcccgtgagacccaccaccaacaccttcaccaccgtgatccccgccaccctgaccatcagaagcaccgtgccccagagccagagccagcagaccaagagcacccccagcaccagcaccacccccaccgccacccagcccaccagcctgggccagctggccgtgcagagccccggccagagcaaccagaccaccaaccccaagctggcccccagcttccccagcccccccgccgtgagcatcgccagcttcgtgaccgtgaagagacccggcgtgaccggcgagaacagcaacgaggtggccaagctggtgaacaccctgaacaccatccccagcctgggccagagccccggccccgtggtggtgagcaacaacagcagcgcccacggcagccagagaaccagcggccccgagagcagcatgaaggtgaccagcagcatccccgtgttcgacctgcaggacggcggcagaaagatctgccccagatgcaacgcccagttcagagtgaccgaggccctgagaggccacatgtgctactgctgccccgagatggtggagtaccagaagaagggcaagagcctggacagcgagcccagcgtgcccagcgccgccaagccccccagccccgagaagaccgcccccgtggccagcacccccagcagcacccccatccccgccctgagcccccccaccaaggtgcccgagcccaacgagaacgtgggcgacgccgtgcagaccaagctgatcatgctggtggacgacttctactacggcagagacggcggcaaggtggcccagctgaccaacttccccaaggtggccaccagcttcagatgcccccactgcaccaagagactgaagaacaacatcagattcatgaaccacatgaagcaccacgtggagctggaccagcagaacggcgaggtggacggccacaccatctgccagcactgctacagacagttcagcacccccttccagctgcagtgccacctggagaacgtgcacagcccctacgagagcaccaccaagtgcaagatctgcgagtgggccttcgagagcgagcccctgttcctgcagcacatgaaggacacccacaagcccggcgagatgccctacgtgtgccaggtgtgccagtacagaagcagcctgtacagcgaggtggacgtgcacttcagaatgatccacgaggacaccagacacctgctgtgcccctactgcctgaaggtgttcaagaacggcaacgccttccagcagcactacatgagacaccagaagagaaacgtgtaccactgcaacaagtgcagactgcagttcctgttcgccaaggacaagatcgagcacaagctgcagcaccacaagaccttcagaaagcccaagcagctggagggcctgaagcccggcaccaaggtgaccatcagagccagcagaggccagcccagaaccgtgcccgtgagcagcaacgacaccccccccagcgccctgcaggaggccgcccccctgaccagcagcatggaccccctgcccgtgttcctgtacccccccgtgcagagaagcatccagaagagagccgtgagaaagatgagcgtgatgggcagacagacctgcctggagtgcagcttcgagatccccgacttccccaaccacttccccacctacgtgcactgcagcctgtgcagatacagcacctgctgcagcagagcctacgccaaccacatgatcaacaaccacgtgcccagaaagagccccaagtacctggccctgttcaagaacagcgtgagcggcatcaagctggcctgcaccagctgcaccttcgtgaccagcgtgggcgacgccatggccaagcacctggtgttcaaccccagccacagaagcagcagcatcctgcccagaggcctgacctggatcgcccacagcagacacggccagaccagagacagagtgcacgacagaaacgtgaagaacatgtaccccccccccagcttccccaccaacaaggccgccaccgtgaagagcgccggcgccacccccgccgagcccgaggagctgctgacccccctggcccccgccctgcccagccccgccagcaccgccacccccccccccacccccacccacccccaggccctggccctgccccccctggccaccgagggcgccgagtgcctgaacgtggacgaccaggacgagggcagccccgtgacccaggagcccgagctggccagcggcggcggcggcagcggcggcgtgggcaagaaggagcagctgagcgtgaagaagctgagagtggtgctgttcgccctgtgctgcaacaccgagcaggccgccgagcacttcagaaacccccagagaagaatcagaagatggctgagaagattccaggccagccagggcgagaacctggagggcaagtacctgagcttcgaggccgaggagaagctggccgagtgggtgctgacccagagagagcagcagctgcccgtgaacgaggagaccctgttccagaaggccaccaagatcggcagaagcctggagggcggcttcaagatcagctacgagtgggccgtgagattcatgctgagacaccacctgaccccccacgccagaagagccgtggcccacaccctgcccaaggacgtggccgagaacgccggcctgttcatcgacttcgtgcagagacagatccacaaccaggacctgcccctgagcatgatcgtggccatcgacgagatcagcctgttcctggacaccgaggtgctgagcagcgacgacagaaaggagaacgccctgcagaccgtgggcaccggcgagccctggtgcgacgtggtgctggccatcctggccgacggcaccgtgctgcccaccctggtgttctacagaggccagatggaccagcccgccaacatgcccgacagcatcctgctggaggccaaggagagcggctacagcgacgacgagatcatggagctgtggagcaccagagtgtggcagaagcacaccgcctgccagagaagcaagggcatgctggtgatggactgccacagaacccacctgagcgaggaggtgctggccatgctgagcgccagcagcaccctgcccgccgtggtgcccgccggctgcagcagcaagatccagcccctggacgtgtgcatcaagagaaccgtgaagaacttcctgcacaagaagtggaaggagcaggccagagagatggccgacaccgcctgcgacagcgacgtgctgctgcagctggtgctggtgtggctgggcgaggtgctgggcgtgatcggcgactgccccgagctggtgcagagaagcttcctggtggccagcgtgctgcccggccccgacggcaacatcaacagccccaccagaaacgccgacatgcaggaggagctgatcgccagcctggaggagcagctgaagctgagcggcgagcacagcgagagcagcacccccagacccagaagcagccccgaggagaccatcgagcccgagagcctgcaccagctgttcgagggcgagagcgagaccgagagcttctacggcttcgaggaggccgacctggacctgatggagatctag

SEQ ID NO: 10709 - DNA, 2406 bp, synthetic construct
  source 1..2406: mol_type = other DNA; note = Synthetic coding sequence
atgggcgacaccgtggtggagcccgcccccctgaagcccaccagcgagcccaccagcggcccccccggcaacaacggcggcagcctgctgagcgtgatcaccgagggcgtgggcgagctgagcgtgatcgaccccgaggtggcccagaaggcctgccaggaggtgctggagaaggtgaagctgctgcacggcggcgtggccgtgagcagcagaggcacccccctggagctggtgaacggcgacggcgtggacagcgagatcagatgcctggacgacccccccgcccagatcagagaggaggaggacgagatgggcgccgccgtggccagcggcaccgccaagggcgccagaagaagaagacagaacaacagcgccaagcagagctggctgctgagactgttcgagagcaagctgttcgacatcagcatggccatcagctacctgtacaacagcaaggagcccggcgtgcaggcctacatcggcaacagactgttctgcttcagaaacgaggacgtggacttctacctgccccagctgctgaacatgtacatccacatggacgaggacgtgggcgacgccatcaagccctacatcgtgcacagatgcagacagagcatcaacttcagcctgcagtgcgccctgctgctgggcgcctacagcagcgacatgcacatcagcacccagagacacagcagaggcaccaagctgagaaagctgatcctgagcgacgagctgaagcccgcccacagaaagagagagctgcccagcctgagccccgcccccgacaccggcctgagccccagcaagagaacccaccagagaagcaagagcgacgccaccgccagcatcagcctgagcagcaacctgaagagaaccgccagcaaccccaaggtggagaacgaggacgagcccgtgagactggcccccgagagagagttcatcaagagcctgatggccatcggcaagagactggccaccctgcccaccaaggagcagaagacccagagactgatcagcgagctgagcctgctgaaccacaagctgcccgccagagtgtggctgcccaccgccggcttcgaccaccacgtggtgagagtgccccacacccaggccgtggtgctgaacagcaaggacaaggccccctacctgatctacgtggaggtgctggagtgcgagaacttcgacaccaccagcgtgcccgccagaatccccgagaacagaatcagaagcaccagaagcgtggagaacctgcccgagtgcggcatcacccacgagcagagagccggcagcttcagcaccgtgcccaactacgacaacgacgacgaggcctggagcgtggacgacatcggcgagctgcaggtggagctgcccgaggtgcacaccaacagctgcgacaacatcagccagttcagcgtggacagcatcaccagccaggagagcaaggagcccgtgttcatcgccgccggcgacatcagaagaagactgagcgagcagctggcccacacccccaccgccttcaagagagaccccgaggaccccagcgccgtggccctgaaggagccctggcaggagaaggtgagaagaatcagagagggcagcccctacggccacctgcccaactggagactgctgagcgtgatcgtgaagtgcggcgacgacctgagacaggagctgctggccttccaggtgctgaagcagctgcagagcatctgggagcaggagagagtgcccctgtggatcaagccctacaagatcctggtgatcagcgccgacagcggcatgatcgagcccgtggtgaacgccgtgagcatccaccaggtgaagaagcagagccagctgagcctgctggactacttcctgcaggagcacggcagctacaccaccgaggccttcctgagcgcccagagaaacttcgtgcagagctgcgccggctactgcctggtgtgctacctgctgcaggtgaaggacagacacaacggcaacatcctgctggacgccgagggccacatcatccacatcgacttcggcttcatcctgagcagcagccccagaaacctgggcttcgagaccagcgccttcaagctgaccaccgagttcgtggacgtgatgggcggcctggacggcgacatgttcaactactacaagatgctgatgctgcagggcctgatcgccgccagaaagcacatggacaaggtggtgcagatcgtggagatcatgcagcagggcagccagctgccctgcttccacggcagcagcaccatcagaaacctgaaggagagattccacatgagcatgaccgaggagcagctgcagctgctggtggagcagatggtggacggcagcatgagaagcatcaccaccaagctgtacgacggcttccagtacctgaccaacggcatcatgtag

SEQ ID NO: 10710 - DNA, 2451 bp, synthetic construct
  source 1..2451: mol_type = other DNA; note = Synthetic coding sequence
atgggcgacaccgtggtggagcccgcccccctgaagcccaccagcgagcccaccagcggcccccccggcaacaacggcggcagcctgctgagcgtgatcaccgagggcgtgggcgagctgagcgtgatcgaccccgaggtggcccagaaggcctgccaggaggtgctggagaaggtgaagctgctgcacggcggcgtggccgtgagcagcagaggcacccccctggagctggtgaacggcgacggcgtggacagcgagatcagatgcctggacgacccccccgcccagatcagagaggaggaggacgagatgggcgccgccgtggccagcggcaccgccaagggcgccagaagaagaagacagaacaacagcgccaagcagagctggctgctgagactgttcgagagcaagctgttcgacatcagcatggccatcagctacctgtacaacagcaaggagcccggcgtgcaggcctacatcggcaacagactgttctgcttcagaaacgaggacgtggacttctacctgccccagctgctgaacatgtacatccacatggacgaggacgtgggcgacgccatcaagccctacatcgtgcacagatgcagacagagcatcaacttcagcctgcagtgcgccctgctgctgggcgcctacagcagcgacatgcacatcagcacccagagacacagcagaggcaccaagctgagaaagctgatcctgagcgacgagctgaagcccgcccacagaaagagagagctgcccagcctgagccccgcccccgacaccggcctgagccccagcaagagaacccaccagagaagcaagagcgacgccaccgccagcatcagcctgagcagcaacctgaagagaaccgccagcaaccccaaggtggagaacgaggacgaggagctgagcagcagcaccgagagcatcgacaacagcttcagcagccccgtgagactggcccccgagagagagttcatcaagagcctgatggccatcggcaagagactggccaccctgcccaccaaggagcagaagacccagagactgatcagcgagctgagcctgctgaaccacaagctgcccgccagagtgtggctgcccaccgccggcttcgaccaccacgtggtgagagtgccccacacccaggccgtggtgctgaacagcaaggacaaggccccctacctgatctacgtggaggtgctggagtgcgagaacttcgacaccaccagcgtgcccgccagaatccccgagaacagaatcagaagcaccagaagcgtggagaacctgcccgagtgcggcatcacccacgagcagagagccggcagcttcagcaccgtgcccaactacgacaacgacgacgaggcctggagcgtggacgacatcggcgagctgcaggtggagctgcccgaggtgcacaccaacagctgcgacaacatcagccagttcagcgtggacagcatcaccagccaggagagcaaggagcccgtgttcatcgccgccggcgacatcagaagaagactgagcgagcagctggcccacacccccaccgccttcaagagagaccccgaggaccccagcgccgtggccctgaaggagccctggcaggagaaggtgagaagaatcagagagggcagcccctacggccacctgcccaactggagactgctgagcgtgatcgtgaagtgcggcgacgacctgagacaggagctgctggccttccaggtgctgaagcagctgcagagcatctgggagcaggagagagtgcccctgtggatcaagccctacaagatcctggtgatcagcgccgacagcggcatgatcgagcccgtggtgaacgccgtgagcatccaccaggtgaagaagcagagccagctgagcctgctggactacttcctgcaggagcacggcagctacaccaccgaggccttcctgagcgcccagagaaacttcgtgcagagctgcgccggctactgcctggtgtgctacctgctgcaggtgaaggacagacacaacggcaacatcctgctggacgccgagggccacatcatccacatcgacttcggcttcatcctgagcagcagccccagaaacctgggcttcgagaccagcgccttcaagctgaccaccgagttcgtggacgtgatgggcggcctggacggcgacatgttcaactactacaagatgctgatgctgcagggcctgatcgccgccagaaagcacatggacaaggtggtgcagatcgtggagatcatgcagcagggcagccagctgccctgcttccacggcagcagcaccatcagaaacctgaaggagagattccacatgagcatgaccgaggagcagctgcagctgctggtggagcagatggtggacggcagcatgagaagcatcaccaccaagctgtacgacggcttccagtacctgaccaacggcatcatgtag

SEQ ID NO: 10711 - DNA, 2406 bp, synthetic construct; identical to SEQ ID NO: 10709
  source 1..2406: mol_type = other DNA; note = Synthetic coding sequence

SEQ ID NO: 10712 - DNA, 2487 bp, synthetic construct; identical to SEQ ID NO: 9527
  source 1..2487: mol_type = other DNA; note = Synthetic coding sequence

SEQ ID NO: 10713 - DNA, 1143 bp, synthetic construct
  source 1..1143: mol_type = other DNA; note = Synthetic coding sequence
atggtgctggagagcaccatggtgtgcgtggacaacagcgagtacatgagaaacggcgacttcctgcccaccagactgcaggcccagcaggacgccgtgaacatcgtgtgccacagcaagaccagaagcaaccccgagaacaacgtgggcctgatcaccctggccaacgactgcgaggtgctgaccaccctgacccccgacaccggcagaatcctgagcaagctgcacaccgtgcagcccaagggcaagatcaccttctgcaccggcatcagagtggcccacctggccctgaagcacagacagggcaagaaccacaagatgagaatcatcgccttcgtgggcagccccgtggaggacaacgagaaggacctggtgaagctggccaagagactgaagaaggagaaggtgaacgtggacatcatcaacttcggcgaggaggaggtgaacaccgagaagctgaccgccttcgtgaacaccctgaacggcaaggacggcaccggcagccacctggtgaccgtgccccccggccccagcctggccgacgccctgatcagcagccccatcctggccggcgagggcggcgccatgctgggcctgggcgccagcgacttcgagttcggcgtggaccccagcgccgaccccgagctggccctggccctgagagtgagcatggaggagcagagacagagacaggaggaggaggccagaagagccgccgccgccagcgccgccgaggccggcatcgccaccaccggcaccgagggcgagagagacagcgacgacgccctgctgaagatgaccatcagccagcaggagttcggcagaaccggcctgcccgacctgagcagcatgaccgaggaggagcagatcgcctacgccatgcagatgagcctgcagggcgccgagttcggccaggccgagagcgccgacatcgacgccagcagcgccatggacaccagcgagcccgccaaggaggaggacgactacgacgtgatgcaggaccccgagttcctgcagagcgtgctggagaacctgcccggcgtggaccccaacaacgaggccatcagaaacgccatgggcagcctggccagccaggccaccaaggacggcaagaaggacaagaaggaggaggacaagaagtag

SEQ ID NO: 10714 - DNA, 1134 bp, synthetic construct
  source 1..1134: mol_type = other DNA; note = Synthetic coding sequence
atggtgctggagagcaccatggtgtgcgtggacaacagcgagtacatgagaaacggcgacttcctgcccaccagactgcaggcccagcaggacgccgtgaacatcgtgtgccacagcaagaccagaagcaaccccgagaacaacgtgggcctgatcaccctggccaacgactgcgaggtgctgaccaccctgacccccgacaccggcagaatcctgagcaagctgcacaccgtgcagcccaagggcaagatcaccttctgcaccggcatcagagtggcccacctggccctgaagcacagacagggcaagaaccacaagatgagaatcatcgccttcgtgggcagccccgtggaggacaacgagaaggacctggtgaagctggccaagagactgaagaaggagaaggtgaacgtggacatcatcaacttcggcgaggaggaggtgaacaccgagaagctgaccgccttcgtgaacaccctgaacggcaaggacggcaccggcagccacctggtgaccgtgccccccggccccagcctggccgacgccctgatcagcagccccatcctggccggcgagggcggcgccatgctgggcctgggcgccagcgacttcgagttcggcgtggaccccagcgccgaccccgagctggccctggccctgagagtgagcatggaggagcagagacagagacaggaggaggaggccagaagagccgccgccgccagcgccgccgaggccggcatcgccaccaccggcaccgaggacagcgacgacgccctgctgaagatgaccatcagccagcaggagttcggcagaaccggcctgcccgacctgagcagcatgaccgaggaggagcagatcgcctacgccatgcagatgagcctgcagggcgccgagttcggccaggccgagagcgccgacatcgacgccagcagcgccatggacaccagcgagcccgccaaggaggaggacgactacgacgtgatgcaggaccccgagttcctgcagagcgtgctggagaacctgcccggcgtggaccccaacaacgaggccatcagaaacgccatgggcagcctggccagccaggccaccaaggacggcaagaaggacaagaaggaggaggacaagaagtag

SEQ ID NO: 10715 - DNA, 933 bp, synthetic construct
  source 1..933: mol_type = other DNA; note = Synthetic coding sequence
atgagacccgccagacactgggagaccagattcggcgccagagacttcggcggcttccaggactgcttcttcagagacagactgatggacaccgccagaatcgccgtggtgggcgccggcgtggtgggcctgagcaccgccgtgtgcatcagcaagctggtgcccagatgcagcgtgaccatcatcagcgacaagttcacccccgacaccaccagcgacgtggccgccggcatgctgatcccccacacctaccccgacacccccatccacacccagaagcagtggttcagagagaccttcaaccacctgttcgccatcgccaacagcgccgaggccggcgacgccggcgtgcacctggtgagcggcatcaagggcagcggcggctggaccctgaccagaagaatcgaggacctgtgggagctgcaccccagcttcgacatcgtggtgaactgcagcggcctgggcagcagacagctggccggcgacagcaagatcttccccgtgagaggccaggtgctgcaggtgcaggccccctgggtggagcacttcatcagagacggcagcggcctgacctacatctaccccggcaccagccacgtgaccctgggcggcaccagacagaagggcgactggaacctgagccccgacgccgagaacagcagagagatcctgagcagatgctgcgccctggagcccagcctgcacggcgcctgcaacatcagagagaaggtgggcctgagaccctacagacccggcgtgagactgcagaccgagctgctggccagagacggccagagactgcccgtggtgcaccactacggccacggcagcggcggcatcagcgtgcactggggcaccgccctggaggccgccagactggtgagcgagtgcgtgcacgccctgagaacccccatccccaagagcaacctgtag

SEQ ID NO: 10716 - DNA, 1110 bp, synthetic construct
  source 1..1110: mol_type = other DNA; note = Synthetic coding sequence
atgagacccgccagacactgggagaccagattcggcgccagagacttcggcggcttccaggactgcttcttcagagacagactgatggacaccgccagaatcgccgtggtgggcgccggcgtggtgggcctgagcaccgccgtgtgcatcagcaagctggtgcccagatgcagcgtgaccatcatcagcgacaagttcacccccgacaccaccagcgacgtggccgccggcatgctgatcccccacacctaccccgacacccccatccacacccagaagcagtggttcagagagaccttcaaccacctgttcgccatcgccaacagcgccgaggccggcgacgccggcgtgcacctggtgagcggctggcagatcttccagagcacccccaccgaggaggtgcccttctgggccgacgtggtgctgggcttcagaaagatgaccgaggccgagctgaagaagttcccccagtacgtgttcggccaggccttcaccaccctgaagtgcgagtgccccgcctacctgccctggctggagaagagaatcaagggcagcggcggctggaccctgaccagaagaatcgaggacctgtgggagctgcaccccagcttcgacatcgtggtgaactgcagcggcctgggcagcagacagctggccggcgacagcaagatcttccccgtgagaggccaggtgctgcaggtgcaggccccctgggtggagcacttcatcagagacggcagcggcctgacctacatctaccccggcaccagccacgtgaccctgggcggcaccagacagaagggcgactggaacctgagccccgacgccgagaacagcagagagatcctgagcagatgctgcgccctggagcccagcctgcacggcgcctgcaacatcagagagaaggtgggcctgagaccctacagacccggcgtgagactgcagaccgagctgctggccagagacggccagagactgcccgtggtgcaccactacggccacggcagcggcggcatcagcgtgcactggggcaccgccctggaggccgccagactggtgagcgagtgcgtgcacgccctgagaacccccatccccaagagcaacctgtag

SEQ ID NO: 10717 - DNA, 1026 bp, synthetic construct
  source 1..1026: mol_type = other DNA; note = Synthetic coding sequence
atggacaccgccagaatcgccgtggtgggcgccggcgtggtgggcctgagcaccgccgtgtgcatcagcaagctggtgcccagatgcagcgtgaccatcatcagcgacaagttcacccccgacaccaccagcgacgtggccgccggcatgctgatcccccacacctaccccgacacccccatccacacccagaagcagtggttcagagagaccttcaaccacctgttcgccatcgccaacagcgccgaggccggcgacgccggcgtgcacctggtgagcggctggcagatcttccagagcacccccaccgaggaggtgcccttctgggccgacgtggtgctgggcttcagaaagatgaccgaggccgagctgaagaagttcccccagtacgtgttcggccaggccttcaccaccctgaagtgcgagtgccccgcctacctgccctggctggagaagagaatcaagggcagcggcggctggaccctgaccagaagaatcgaggacctgtgggagctgcaccccagcttcgacatcgtggtgaactgcagcggcctgggcagcagacagctggccggcgacagcaagatcttccccgtgagaggccaggtgctgcaggtgcaggccccctgggtggagcacttcatcagagacggcagcggcctgacctacatctaccccggcaccagccacgtgaccctgggcggcaccagacagaagggcgactggaacctgagccccgacgccgagaacagcagagagatcctgagcagatgctgcgccctggagcccagcctgcacggcgcctgcaacatcagagagaaggtgggcctgagaccctacagacccggcgtgagactgcagaccgagctgctggccagagacggccagagactgcccgtggtgcaccactacggccacggcagcggcggcatcagcgtgcactggggcaccgccctggaggccgccagactggtgagcgagtgcgtgcacgccctgagaacccccatccccaagagcaacctgtag

SEQ ID NO: 10718 - DNA, 1074 bp, synthetic construct
  source 1..1074: mol_type = other DNA; note = Synthetic coding sequence
atgggcaccatccaggaggccggcaagaagaccgacgtgggcgtgagagagatcgccgaggcccccgagctgggcgccgccctgagacacggcgagctggagctgaaggaggagtggcaggacgaggagttccccagactgctgcccgaggaggccggcaccagcgaggaccccgaggaccccaagggcgacagccaggccgccgccggcacccccagcaccctggccctgtgcggccagagacccatgagaaagagactgagcgcccccgagctgagactgagcctgaccaagggccccggcaacgacggcgccagccccacccagagcgcccccagcagccccgacggcagcagcgacctggagatcgacgagctggagacccccagcgacagcgagcagctggacagcggccacgagttcgagtgggaggacgagctgcccagagccgagggcctgggcaccagcgagaccgccgagagactgggcagaggctgcatgtgggacgtgaccggcgaggacggccaccactggagagtgttcagaatgggccccagagagcagagagtggacatgaccgtgatcgagccctacaagaaggtgctgagccacggcggctaccacggcgacggcctgaacgccgtgatcctgttcgccagctgctacctgcccagaagcagcatccccaactacacctacgtgatggagcacctgttcagatacatggtgggcaccctggagctgctggtggccgagaactacctgctggtgcacctgagcggcggcaccagcagagcccaggtgccccccctgagctggatcagacagtgctacagaaccctggacagaagactgagaaagaacctgagagccctggtggtggtgcacgccacctggtacgtgaaggccttcctggccctgctgagacccttcatcagcagcaagttcaccagaaagatcagattcctggacagcctgggcgagctggcccagctgatcagcctggaccaggtgcacatccccgaggccgtgagacagctggacagagacctgcacggcagcggcggcacctag

SEQ ID NO: 10719 - DNA, 1269 bp, synthetic construct
  source 1..1269: mol_type = other DNA; note = Synthetic coding sequence
atgctgaagttcctggccaagggcgaggtgcccaagggcagctgcgaggacgagcccatggacagcaccatggacgacgccgtggccggcgacttcgccctgatcaacaagctggacatccagtgcgacctgaagaccctgagcgacgacatcaaggagagcctggagagcgagggcaagaacagcaagaaggaggagccccaggagctgctgcagagccaggacttcgtgggcgagaagctgggcagcggcgagcccagccacagcgtgaaggtgcacaccgtgcccaagcccggcaagggcgccgacctgagcaagcccccctgcagaaaggccaaggagatcagaaaggagagaaagagactgaagctgatgcagcagaaccccgccggcgagctggagggcttccaggcccagggccacccccccagcctgttcccccccaaggccaagagcaaccagcccaagagcctggaggacctgatcttcgagagcctgcccgagaacgccagccacaagctggaggtgagactggtgcccgtgagcttcgaggaccccgagttcaagagcagcttcagccagagcttcagcctgtacgtgaagtaccaggtggccatccaccaggacccccccgacgagtgcggcaagaccgagttcaccagattcctgtgcagcagccccctggaggccgagaccccccccaacggccccgactgcggctacggcagcttccaccagcagtactggctggacggcaagatcatcgccgtgggcgtgatcgacatcctgcccaactgcgtgagcagcgtgtacctgtactacgaccccgactacagcttcctgagcctgggcgtgtacagcgccctgagagagatcgccttcaccagacagctgcacgagaagaccagccagctgagctactactacatgggcttctacatccacagctgccccaagatgaagtacaagggccagtacagacccagcgacctgctgtgccccgagacctacgtgtgggtgcccatcgagcagtgcctgcccagcctggagaacagcaagtactgcagattcaaccaggaccccgaggccgtggacgaggacagaagcaccgagcccgacagactgcaggtgttccacaagagagccatcatgccctacggcgtgtacaagaagcagcagaaggaccccagcgaggaggccgccgtgctgcagtacgccagcctggtgggccagaagtgcagcgagagaatgctgctgttcagaaactag

SEQ ID NO: 10720 - DNA, 1557 bp, synthetic construct
  source 1..1557: mol_type = other DNA; note = Synthetic coding sequence
atggccttctgggccggcggcagccccagcgtggtggactacttccccagcgaggacttctacagatgcggctactgcaagaacgagagcggcagcagaagcaacggcatgtgggcccacagcatgaccgtgcaggactaccaggacctgatcgacagaggctggagaagaagcggcaagtacgtgtacaagcccgtgatgaaccagacctgctgcccccagtacaccatcagatgcagacccctgcagttccagcccagcaagagccacaagaaggtgctgaagaagatgctgaagttcctggccaagggcgaggtgcccaagggcagctgcgaggacgagcccatggacagcaccatggacgacgccgtggccggcgacttcgccctgatcaacaagctggacatccagtgcgacctgaagaccctgagcgacgacatcaaggagagcctggagagcgagggcaagaacagcaagaaggaggagccccaggagctgctgcagagccaggacttcgtgggcgagaagctgggcagcggcgagcccagccacagcgtgaaggtgcacaccgtgcccaagcccggcaagggcgccgacctgagcaagcccccctgcagaaaggccaaggagatcagaaaggagagaaagagactgaagctgatgcagcagaaccccgccggcgagctggagggcttccaggcccagggccacccccccagcctgttcccccccaaggccaagagcaaccagcccaagagcctggaggacctgatcttcgagagcctgcccgagaacgccagccacaagctggaggtgagactggtgcccgtgagcttcgaggaccccgagttcaagagcagcttcagccagagcttcagcctgtacgtgaagtaccaggtggccatccaccaggacccccccgacgagtgcggcaagaccgagttcaccagattcctgtgcagcagccccctggaggccgagaccccccccaacggccccgactgcggctacggcagcttccaccagcagtactggctggacggcaagatcatcgccgtgggcgtgatcgacatcctgcccaactgcgtgagcagcgtgtacctgtactacgaccccgactacagcttcctgagcctgggcgtgtacagcgccctgagagagatcgccttcaccagacagctgcacgagaagaccagccagctgagctactactacatgggcttctacatccacagctgccccaagatgaagtacaagggccagtacagacccagcgacctgctgtgccccgagacctacgtgtgggtgcccatcgagcagtgcctgcccagcctggagaacagcaagtactgcagattcaaccaggaccccgaggccgtggacgaggacagaagcaccgagcccgacagactgcaggtgttccacaagagagccatcatgccctacggcgtgtacaagaagcagcagaaggaccccagcgaggaggccgccgtgctgcagtacgccagcctggtgggccagaagtgcagcgagagaatgctgctgttcagaaactag

SEQ ID NO: 10721 - DNA, 3003 bp, synthetic construct
  source 1..3003: mol_type = other DNA; note = Synthetic coding sequence
atggccgagagaaagcccaacggcggcagcggcggcgccagcaccagcagcagcggcaccaacctgctgttcagcagcagcgccaccgagttcagcttcaacgtgcccttcatccccgtgacccaggccagcgccagccccgccagcctgctgctgcccggcgaggacagcaccgacgtgggcgaggaggacagcttcctgggccagaccagcatccacaccagcgccccccagaccttcagctacttcagccaggtgagcagcagcagcgaccccttcggcaacatcggccagagccccctgaccaccgccgccaccagcgtgggccagagcggcttccccaagcccctgaccgccctgcccttcaccaccggcagccaggacgtgagcaacgccttcagccccagcatcagcaaggcccagcccggcgccccccccagcagcctgatgggcatcaacagctacctgcccagccagcccagcagcctgccccccagctacttcggcaaccagccccagggcatcccccagcccggctacaacccctacagacacacccccggcagcagcagagccaacccctacatcgcccccccccagctgcagcagtgccagacccccggcccccccgcccaccccccccccagcggcccccccgtgcagatgtaccagatgccccccggcagcctgccccccgtgcccagcagcgtgcagagccccgcccagcagcaggtgcccgccagacccggcgcccccagcgtgcaggtgcccagccccttcctgctgcagaaccagtacgagcccgtgcagccccactggttctactgcaaggaggtggagtacaagcagctgtggatgcccttcagcgtgttcgacagcctgaacctggaggagatctacaacagcgtgcagcccgaccccgagagcgtggtgctgggcaccgacggcggcagatacgacgtgtacctgtacgacagaatcagaaaggccgcctactgggaggaggagcccgccgaggtgagaagatgcacctggttctacaagggcgacaccgacagcagattcatcccctacaccgaggagttcagcgagaagctggaggccgagtacaagaaggccgtgaccaccaaccagtggcacagaagactggagttccccagcggcgagaccatcgtgatgcacaaccccaaggtgatcgtgcagttccagcccagcagcgtgcccgacgagtggggcaccacccaggacggccagaccagacccagagtggtgaagagaggcatcgacgacaacctggacgagatccccgacggcgagatgccccaggtggaccacctggtgttcgtggtgcacggcatcggccccgtgtgcgacctgagattcagaagcatcatcgagtgcgtggacgacttcagagtggtgagcctgaagctgctgagaacccacttcaagaagagcctggacgacggcaaggtgagcagagtggagttcctgcccgtgcactggcacagcagcctgggcggcgacgccaccggcgtggacagaaacatcaagaagatcaccctgcccagcatcggcagattcagacacttcaccaacgagaccctgctggacatcctgttctacaacagccccacctactgccagaccatcgtggagaaggtgggcatggagatcaaccacctgcacgccctgttcatgagcagaaaccccgacttcaagggcggcgtgagcgtggccggccacagcctgggcagcctgatcctgttcgacatcctgagcaaccagaaggacctgaacctgagcaagtgccccggccccctggccgtggccaacggcgtggtgaagcagctgcacttccaggagaagcagatgcccgaggagcccaagctgaccctggacgagagctacgacctggtggtggagaacaaggaggtgctgaccctgcaggagaccctggaggccctgagcctgagcgagtacttcagcaccttcgagaaggagaagatcgacatggagagcctgctgatgtgcaccgtggacgacctgaaggagatgggcatccccctgggccccagaaagaagatcgccaacttcgtggagcacaaggccgccaagctgaagaaggccgccagcgagaagaaggccgtggccgccaccagcaccaagggccaggagcagagcgcccagaagaccaaggacatggccagcctgcccagcgagagcaacgagcccaagagaaagctgcccgtgggcgcctgcgtgagcagcgtgtgcgtgaactacgagagcttcgaggtgggcgccggccaggtgagcgtggcctacaacagcctggacttcgagcccgagatcttcttcgccctgggcagccccatcgccatgttcctgaccatcagaggcgtggacagaatcgacgagaactacagcctgcccacctgcaagggcttcttcaacatctaccaccccctggaccccgtggcctacagactggagcccatgatcgtgcccgacctggacctgaaggccgtgctgatcccccaccacaagggcagaaagagactgcacctggagctgaaggagagcctgagcagaatgggcagcgacctgaagcagggcttcatcagcagcctgaagagcgcctggcagaccctgaacgagttcgccagagcccacaccagcagcacccagctgcaggaggagctggagaaggtggccaaccagatcaaggaggaggaggagaagcaggtggtggaggccgagaaggtggtggagagccccgacttcagcaaggacgaggactacctgggcaaggtgggcatgctgaacggcggcagaagaatcgactacgtgctgcaggagaagcccatcgagagcttcaacgagtacctgttcgccctgcagagccacctgtgctactgggagagcgaggacaccgccctgctgctgctgaaggagatctacagaaccatgaacatcagccccgagcagccccagcactag

SEQ ID NO: 10722 - DNA, 495 bp, synthetic construct
  source 1..495: mol_type = other DNA; note = Synthetic coding sequence
atggtgaacagcgtggtgttcttcgacatcaccgtggacggcaagcccctgggcagaatcagcatcaagctgttcgccgacaagatcctgaagaccgccgagaacttcagagccctgagcaccggcgagaagggcttcagatacaagggcagctgcttccacagaatcatccccggcttcatgtgccagggcggcgacttcaccagacacaacggcaccggcgacaagagcatctacggcgagaagttcgacgacgagaacctgatcagaaagcacaccggcagcggcatcctgagcatggccaacgccggccccaacaccaacggcagccagttcttcatctgcgccgccaagaccgagtggctggacggcaagcacgtggccttcggcaaggtgaaggagagagtgaacatcgtggaggccatggagcacttcggctacagaaacagcaagaccagcaagaagatcaccatcgccgactgcggccagttctag

SEQ ID NO: 10723 - DNA, 426 bp, synthetic construct
  source 1..426: mol_type = other DNA; note = Synthetic coding sequence
atgaagatcctggacgtgggctgcggcggcggcctgctgaccgagcccggcggcagcctgttcatcaccaccatcaacaagacccagctgagctacgccctgggcatcgtgttcagcgagcagatcgccagcatcgtgcccaagggcacccacacctgggagaagttcgtgagccccgagaccctggagagcatcctggagagcaacggcctgagcgtgcagaccgtggtgggcatgctgtacaaccccttcagcggctactggcactggagcgagaacaccagcctgaactacgccgcctacgccgtgaagagcagagtgcaggagcaccccgccagcgccgagttcgtgctgaagggcgagaccgaggagctgcaggccaacgcctgcaccaaccccgccgtgcacgagaagctgaagaagtag

SEQ ID NO: 10724 - DNA, 426 bp, synthetic construct; identical to SEQ ID NO: 10723
  source 1..426: mol_type = other DNA; note = Synthetic coding sequence

SEQ ID NO: 10725 - DNA, 2157 bp, synthetic construct
  source 1..2157: mol_type = other DNA; note = Synthetic coding sequence
atgctgatgaccctggagatgaccgagctgaccgacccccaccacaccatgggcgactacaaggtggcccacccccaggacccccaccaccccagcgagaagcccgtgatccactgccacaagtgcggcgagccctgcaagggcgaggtgctgagagtgcagaccaagcacttccacatcaagtgcttcacctgcaaggtgtgcggctgcgacctggcccagggcggcttcttcatcaagaacggcgagtacctgtgcaccctggactaccagagaatgtacggcaccagatgccacggctgcggcgagttcgtggagggcgaggtggtgaccgccctgggcaagacctaccaccccaactgcttcgcctgcaccatctgcaagagacccttcccccccggcgacagagtgaccttcaacggcagagactgcctgtgccagctgtgcgcccagcccatgagcagcagccccaaggagaccaccttcagcagcaactgcgccggctgcggcagagacatcaagaacggccaggccctgctggccctggacaagcagtggcacctgggctgcttcaagtgcaagagctgcggcaaggtgctgaccggcgagtacatcagcaaggacggcgccccctactgcgagaaggactaccagggcctgttcggcgtgaagtgcgaggcctgccaccagttcatcaccggcaaggtgctggaggccggcgacaagcactaccaccccagctgcgccagatgcagcagatgcaaccagatgttcaccgagggcgaggagatgtacctgcagggcagcaccgtgtggcaccccgactgcaagcagagcaccaagaccgaggagaagctgagacccaccagaaccagcagcgagagcatctacagcagacccggcagcagcatccccggcagccccggccacaccatctacgccaaggtggacaacgagatcctggactacaaggacctggccgccatccccaaggtgaaggccatctacgacatcgagagacccgacctgatcacctacgagcccttctacaccagcggctacgacgacaagcaggagagacagagcctgggcgagagccccagaaccctgagccccacccccagcgccgagggctaccaggacgtgagagacagaatgatccacagaagcaccagccagggcagcatcaacagccccgtgtacagcagacacagctacacccccaccaccagcagaagcccccagcacttccacagacccggcaacgagcccagcagcggcagaaacagccccctgccctacagacccgacagcagacccctgacccccacctacgcccaggcccccaagcacttccacgtgcccgaccagggcatcaacatctacagaaagccccccatctacaagcagcacgccgccctggccgcccagagcaagagcagcgaggacatcatcaagttcagcaagttccccgccgcccaggcccccgaccccagcgagacccccaagatcgagaccgaccactggcccggcccccccagcttcgccgtggtgggccccgacatgaagagaagaagcagcggcagagaggaggacgacgaggagctgctgagaagaagacagctgcaggaggagcagctgatgaagctgaacagcggcctgggccagctgatcctgaaggaggagatggagaaggagagcagagagagaagcagcctgctggccagcagatacgacagccccatcaacagcgccagccacatccccagcagcaagaccgccagcctgcccggctacggcagaaacggcctgcacagacccgtgagcaccgacttcgcccagtacaacagctacggcgacgtgagcggcggcgtgagagactaccagaccctgcccgacggccacatgcccgccatgagaatggacagaggcgtgagcatgcccaacatgctggagcccaagatcttcccctacgagatgctgatggtgaccaacagaggcagaaacaagatcctgagagaggtggacagaaccagactggagagacacctggcccccgaggtgttcagagagatcttcggcatgagcatccaggagttcgacagactgcccctgtggagaagaaacgacatgaagaagaaggccaagctgttctag

SEQ ID NO: 10726 - DNA, 1593 bp, synthetic construct
  source 1..1593: mol_type = other DNA; note = Synthetic coding sequence
atgttcaccgagggcgaggagatgtacctgcagggcagcaccgtgtggcaccccgactgcaagcagagcaccaagaccgaggagaagctgagactgcccaacatcagaagaagcagcagcgacttcttctacagcaagagcctgatcagaagaaccggcagaagccccagcctgcagcccaccagaaccagcagcgagagcatctacagcagacccggcagcagcatccccggcagccccggccacaccatctacgccaaggtggacaacgagatcctggactacaaggacctggccgccatccccaaggtgaaggccatctacgacatcgagagacccgacctgatcacctacgagcccttctacaccagcggctacgacgacaagcaggagagacagagcctgggcgagagccccagaaccctgagccccacccccagcgccgagggctaccaggacgtgagagacagaatgatccacagaagcaccagccagggcagcatcaacagccccgtgtacagcagacacagctacacccccaccaccagcagaagcccccagcacttccacagacccgagctgctgagccccggcgtgcagagactgagctacctgagaaccagcagcctgagccccacccacagcgacagcagacccaacccccccttcagacaccacttcatcccccacatcaagggcaacgagcccagcagcggcagaaacagccccctgccctacagacccgacagcagacccctgacccccacctacgcccaggcccccaagcacttccacgtgcccgaccagggcatcaacatctacagaaagccccccatctacaagcagcacgccgccctggccgcccagagcaagagcagcgaggacatcatcaagttcagcaagttccccgccgcccaggcccccgaccccagcgagacccccaagatcgagaccgaccactggcccggcccccccagcttcgccgtggtgggccccgacatgaagagaagaagcagcggcagagaggaggacgacgaggagctgctgagaagaagacagctgcaggaggagcagctgatgaagctgaacagcggcctgggccagctgatcctgaaggaggagatggagaaggagagcagagagagaagcagcctgctggccagcagatacgacagccccatcaacagcgccagccacatccccagcagcaagaccgccagcctgcccggctacggcagaaacggcctgcacagacccgtgagcaccgacttcgcccagtacaacagctacggcgacgtgagcggcggcgtgagagactaccagaccctgcccgacggccacatgcccgccatgagaatggacagaggcgtgagcatgcccaacatgctggagcccaagatcttcccctacgagatgctgatggtgaccaacagaggcagaaacaagatcctgagagaggtggacagaaccagactggagagacacctggcccccgaggtgttcagagagatcttcggcatgagcatccaggagttcgacagactgcccctgtggagaagaaacgacatgaagaagaaggccaagctgttctag

SEQ ID NO: 10727 - DNA, 2109 bp, synthetic construct
  source 1..2109: mol_type = other DNA; note = Synthetic coding sequence
atggtgaaggagaaggtggcccacccccaggacccccaccaccccagcgagaagcccgtgatccactgccacaagtgcggcgagccctgcaagggcgaggtgctgagagtgcagaccaagcacttccacatcaagtgcttcacctgcaaggtgtgcggctgcgacctggcccagggcggcttcttcatcaagaacggcgagtacctgtgcaccctggactaccagagaatgtacggcaccagatgccacggctgcggcgagttcgtggagggcgaggtggtgaccgccctgggcaagacctaccaccccaactgcttcgcctgcaccatctgcaagagacccttcccccccggcgacagagtgaccttcaacggcagagactgcctgtgccagctgtgcgcccagcccatgagcagcagccccaaggagaccaccttcagcagcaactgcgccggctgcggcagagacatcaagaacggccaggccctgctggccctggacaagcagtggcacctgggctgcttcaagtgcaagagctgcggcaaggtgctgaccggcgagtacatcagcaaggacggcgccccctactgcgagaaggactaccagggcctgttcggcgtgaagtgcgaggcctgccaccagttcatcaccggcaaggtgctggaggccggcgacaagcactaccaccccagctgcgccagatgcagcagatgcaaccagatgttcaccgagggcgaggagatgtacctgcagggcagcaccgtgtggcaccccgactgcaagcagagcaccaagaccgaggagaagctgagacccaccagaaccagcagcgagagcatctacagcagacccggcagcagcatccccggcagccccggccacaccatctacgccaaggtggacaacgagatcctggactacaaggacctggccgccatccccaaggtgaaggccatctacgacatcgagagacccgacctgatcacctacgagcccttctacaccagcggctacgacgacaagcaggagagacagagcctgggcgagagccccagaaccctgagccccacccccagcgccgagggctaccaggacgtgagagacagaatgatccacagaagcaccagccagggcagcatcaacagccccgtgtacagcagacacagctacacccccaccaccagcagaagcccccagcacttccacagacccggcaacgagcccagcagcggcagaaacagccccctgccctacagacccgacagcagacccctgacccccacctacgcccaggcccccaagcacttccacgtgcccgaccagggcatcaacatctacagaaagccccccatctacaagcagcacgccgccctggccgcccagagcaagagcagcgaggacatcatcaagttcagcaagttccccgccgcccaggcccccgaccccagcgagacccccaagatcgagaccgaccactggcccggcccccccagcttcgccgtggtgggccccgacatgaagagaagaagcagcggcagagaggaggacgacgaggagctgctgagaagaagacagctgcaggaggagcagctgatgaagctgaacagcggcctgggccagctgatcctgaaggaggagatggagaaggagagcagagagagaagcagcctgctggccagcagatacgacagccccatcaacagcgccagccacatccccagcagcaagaccgccagcctgcccggctacggcagaaacggcctgcacagacccgtgagcaccgacttcgcccagtacaacagctacggcgacgtgagcggcggcgtgagagactaccagaccctgcccgacggccacatgcccgccatgagaatggacagaggcgtgagcatgcccaacatgctggagcccaagatcttcccctacgagatgctgatggtgaccaacagaggcagaaacaagatcctgagagaggtggacagaaccagactggagagacacctggcccccgaggtgttcagagagatcttcggcatgagcatccaggagttcgacagactgcccctgtggagaagaaacgacatgaagaagaaggccaagctgttctag

SEQ ID NO: 10728 - DNA, 1206 bp, synthetic construct
  source 1..1206: mol_type = other DNA; note = Synthetic coding sequence
atgttcaccgagggcgaggagatgtacctgcagggcagcaccgtgtggcaccccgactgcaagcagagcaccaagaccgaggagaagctgagagccaaggtggacaacgagatcctggactacaaggacctggccgccatccccaaggtgaaggccatctacgacatcgagagacccgacctgatcacctacgagcccttctacaccagcggctacgacgacaagcaggagagacagagcctgggcgagagccccagaaccctgagccccacccccagcgccgagggctaccaggacgtgagagacagaatgatccacagaagcaccagccagggcagcatcaacagccccgtgtacagcagacacagctacacccccaccaccagcagaagcccccagcacttccacagacccgaccagggcatcaacatctacagaaagccccccatctacaagcagcacgccgccctggccgcccagagcaagagcagcgaggacatcatcaagttcagcaagttccccgccgcccaggcccccgaccccagcgagacccccaagatcgagaccgaccactggcccggcccccccagcttcgccgtggtgggccccgacatgaagagaagaagcagcggcagagaggaggacgacgaggagctgctgagaagaagacagctgcaggaggagcagctgatgaagctgaacagcggcctgggccagctgatcctgaaggaggagatggagaaggagagcagagagagaagcagcctgctggccagcagatacgacagccccatcaacagcgccagccacatccccagcagcaagaccgccagcctgcccggctacggcagaaacggcctgcacagacccgtgagcaccgacttcgcccagtacaacagctacggcgacgtgagcggcggcgtgagagactaccagaccctgcccgacggccacatgcccgccatgagaatggacagaggcgtgagcatgcccaacatgctggagcccaagatcttcccctacgagatgctgatggtgaccaacagaggcagaaacaagatcctgagagaggtggacagaaccagactggagagacacctggcccccgaggtgttcagagagatcttcggcatgagcatccaggagttcgacagactgcccctgtggagaagaaacgacatgaagaagaaggccaagctgttctag

SEQ ID NO: 10729 - DNA, 1968 bp, synthetic construct
  source 1..1968: mol_type = other DNA; note = Synthetic coding sequence
atggtgaaggagaaggtggcccacccccaggacccccaccaccccagcgagaagcccgtgatccactgccacaagtgcggcgagccctgcaagggcgaggtgctgagagtgcagaccaagcacttccacatcaagtgcttcacctgcaaggtgtgcggctgcgacctggcccagggcggcttcttcatcaagaacggcgagtacctgtgcaccctggactaccagagaatgtacggcaccagatgccacggctgcggcgagttcgtggagggcgaggtggtgaccgccctgggcaagacctaccaccccaactgcttcgcctgcaccatctgcaagagacccttcccccccggcgacagagtgaccttcaacggcagagactgcctgtgccagctgtgcgcccagcccatgagcagcagccccaaggagaccaccttcagcagcaactgcgccggctgcggcagagacatcaagaacggccaggccctgctggccctggacaagcagtggcacctgggctgcttcaagtgcaagagctgcggcaaggtgctgaccggcgagtacatcagcaaggacggcgccccctactgcgagaaggactaccagggcctgttcggcgtgaagtgcgaggcctgccaccagttcatcaccggcaaggtgctggaggccggcgacaagcactaccaccccagctgcgccagatgcagcagatgcaaccagatgttcaccgagggcgaggagatgtacctgcagggcagcaccgtgtggcaccccgactgcaagcagagcaccaagaccgaggagaagctgagacccaccagaaccagcagcgagagcatctacagcagacccggcagcagcatccccggcagccccggccacaccatctacgccaaggtggacaacgagatcctggactacaaggacctggccgccatccccaaggtgaaggccatctacgacatcgagagacccgacctgatcacctacgagcccttctacaccagcggctacgacgacaagcaggagagacagagcctgggcgagagccccagaaccctgagccccacccccagcgccgagggctaccaggacgtgagagacagaatgatccacagaagcaccagccagggcagcatcaacagccccgtgtacagcagacacagctacacccccaccaccagcagaagcccccagcacttccacagacccggcaacgagcccagcagcggcagaaacagccccctgccctacagacccgacagcagacccctgacccccacctacgcccaggcccccaagcacttccacgtgcccgaccagggcatcaacatctacagaaagccccccatctacaagcagcacggccccgacatgaagagaagaagcagcggcagagaggaggacgacgaggagctgctgagaagaagacagctgcaggaggagcagctgatgaagctgaacagcggcctgggccagctgatcctgaaggaggagatggagaaggagagcagagagagaagcagcctgctggccagcagatacgacagccccatcaacagcgccagccacatccccagcagcaagaccgccagcctgcccggctacggcagaaacggcctgcacagacccgtgagcaccgacttcgcccagtacaacagctacggcgacgtgagcggcggcgtgagagacttccagaccctgcccgacggccacatgcccgccatgagaatggacagaggcgtgagcatgcccaacatgctggagcccaagatcttcccctacgagatgctgatggtgaccaacagaggcagaaacaagatcctgagagaggtggacagaaccagactggagagacacctggcccccgaggtgttcagagagatcttcggcatgagcatccaggagttcgacagactgcccctgtggagaagaaacgacatgaagaagaaggccaagctgttctag

SEQ ID NO: 10730 - DNA, 2541 bp, synthetic construct
  source 1..2541: mol_type = other DNA; note = Synthetic coding sequence
atgcccgccttcctgggcctgaagtgcctgggcaagctgtgcagcagcgagaagagcaaggtgaccagcagcgagagaaccagcgccagaggcagcaacagaaagagactgatcgtggaggacagaagagtgagcggcaccagcttcaccgcccacagaagagccaccatcacccacctgctgtacctgtgccccaaggactactgccccagaggcagagtgtgcaacagcgtggaccccttcgtggcccacccccaggacccccaccaccccagcgagaagcccgtgatccactgccacaagtgcggcgagccctgcaagggcgaggtgctgagagtgcagaccaagcacttccacatcaagtgcttcacctgcaaggtgtgcggctgcgacctggcccagggcggcttcttcatcaagaacggcgagtacctgtgcaccctggactaccagagaatgtacggcaccagatgccacggctgcggcgagttcgtggagggcgaggtggtgaccgccctgggcaagacctaccaccccaactgcttcgcctgcaccatctgcaagagacccttcccccccggcgacagagtgaccttcaacggcagagactgcctgtgccagctgtgcgcccagcccatgagcagcagccccaaggagaccaccttcagcagcaactgcgccggctgcggcagagacatcaagaacggccaggccctgctggccctggacaagcagtggcacctgggctgcttcaagtgcaagagctgcggcaaggtgctgaccggcgagtacatcagcaaggacggcgccccctactgcgagaaggactaccagggcctgttcggcgtgaagtgcgaggcctgccaccagttcatcaccggcaaggtgctggaggccggcgacaagcactaccaccccagctgcgccagatgcagcagatgcaaccagatgttcaccgagggcgaggagatgtacctgcagggcagcaccgtgtggcaccccgactgcaagcagagcaccaagaccgaggagaagctgagactgcccaacatcagaagaagcagcagcgacttcttctacagcaagagcctgatcagaagaaccggcagaagccccagcctgcagcccaccagaaccagcagcgagagcatctacagcagacccggcagcagcatccccggcagccccggccacaccatctacgccaaggtggacaacgagatcctggactacaaggacctggccgccatccccaaggtgaaggccatctacgacatcgagagacccgacctgatcacctacgagcccttctacaccagcggctacgacgacaagcaggagagacagagcctgggcgagagccccagaaccctgagccccacccccagcgccgagggctaccaggacgtgagagacagaatgatccacagaagcaccagccagggcagcatcaacagccccgtgtacagcagacacagctacacccccaccaccagcagaagcccccagcacttccacagacccgagctgctgagccccggcgtgcagagactgagctacctgagaaccagcagcctgagccccacccacagcgacagcagacccaacccccccttcagacaccacttcatcccccacatcaagggcaacgagcccagcagcggcagaaacagccccctgccctacagacccgacagcagacccctgacccccacctacgcccaggcccccaagcacttccacgtgcccgaccagggcatcaacatctacagaaagccccccatctacaagcagcacgccgccctggccgcccagagcaagagcagcgaggacatcatcaagttcagcaagttccccgccgcccaggcccccgaccccagcgagacccccaagatcgagaccgaccactggcccggcccccccagcttcgccgtggtgggccccgacatgaagagaagaagcagcggcagagaggaggacgacgaggagctgctgagaagaagacagctgcaggaggagcagctgatgaagctgaacagcggcctgggccagctgatcctgaaggaggagatggagaaggagagcagagagagaagcagcctgctggccagcagatacgacagccccatcaacagcgccagccacatccccagcagcaagaccgccagcctgcccggctacggcagaaacggcctgcacagacccgtgagcaccgacttcgcccagtacaacagctacggcgacgtgagcggcggcgtgagagagtaccagaccctgcccgacggccacatgcccgccatgagaatggacagaggcgtgagcatgcccaacatgctggagcccaagatcttcccctacgagatgctgatggtgaccaacagaggcagaaacaagatcctgagagaggtggacagaaccagactggagagacacctggcccccgaggtgttcagagagatcttcggcatgagcatccaggagttcgacagactgcccctgtggagaagaaacgacatgaagaagaaggccaagctgttctag

SEQ ID NO: 10731 - DNA, 2109 bp, synthetic construct
  source 1..2109: mol_type = other DNA; note = Synthetic coding sequence
atggtgcccgaccccgtggcccacccccaggacccccaccaccccagcgagaagcccgtgatccactgccacaagtgcggcgagccctgcaagggcgaggtgctgagagtgcagaccaagcacttccacatcaagtgcttcacctgcaaggtgtgcggctgcgacctggcccagggcggcttcttcatcaagaacggcgagtacctgtgcaccctggactaccagagaatgtacggcaccagatgccacggctgcggcgagttcgtggagggcgaggtggtgaccgccctgggcaagacctaccaccccaactgcttcgcctgcaccatctgcaagagacccttcccccccggcgacagagtgaccttcaacggcagagactgcctgtgccagctgtgcgcccagcccatgagcagcagccccaaggagaccaccttcagcagcaactgcgccggctgcggcagagacatcaagaacggccaggccctgctggccctggacaagcagtggcacctgggctgcttcaagtgcaagagctgcggcaaggtgctgaccggcgagtacatcagcaaggacggcgccccctactgcgagaaggactaccagggcctgttcggcgtgaagtgcgaggcctgccaccagttcatcaccggcaaggtgctggaggccggcgacaagcactaccaccccagctgcgccagatgcagcagatgcaaccagatgttcaccgagggcgaggagatgtacctgcagggcagcaccgtgtggcaccccgactgcaagcagagcaccaagaccgaggagaagctgagacccaccagaaccagcagcgagagcatctacagcagacccggcagcagcatccccggcagccccggccacaccatctacgccaaggtggacaacgagatcctggactacaaggacctggccgccatccccaaggtgaaggccatctacgacatcgagagacccgacctgatcacctacgagcccttctacaccagcggctacgacgacaagcaggagagacagagcctgggcgagagccccagaaccctgagccccacccccagcgccgagggctaccaggacgtgagagacagaatgatccacagaagcaccagccagggcagcatcaacagccccgtgtacagcagacacagctacacccccaccaccagcagaagcccccagcacttccacagacccggcaacgagcccagcagcggcagaaacagccccctgccctacagacccgacagcagacccctgacccccacctacgcccaggcccccaagcacttccacgtgcccgaccagggcatcaacatctacagaaagccccccatctacaagcagcacgccgccctggccgcccagagcaagagcagcgaggacatcatcaagttcagcaagttccccgccgcccaggcccccgaccccagcgagacccccaagatcgagaccgaccactggcccggcccccccagcttcgccgtggtgggccccgacatgaagagaagaagcagcggcagagaggaggacgacgaggagctgctgagaagaagacagctgcaggaggagcagctgatgaagctgaacagcggcctgggccagctgatcctgaaggaggagatggagaaggagagcagagagagaagcagcctgctggccagcagatacgacagccccatcaacagcgccagccacatccccagcagcaagaccgccagcctgcccggctacggcagaaacggcctgcacagacccgtgagcaccgacttcgcccagtacaacagctacggcgacgtgagcggcggcgtgagagagtaccagaccctgcccgacggccacatgcccgccatgagaatggacagaggcgtgagcatgcccaacatgctggagcccaagatcttcccctacgagatgctgatggtgaccaacagaggcagaaacaagatcctgagagaggtggacagaaccagactggagagacacctggcccccgaggtgttcagagagatcttcggcatgagcatccaggagttcgacagactgcccctgtggagaagaaacgacatgaagaagaaggccaagctgttctag

SEQ ID NO: 10732 - DNA, 1368 bp, synthetic construct
  source 1..1368: mol_type = other DNA; note = Synthetic coding sequence
atgttcaccgagggcgaggagatgtacctgcagggcagcaccgtgtggcaccccgactgcaagcagagcaccaagaccgaggagaagctgagactgcccaacatcagaagaagcagcagcgacttcttctacagcaagagcctgatcagaagaaccggcagaagccccagcctgcagcccaccagaaccagcagcgagagcatctacagcagacccggcagcagcatccccggcagccccggccacaccatctacgccaaggtggacaacgagatcctggactacaaggacctggccgccatccccaaggtgaaggccatctacgacatcgagagacccgacctgatcacctacgagcccttctacaccagcggctacgacgacaagcaggagagacagagcctgggcgagagccccagaaccctgagccccacccccagcgccgagggctaccaggacgtgagagacagaatgatccacagaagcaccagccagggcagcatcaacagccccgtgtacagcagacacagctacacccccaccaccagcagaagcccccagcacttccacagacccgaccagggcatcaacatctacagaaagccccccatctacaagcagcacgccgccctggccgcccagagcaagagcagcgaggacatcatcaagttcagcaagttccccgccgcccaggcccccgaccccagcgagacccccaagatcgagaccgaccactggcccggcccccccagcttcgccgtggtgggccccgacatgaagagaagaagcagcggcagagaggaggacgacgaggagctgctgagaagaagacagctgcaggaggagcagctgatgaagctgaacagcggcctgggccagctgatcctgaaggaggagatggagaaggagagcagagagagaagcagcctgctggccagcagatacgacagccccatcaacagcgccagccacatccccagcagcaagaccgccagcctgcccggctacggcagaaacggcctgcacagacccgtgagcaccgacttcgcccagtacaacagctacggcgacgtgagcggcggcgtgagagacttccagaccctgcccgacggccacatgcccgccatgagaatggacagaggcgtgagcatgcccaacatgctggagcccaagatcttcccctacgagatgctgatggtgaccaacagaggcagaaacaagatcctgagagaggtggacagaaccagactggagagacacctggcccccgaggtgttcagagagatcttcggcatgagcatccaggagttcgacagactgcccctgtggagaagaaacgacatgaagaagaaggccaagctgttctag

SEQ ID NO: 10733 - DNA, 2241 bp, synthetic construct
  source 1..2241: mol_type = other DNA; note = Synthetic coding sequence
atgctgatgaccctggagatgaccgagctgaccgacccccaccacaccatgggcgactacaaggtggcccacccccaggacccccaccaccccagcgagaagcccgtgatccactgccacaagtgcggcgagccctgcaagggcgaggtgctgagagtgcagaccaagcacttccacatcaagtgcttcacctgcaaggtgtgcggctgcgacctggcccagggcggcttcttcatcaagaacggcgagtacctgtgcaccctggactaccagagaatgtacggcaccagatgccacggctgcggcgagttcgtggagggcgaggtggtgaccgccctgggcaagacctaccaccccaactgcttcgcctgcaccatctgcaagagacccttcccccccggcgacagagtgaccttcaacggcagagactgcctgtgccagctgtgcgcccagcccatgagcagcagccccaaggagaccaccttcagcagcaactgcgccggctgcggcagagacatcaagaacggccaggccctgctggccctggacaagcagtggcacctgggctgcttcaagtgcaagagctgcggcaaggtgctgaccggcgagtacatcagcaaggacggcgccccctactgcgagaaggactaccagggcctgttcggcgtgaagtgcgaggcctgccaccagttcatcaccggcaaggtgctggaggccggcgacaagcactaccaccccagctgcgccagatgcagcagatgcaaccagatgttcaccgagggcgaggagatgtacctgcagggcagcaccgtgtggcaccccgactgcaagcagagcaccaagaccgaggagaagctgagactgcccaacatcagaagaagcagcagcgacttcttctacagcaagagcctgatcagaagaaccggcagaagccccagcctgcagcccaccagaaccagcagcgagagcatctacagcagacccggcagcagcatccccggcagccccggccacaccatctacgccaaggtggacaacgagatcctggactacaaggacctggccgccatccccaaggtgaaggccatctacgacatcgagagacccgacctgatcacctacgagcccttctacaccagcggctacgacgacaagcaggagagacagagcctgggcgagagccccagaaccctgagccccacccccagcgccgagggctaccaggacgtgagagacagaatgatccacagaagcaccagccagggcagcatcaacagccccgtgtacagcagacacagctacacccccaccaccagcagaagcccccagcacttccacagacccggcaacgagcccagcagcggcagaaacagccccctgccctacagacccgacagcagacccctgacccccacctacgcccaggcccccaagcacttccacgtgcccgaccagggcatcaacatctacagaaagccccccatctacaagcagcacgccgccctggccgcccagagcaagagcagcgaggacatcatcaagttcagcaagttccccgccgcccaggcccccgaccccagcgagacccccaagatcgagaccgaccactggcccggcccccccagcttcgccgtggtgggccccgacatgaagagaagaagcagcggcagagaggaggacgacgaggagctgctgagaagaagacagctgcaggaggagcagctgatgaagctgaacagcggcctgggccagctgatcctgaaggaggagatggagaaggagagcagagagagaagcagcctgctggccagcagatacgacagccccatcaacagcgccagccacatccccagcagcaagaccgccagcctgcccggctacggcagaaacggcctgcacagacccgtgagcaccgacttcgcccagtacaacagctacggcgacgtgagcggcggcgtgagagacttccagaccctgcccgacggccacatgcccgccatgagaatggacagaggcgtgagcatgcccaacatgctggagcccaagatcttcccctacgagatgctgatggtgaccaacagaggcagaaacaagatcctgagagaggtggacagaaccagactggagagacacctggcccccgaggtgttcagagagatcttcggcatgagcatccaggagttcgacagactgcccctgtggagaagaaacgacatgaagaagaaggccaagctgttctag

SEQ ID NO: 10734 - DNA, 915 bp, synthetic construct
  source 1..915: mol_type = other DNA; note = Synthetic coding sequence
atggccgaggccagcgccgccggcgccgacagcggcgccgccgtggccgcccacagattcttctgccacttctgcaagggcgaggtgagccccaagctgcccgagtacatctgccccagatgcgagagcggcttcatcgaggaggtgaccgacgacagcagcttcctgggcggcggcggcagcagaatcgacaacaccaccaccacccacttcgccgagctgtggggccacctggaccacaccatgttcttccaggacttcagacccttcctgagcagcagccccctggaccaggacaacagagccaacgagagaggccaccagacccacaccgacttctggggcgccagaccccccagactgcccctgggcagaagatacagaagcagaggcagcagcagacccgacagaagccccgccatcgagggcatcctgcagcacatcttcgccggcttcttcgccaacagcgccatccccggcagcccccaccccttcagctggagcggcatgctgcacagcaaccccggcgactacgcctggggccagaccggcctggacgccatcgtgacccagctgctgggccagctggagaacaccggccccccccccgccgacaaggagaagatcaccagcctgcccaccgtgaccgtgacccaggagcaggtggacatgggcctggagtgccccgtgtgcaaggaggactacaccgtggaggaggaggtgagacagctgccctgcaaccacttcttccacagcagctgcatcgtgccctggctggagctgcacgacacctgccccgtgtgcagaaagagcctgaacggcgaggacagcaccagacagagccagagcaccgaggccagcgccagcaacagattcagcaacgacagccagctgcacgacagatggaccttctag

SEQ ID NO: 10735 - DNA, 636 bp, synthetic construct
  source 1..636: mol_type = other DNA; note = Synthetic coding sequence
atgagctgcaccatcgagaagatcctgaccgacgccaagaccctgctggagagactgagagagcacgacgccgccgccgagagcctggtggaccagagcgccgccctgcacagaagagtggccgccatgagagaggccggcaccgccctgcccgaccaggtgagacagagataccaggaggacgccagcgacatgaaggacatgagcaagtacaagccccacatcctgctgagccaggagaacacccagatcagagacctgcagcaggagaacagagagctgtggatcagcctggaggagcaccaggacgccctggagctgatcatgagcaagtacagaaagcagatgctgcagctgatggtggccaagaaggccgtggacgccgagcccgtgctgaaggcccaccagagccacagcgccgagatcgagagccagatcgacagaatctgcgagatgggcgaggtgatgagaaaggccgtgcaggtggacgacgaccagttctgcaagatccaggagaagctggcccagctggagctggagaacaaggagctgagagagctgctgagcatcagcagcgagagcctgcaggccagaaaggagaacagcatggacaccgccagccaggccatcaagtag

SEQ ID NO: 10736 - DNA, 2451 bp, synthetic construct
  source 1..2451: mol_type = other DNA; note = Synthetic coding sequence
atggtgctgatgttccagatcagatacatcagccagacccagggcctgcccgccgagtacctgctgagcgccggcaccaagaccaccagattcttcaacagagaccccaacctgggctaccccctgtggagactgaagacccccgaggagcacgagctggagaccggcatcaagagcaaggaggccagaaagtacatcttcaactgcctggacgacatggcccaggtgaacatgagcaccgacctggagggcaccgacatgctggccgagaaggccgacagaagagagtacatcgacctgctgaagaagatgctgaccatcgacgccgacaagagaatcacccccctgaagaccctgaaccaccagttcgtgaccatgacccacctgctggacttcccccacagcaaccacgtgaagagctgcttccagaacatggagatctgcaagagaagagtgcacatgtacgacaccgtgagccagatcaagagccccttcaccacccacgtggcccccaacaccagcaccaacctgaccatgagcttcagcaaccagctgaacaccgtgcacaaccaggccagcgtgctggccagcagcagcaccgccgccgccgccaccctgagcctggccaacagcgacgtgagcctgctgaactaccagagcgccctgtaccccagcagcgccgcccccgtgcccggcgtggcccagcagggcgtgagcctgcagcccggcaccacccagatctgcacccagaccgaccccttccagcagaccttcatcgtgtgcccccccgccttccagaccggcctgcaggccaccaccaagcacagcggcttccccgtgagaatggacaacgccgtgcccatcgtgccccaggcccccgccgcccagcccctgcagatccagagcggcgtgctgacccagggcagctgcacccccctgatggtggccaccctgcacccccaggtggccaccatcaccccccagtacgccgtgcccttcaccctgagctgcgccgccggcagacccgccctggtggagcagaccgccgccgtgctgcaggcctggcccggcggcacccagcagatcctgctgcccagcacctggcagcagctgcccggcgtggccctgcacaacagcgtgcagcccaccgccatgatccccgaggccatgggcagcggccagcagctggccgactggagaaacgcccacagccacggcaaccagtacagcaccatcatgcagcagcccagcctgctgaccaaccacgtgaccctggccaccgcccagcccctgaacgtgggcgtggcccacgtggtgagacagcagcagagcagcagcctgcccagcaagaagaacaagcagagcgcccccgtgagcagcaagagcagcctggacgtgctgcccagccaggtgtacagcctggtgggcagcagccccctgagaaccaccagcagctacaacagcctggtgcccgtgcaggaccagcaccagcccatcatcatccccgacacccccagcccccccgtgagcgtgatcaccatcagaagcgacaccgacgaggaggaggacaacaagtacaagcccagcagcagcggcctgaagcccagaagcaacgtgatcagctacgtgaccgtgaacgacagccccgacagcgacagcagcctgagcagcccctacagcaccgacaccctgagcgccctgagaggcaacagcggcagcgtgctggagggccccggcagagtggtggccgacggcaccggcaccagaaccatcatcgtgccccccctgaagacccagctgggcgactgcaccgtggccacccaggccagcggcctgctgagcaacaagaccaagcccgtggccagcgtgagcggccagagcagcggctgctgcatcacccccaccggctacagagcccagagaggcggcaccagcgccgcccagcccctgaacctgagccagaaccagcagagcagcgccgcccccaccagccaggagagaagcagcaaccccgcccccagaagacagcaggccttcgtggcccccctgagccaggccccctacaccttccagcacggcagccccctgcacagcaccggccacccccacctggcccccgcccccgcccacctgcccagccaggcccacctgtacacctacgccgcccccaccagcgccgccgccctgggcagcaccagcagcatcgcccacctgttcagcccccagggcagcagcagacacgccgccgcctacaccacccaccccagcaccctggtgcaccaggtgcccgtgagcgtgggccccagcctgctgaccagcgccagcgtggcccccgcccagtaccagcaccagttcgccacccagagctacatcggcagcagcagaggcagcaccatctacaccggctaccccctgagccccaccaagatcagccagtacagctacctgtag

SEQ ID NO: 10737 - DNA, 3498 bp, synthetic construct
  source 1..3498: mol_type = other DNA; note = Synthetic coding sequence
atggccagccagctgcaggtgttcagcccccccagcgtgagcagcagcgccttctgcagcgccaagaagctgaagatcgagcccagcggctgggacgtgagcggccagagcagcaacgacaagtactacacccacagcaagaccctgcccgccacccagggccaggccaacagcagccaccaggtggccaacttcaacatccccgcctacgaccagggcctgctgctgcccgcccccgccgtggagcacatcgtggtgaccgccgccgacagcagcggcagcgccgccaccagcaccttccagagcagccagaccctgacccacagaagcaacgtgagcctgctggagccctaccagaagtgcggcctgaagagaaagagcgaggaggtggacagcaacggcagcgtgcagatcatcgaggagcacccccccctgatgctgcagaacagaaccgtggtgggcgccgccgccaccaccaccaccgtgaccaccaagagcagcagcagcagcggcgagggcgactaccagctggtgcagcacgagatcctgtgcagcatgaccaacagctacgaggtgctggagttcctgggcagaggcaccttcggccaggtggccaagtgctggaagagaagcaccaaggagatcgtggccatcaagatcctgaagaaccaccccagctacgccagacagggccagatcgaggtgagcatcctgagcagactgagcagcgagaacgccgacgagtacaacttcgtgagaagctacgagtgcttccagcacaagaaccacacctgcctggtgttcgagatgctggagcagaacctgtacgacttcctgaagcagaacaagttcagccccctgcccctgaagtacatcagacccatcctgcagcaggtggccaccgccctgatgaagctgaagagcctgggcctgatccacgccgacctgaagcccgagaacatcatgctggtggaccccgtgagacagccctacagagtgaaggtgatcgacttcggcagcgccagccacgtgagcaaggccgtgtgcagcacctacctgcagagcagatactacagagcccccgagatcatcctgggcctgcccttctgcgaggccatcgacatgtggagcctgggctgcgtgatcgccgagctgttcctgggctggcccctgtaccccggcgccagcgagtacgaccagatcagatacatcagccagacccagggcctgcccgccgagtacctgctgagcgccggcaccaagaccaccagattcttcaacagagaccccaacctgggctaccccctgtggagactgaagacccccgaggagcacgagctggagaccggcatcaagagcaaggaggccagaaagtacatcttcaactgcctggacgacatggcccaggtgaacatgagcaccgacctggagggcaccgacatgctggccgagaaggccgacagaagagagtacatcgacctgctgaagaagatgctgaccatcgacgccgacaagagaatcacccccctgaagaccctgaaccaccagttcgtgaccatgacccacctgctggacttcccccacagcaaccacgtgaagagctgcttccagaacatggagatctgcaagagaagagtgcacatgtacgacaccgtgagccagatcaagagccccttcaccacccacgtggcccccaacaccagcaccaacctgaccatgagcttcagcaaccagctgaacaccgtgcacaaccaggccagcgtgctggccagcagcagcaccgccgccgccgccaccctgagcctggccaacagcgacgtgagcctgctgaactaccagagcgccctgtaccccagcagcgccgcccccgtgcccggcgtggcccagcagggcgtgagcctgcagcccggcaccacccagatctgcacccagaccgaccccttccagcagaccttcatcgtgtgcccccccgccttccagaccggcctgcaggccaccaccaagcacagcggcttccccgtgagaatggacaacgccgtgcccatcgtgccccaggcccccgccgcccagcccctgcagatccagagcggcgtgctgacccagcaggcctggcccggcggcacccagcagatcctgctgcccagcacctggcagcagctgcccggcgtggccctgcacaacagcgtgcagcccaccgccatgatccccgaggccatgggcagcggccagcagctggccgactggagaaacgcccacagccacggcaaccagtacagcaccatcatgcagcagcccagcctgctgaccaaccacgtgaccctggccaccgcccagcccctgaacgtgggcgtggcccacgtggtgagacagcagcagagcagcagcctgcccagcaagaagaacaagcagagcgcccccgtgagcagcaagagcagcctggacgtgctgcccagccaggtgtacagcctggtgggcagcagccccctgagaaccaccagcagctacaacagcctggtgcccgtgcaggaccagcaccagcccatcatcatccccgacacccccagcccccccgtgagcgtgatcaccatcagaagcgacaccgacgaggaggaggacaacaagtacaagcccagcagcagcggcctgaagcccagaagcaacgtgatcagctacgtgaccgtgaacgacagccccgacagcgacagcagcctgagcagcccctacagcaccgacaccctgagcgccctgagaggcaacagcggcagcgtgctggagggccccggcagagtggtggccgacggcaccggcaccagaaccatcatcgtgccccccctgaagacccagctgggcgactgcaccgtggccacccaggccagcggcctgctgagcaacaagaccaagcccgtggccagcgtgagcggccagagcagcggctgctgcatcacccccaccggctacagagcccagagaggcggcaccagcgccgcccagcccctgaacctgagccagaaccagcagagcagcgccgcccccaccagccaggagagaagcagcaaccccgcccccagaagacagcaggccttcgtggcccccctgagccaggccccctacaccttccagcacggcagccccctgcacagcaccggccacccccacctggcccccgcccccgcccacctgcccagccaggcccacctgtacacctacgccgcccccaccagcgccgccgccctgggcagcaccagcagcatcgcccacctgttcagcccccagggcagcagcagacacgccgccgcctacaccacccaccccagcaccctggtgcaccaggtgcccgtgagcgtgggccccagcctgctgaccagcgccagcgtggcccccgcccagtaccagcaccagttcgccacccagagctacatcggcagcagcagaggcagcaccatctacaccggctaccccctgagccccaccaagatcagccagtacagctacctgtag

SEQ ID NO: 10738 - DNA, 3498 bp, synthetic construct; identical to SEQ ID NO: 10737
  source 1..3498: mol_type = other DNA; note = Synthetic coding sequence

SEQ ID NO: 10739 - DNA, 3633 bp, synthetic construct
  source 1..3633: mol_type = other DNA; note = Synthetic coding sequence
atggccagccagctgcaggtgttcagcccccccagcgtgagcagcagcgccttctgcagcgccaagaagctgaagatcgagcccagcggctgggacgtgagcggccagagcagcaacgacaagtactacacccacagcaagaccctgcccgccacccagggccaggccaacagcagccaccaggtggccaacttcaacatccccgcctacgaccagggcctgctgctgcccgcccccgccgtggagcacatcgtggtgaccgccgccgacagcagcggcagcgccgccaccagcaccttccagagcagccagaccctgacccacagaagcaacgtgagcctgctggagccctaccagaagtgcggcctgaagagaaagagcgaggaggtggacagcaacggcagcgtgcagatcatcgaggagcacccccccctgatgctgcagaacagaaccgtggtgggcgccgccgccaccaccaccaccgtgaccaccaagagcagcagcagcagcggcgagggcgactaccagctggtgcagcacgagatcctgtgcagcatgaccaacagctacgaggtgctggagttcctgggcagaggcaccttcggccaggtggccaagtgctggaagagaagcaccaaggagatcgtggccatcaagatcctgaagaaccaccccagctacgccagacagggccagatcgaggtgagcatcctgagcagactgagcagcgagaacgccgacgagtacaacttcgtgagaagctacgagtgcttccagcacaagaaccacacctgcctggtgttcgagatgctggagcagaacctgtacgacttcctgaagcagaacaagttcagccccctgcccctgaagtacatcagacccatcctgcagcaggtggccaccgccctgatgaagctgaagagcctgggcctgatccacgccgacctgaagcccgagaacatcatgctggtggaccccgtgagacagccctacagagtgaaggtgatcgacttcggcagcgccagccacgtgagcaaggccgtgtgcagcacctacctgcagagcagatactacagagcccccgagatcatcctgggcctgcccttctgcgaggccatcgacatgtggagcctgggctgcgtgatcgccgagctgttcctgggctggcccctgtaccccggcgccagcgagtacgaccagatcagatacatcagccagacccagggcctgcccgccgagtacctgctgagcgccggcaccaagaccaccagattcttcaacagagaccccaacctgggctaccccctgtggagactgaagacccccgaggagcacgagctggagaccggcatcaagagcaaggaggccagaaagtacatcttcaactgcctggacgacatggcccaggtgaacatgagcaccgacctggagggcaccgacatgctggccgagaaggccgacagaagagagtacatcgacctgctgaagaagatgctgaccatcgacgccgacaagagaatcacccccctgaagaccctgaaccaccagttcgtgaccatgacccacctgctggacttcccccacagcaaccacgtgaagagctgcttccagaacatggagatctgcaagagaagagtgcacatgtacgacaccgtgagccagatcaagagccccttcaccacccacgtggcccccaacaccagcaccaacctgaccatgagcttcagcaaccagctgaacaccgtgcacaaccaggccagcgtgctggccagcagcagcaccgccgccgccgccaccctgagcctggccaacagcgacgtgagcctgctgaactaccagagcgccctgtaccccagcagcgccgcccccgtgcccggcgtggcccagcagggcgtgagcctgcagcccggcaccacccagatctgcacccagaccgaccccttccagcagaccttcatcgtgtgcccccccgccttccagaccggcctgcaggccaccaccaagcacagcggcttccccgtgagaatggacaacgccgtgcccatcgtgccccaggcccccgccgcccagcccctgcagatccagagcggcgtgctgacccagggcagctgcacccccctgatggtggccaccctgcacccccaggtggccaccatcaccccccagtacgccgtgcccttcaccctgagctgcgccgccggcagacccgccctggtggagcagaccgccgccgtgctgcaggcctggcccggcggcacccagcagatcctgctgcccagcacctggcagcagctgcccggcgtggccctgcacaacagcgtgcagcccaccgccatgatccccgaggccatgggcagcggccagcagctggccgactggagaaacgcccacagccacggcaaccagtacagcaccatcatgcagcagcccagcctgctgaccaaccacgtgaccctggccaccgcccagcccctgaacgtgggcgtggcccacgtggtgagacagcagcagagcagcagcctgcccagcaagaagaacaagcagagcgcccccgtgagcagcaagagcagcctggacgtgctgcccagccaggtgtacagcctggtgggcagcagccccctgagaaccaccagcagctacaacagcctggtgcccgtgcaggaccagcaccagcccatcatcatccccgacacccccagcccccccgtgagcgtgatcaccatcagaagcgacaccgacgaggaggaggacaacaagtacaagcccagcagcagcggcctgaagcccagaagcaacgtgatcagctacgtgaccgtgaacgacagccccgacagcgacagcagcctgagcagcccctacagcaccgacaccctgagcgccctgagaggcaacagcggcagcgtgctggagggccccggcagagtggtggccgacggcaccggcaccagaaccatcatcgtgccccccctgaagacccagctgggcgactgcaccgtggccacccaggccagcggcctgctgagcaacaagaccaagcccgtggccagcgtgagcggccagagcagcggctgctgcatcacccccaccggctacagagcccagagaggcggcaccagcgccgcccagcccctgaacctgagccagaaccagcagagcagcgccgcccccaccagccaggagagaagcagcaaccccgcccccagaagacagcaggccttcgtggcccccctgagccaggccccctacaccttccagcacggcagccccctgcacagcaccggccacccccacctggcccccgcccccgcccacctgcccagccaggcccacctgtacacctacgccgcccccaccagcgccgccgccctgggcagcaccagcagcatcgcccacctgttcagcccccagggcagcagcagacacgccgccgcctacaccacccaccccagcaccctggtgcaccaggtgcccgtgagcgtgggccccagcctgctgaccagcgccagcgtggcccccgcccagtaccagcaccagttcgccacccagagctacatcggcagcagcagaggcagcaccatctacaccggctaccccctgagccccaccaagatcagccagtacagctacctgtag

SEQ ID NO: 10740 - DNA, 3228 bp, synthetic construct
  source 1..3228: mol_type = other DNA; note = Synthetic coding sequence
atggccagccagctgcaggtgttcagcccccccagcgtgagcagcagcgccttctgcagcgccaagaagctgaagatcgagcccagcggctgggacgtgagcggccagagcagcaacgacaagtactacacccacagcaagaccctgcccgccacccagggccaggccaacagcagccaccaggtggccaacttcaacatccccgcctacgaccagggcctgctgctgcccgcccccgccgtggagcacatcgtggtgaccgccgccgacagcagcggcagcgccgccaccagcaccttccagagcagccagaccctgacccacagaagcaacgtgagcctgctggagccctaccagaagtgcggcctgaagagaaagagcgaggaggtggacagcaacggcagcgtgcagatcatcgaggagcacccccccctgatgctgcagaacagaaccgtggtgggcgccgccgccaccaccaccaccgtgaccaccaagagcagcagcagcagcggcgagggcgactaccagctggtgcagcacgagatcctgtgcagcatgaccaacagctacgaggtgctggagttcctgggcagaggcaccttcggccaggtggccaagtgctggaagagaagcaccaaggagatcgtggccatcaagatcctgaagaaccaccccagctacgccagacagggccagatcgaggtgagcatcctgagcagactgagcagcgagaacgccgacgagtacaacttcgtgagaagctacgagtgcttccagcacaagaaccacacctgcctggtgttcgagatgctggagcagaacctgtacgacttcctgaagcagaacaagttcagccccctgcccctgaagtacatcagacccatcctgcagcaggtggccaccgccctgatgaagctgaagagcctgggcctgatccacgccgacctgaagcccgagaacatcatgctggtggaccccgtgagacagccctacagagtgaaggtgatcgacttcggcagcgccagccacgtgagcaaggccgtgtgcagcacctacctgcagagcagatactacagagcccccgagatcatcctgggcctgcccttctgcgaggccatcgacatgtggagcctgggctgcgtgatcgccgagctgttcctgggctggcccctgtaccccggcgccagcgagtacgaccagatcagatacatcagccagacccagggcctgcccgccgagtacctgctgagcgccggcaccaagaccaccagattcttcaacagagaccccaacctgggctaccccctgtggagactgaagacccccgaggagcacgagctggagaccggcatcaagagcaaggaggccagaaagtacatcttcaactgcctggacgacatggcccaggtgaacatgagcaccgacctggagggcaccgacatgctggccgagaaggccgacagaagagagtacatcgacctgctgaagaagatgctgaccatcgacgccgacaagagaatcacccccctgaagaccctgaaccaccagttcgtgaccatgacccacctgctggacttcccccacagcaaccacgtgaagagctgcttccagaacatggagatctgcaagagaagagtgcacatgtacgacaccgtgagccagatcaagagccccttcaccacccacgtggcccccaacaccagcaccaacctgaccatgagcttcagcaaccagctgaacaccgtgcacaaccaggccagcgtgctggccagcagcagcaccgccgccgccgccaccctgagcctggccaacagcgacgtgagcctgctgaactaccagagcgccctgtaccccagcagcgccgcccccgtgcccggcgtggcccagcagggcgtgagcctgcagcccggcaccacccagatctgcacccagaccgaccccttccagcagaccttcatcgtgtgcccccccgccttccagaccggcctgcaggccaccaccaagcacagcggcttccccgtgagaatggacaacgccgtgcccatcgtgccccaggcccccgccgcccagcccctgcagatccagagcggcgtgctgacccagggcagctgcacccccctgatggtggccaccctgcacccccaggtggccaccatcaccccccagtacgccgtgcccttcaccctgagctgcgccgccggcagacccgccctggtggagcagaccgccgccgtgctgcaggcctggcccggcggcacccagcagatcctgctgcccagcacctggcagcagctgcccggcgtggccctgcacaacagcgtgcagcccaccgccatgatccccgaggccatgggcagcggccagcagctggccgactggagaaacgcccacagccacggcaaccagtacagcaccatcatgcagcagcccagcctgctgaccaaccacgtgaccctggccaccgcccagcccctgaacgtgggcgtggcccacgtggtgagacagcagcagagcagcagcctgcccagcaagaagaacaagcagagcgcccccgtgagcagcaagagcagcctggacgtgctgcccagccaggtgtacagcctggtgggcagcagccccctgagaaccaccagcagctacaacagcctggtgcccgtgcaggaccagcaccagcccatcatcatccccgacacccccagcccccccgtgagcgtgatcaccatcagaagcgacaccgacgaggaggaggacaacaagtacaagcccagcagcagcggcctgaagcccagaagcaacgtgatcagctacgtgaccgtgaacgacagccccgacagcgacagcagcctgagcagcccctacagcaccgacaccctgagcgccctgagaggcaacagcggcagcgtgctggagggccccggcagagtggtggccgacggcaccggcaccagaaccatcatcgtgccccccctgaagacccagctgggcgactgcaccgtggccacccaggccagcggcctgctgagcaacaagaccaagcccgtggccagcgtgagcggccagagcagcggctgctgcatcacccccaccggctacagagcccagagaggcggcaccagcgccgcccagcccctgaacctgagccaggtgagcgccatgggctactgcctgctgttcggcccctgcaccgtggtgaccttctggagaaccctgctgctggccggctgctag

SEQ ID NO: 10741 - DNA, 543 bp, synthetic construct
  source 1..543: mol_type = other DNA; note = Synthetic coding sequence
atgcaggccgagggccagggcaccggcggcagcaccggcgacgccgacggccccggcggccccggcatccccgacggccccggcggcaacgccggcggccccggcgaggccggcgccaccggcggcagaggccccagaggcgccggcgccgccagagccagcggccccagaggcggcgcccccagaggcccccacggcggcgccgccagcgcccaggacggcagatgcccctgcggcgccagaagacccgacagcagactgctgcagctgcacatcaccatgcccttcagcagccccatggaggccgagctggtgagaagaatcctgagcagagacgccgcccccctgcccagacccggcgccgtgctgaaggacttcaccgtgagcggcaacctgctgttcatcagactgaccgccgccgaccacagacagctgcagctgagcatcagcagctgcctgcagcagctgagcctgctgatgtggatcacccagtgcttcctgcccgtgttcctggcccaggcccccagcggccagagaagatag

SEQ ID NO: 10742 - DNA, 717 bp, synthetic construct
  source 1..717: mol_type = other DNA; note = Synthetic coding sequence
atgagcgaggacctggccaagcagctggccagctacaaggcccagctgcagcaggtggaggccgccctgagcggcaacggcgagaacgaggacctgctgaagctgaagaaggacctgcaggaggtgatcgagctgaccaaggacctgctgagcacccagcccagcgagaccctggccagcagcgacagcttcgccagcacccagcccacccacagctggaaggtgggcgacaagtgcatggccgtgtggagcgaggacggccagtgctacgaggccgagatcgaggagatcgacgaggagaacggcaccgccgccatcaccttcgccggctacggcaacgccgaggtgacccccctgctgaacctgaagcccgtggaggagggcagaaaggccaaggaggacagcggcaacaagcccatgagcaagaaggagatgatcgcccagcagagagagtacaagaagaagaaggccctgaagaaggcccagagaatcaaggagctggagcaggagagagaggaccagaaggtgaagtggcagcagttcaacaacagagcctacagcaagaacaagaagggccaggtgaagagaagcatcttcgccagccccgagagcgtgaccggcaaggtgggcgtgggcacctgcggcatcgccgacaagcccatgacccagtaccaggacaccagcaagtacaacgtgagacacctgatgccccagtag

SEQ ID NO: 10743 - DNA, 717 bp, synthetic construct; identical to SEQ ID NO: 10742
  source 1..717: mol_type = other DNA; note = Synthetic coding sequence

SEQ ID NO: 10744 - DNA, 2229 bp, synthetic construct
  source 1..2229: mol_type = other DNA; note = Synthetic coding sequence
gacctgagcagcggcggcggcatcgagccccagtgcagcagcgaggtgtacttcagagccagagagagaggctgcgagaacgtggcctggagcctgggcctgagaagccactgcttcctggaggccgagctgcaccccctgccctggttcctgcccaccaacgtgtgcagccccctgcccggcgccgcccacaagctggtgtgctacttcaccaactgggcccacagcagacccggccccgccagcatcctgccccacgacctggaccccttcctgtgcacccacctgatcttcgccttcgccagcatgaacaacaaccagatcgtggccaaggacctgcaggacgagaagatcctgtaccccgagttcaacaagctgaaggagagaatgtggcagcagctgcccaccggcgtgaagaaccccgcccaccagcccagcctgagccaccacagaaacagagagctgaagaccctgctgagcatcggcggctggaacttcggcaccagcagattcaccaccatgctgagcaccttcgccaacagagagaagttcatcgccagcgtgatcagcctgctgagaacccacgacttcgacggcctggacctgttcttcctgtaccccggcctgagaggcagccccatgcacgacagatggaccttcctgttcctgatcgaggagctgctgttcgccttcagaaaggaggccctgctgaccatgagacccagactgctgctgagcgccgccgtgagcggcgtgccccacatcgtgcagaccagctacgacgtgagattcctgggcagactgctggacttcatcaacgtgctgagctacgacctgcacggcagctgggagagattcaccggccacaacagccccctgttcagcctgcccgaggaccccaagagcagcgcctacgccatgaactactggagaaagctgggcgcccccagcgagaagctgatcatgggcatccccacctacggcagaaccttcagactgctgaaggccagcaagaacggcctgcaggccagagccatcggccccgccagccccggcaagtacaccaagcaggagggcttcctggcctacttcgagatctgcagcttcgtgtggggcgccaagaagcactggatcgactaccagtacgtgccctacgccaacaagggcaaggagtgggtgggctacgacaacgccatcagcttcagctacaaggcctggttcatcagaagagagcacttcggcggcgccatggtgtggaccctggacatggacgacgtgagaggcaccttctgcggcaccggccccttccccctggtgtacgtgctgaacgacatcctggtgagagccgagttcagcagcaccagcctgccccagttctggctgagcagcgccgtgaacagcagcagcaccgaccccgagagactggccgtgaccaccgcctggaccaccgacagcaagatcctgccccccggcggcgaggccggcgtgaccgagatccacggcaagtgcgagaacatgaccatcacccccagaggcaccaccgtgacccccaccaaggagaccgtgagcctgggcaagcacaccgtggccctgggcgagaagaccgagatcaccggcgccatgaccatgaccagcgtgggccaccagagcatgacccccggcgagaaggccctgacccccgtgggccaccagagcgtgaccaccggccagaagaccctgaccagcgtgggctaccagagcgtgacccccggcgagaagaccctgacccccgtgggccaccagagcgtgacccccgtgagccaccagagcgtgagccccggcggcaccaccatgacccccgtgcacttccagaccgagaccctgagacagaacaccgtggcccccagaagaaaggccgtggccagagagaaggtgaccgtgcccagcagaaacatcagcgtgacccccgagggccagaccatgcccctgagaggcgagaacctgaccagcgaggtgggcacccaccccagaatgggcaacctgggcctgcagatggaggccgagaacagaatgatgctgagcagcagccccgtgatccagctgcccgagcagacccccctggccttcgacaacagattcgtgcccatctacggcaaccacagcagcgtgaacagcgtgaccccccagaccagccccctgagcctgaagaaggagatccccgagaacagcgccgtggacgaggaggcctag

SEQ ID NO: 10745 - DNA, 2037 bp, synthetic construct
  source 1..2037: mol_type = other DNA; note = Synthetic coding sequence
atgtggaagctgctgctgtgggtgggcctggtgctggtgctgaagcaccacgacggcgccgcccacaagctggtgtgctacttcaccaactgggcccacagcagacccggccccgccagcatcctgccccacgacctggaccccttcctgtgcacccacctgatcttcgccttcgccagcatgaacaacaaccagatcgtggccaaggacctgcaggacgagaagatcctgtaccccgagttcaacaagctgaaggagagaaacagagagctgaagaccctgctgagcatcggcggctggaacttcggcaccagcagattcaccaccatgctgagcaccttcgccaacagagagaagttcatcgccagcgtgatcagcctgctgagaacccacgacttcgacggcctggacctgttcttcctgtaccccggcctgagaggcagccccatgcacgacagatggaccttcctgttcctgatcgaggagctgctgttcgccttcagaaaggaggccctgctgaccatgagacccagactgctgctgagcgccgccgtgagcggcgtgccccacatcgtgcagaccagctacgacgtgagattcctgggcagactgctggacttcatcaacgtgctgagctacgacctgcacggcagctgggagagattcaccggccacaacagccccctgttcagcctgcccgaggaccccaagagcagcgcctacgccatgaactactggagaaagctgggcgcccccagcgagaagctgatcatgggcatccccacctacggcagaaccttcagactgctgaaggccagcaagaacggcctgcaggccagagccatcggccccgccagccccggcaagtacaccaagcaggagggcttcctggcctacttcgagatctgcagcttcgtgtggggcgccaagaagcactggatcgactaccagtacgtgccctacgccaacaagggcaaggagtgggtgggctacgacaacgccatcagcttcagctacaaggcctggttcatcagaagagagcacttcggcggcgccatggtgtggaccctggacatggacgacgtgagaggcaccttctgcggcaccggccccttccccctggtgtacgtgctgaacgacatcctggtgagagccgagttcagcagcaccagcctgccccagttctggctgagcagcgccgtgaacagcagcagcaccgaccccgagagactggccgtgaccaccgcctggaccaccgacagcaagatcctgccccccggcggcgaggccggcgtgaccgagatccacggcaagtgcgagaacatgaccatcacccccagaggcaccaccgtgacccccaccaaggagaccgtgagcctgggcaagcacaccgtggccctgggcgagaagaccgagatcaccggcgccatgaccatgaccagcgtgggccaccagagcatgacccccggcgagaaggccctgacccccgtgggccaccagagcgtgaccaccggccagaagaccctgaccagcgtgggctaccagagcgtgacccccggcgagaagaccctgacccccgtgggccaccagagcgtgacccccgtgagccaccagagcgtgagccccggcggcaccaccatgacccccgtgcacttccagaccgagaccctgagacagaacaccgtggcccccagaagaaaggccgtggccagagagaaggtgaccgtgcccagcagaaacatcagcgtgacccccgagggccagaccatgcccctgagaggcgagaacctgaccagcgaggtgggcacccaccccagaatgggcaacctgggcctgcagatggaggccgagaacagaatgatgctgagcagcagccccgtgatccagctgcccgagcagacccccctggccttcgacaacagattcgtgcccatctacggcaaccacagcagcgtgaacagcgtgaccccccagaccagccccctgagcctgaagaaggagatccccgagaacagcgccgtggacgaggaggcctag

SEQ ID NO: 10746 - DNA, 1005 bp, synthetic construct
  source 1..1005: mol_type = other DNA; note = Synthetic coding sequence
atgggcggcgccgtgagcgccggcgaggacaacgacgagctgatcgacaacctgaaggaggcccagtacatcagaaccgagctggtggagcaggccttcagagccatcgacagagccgactactacctggaggagttcaaggagaacgcctacaaggacctggcctggaagcacggcaacatccacctgagcgccccctgcatctacagcgaggtgatggaggccctggacctgcagcccggcctgagcttcctgaacctgggcagcggcaccggctacctgagcagcatggtgggcctgatcctgggccccttcggcgtgaaccacggcgtggagctgcacagcgacgtgatcgagtacgccaagcagaagctggacttcttcatcagaaccagcgacagcttcgacaagttcgacttctgcgagcccagcttcgtgaccggcaactgcctggagatcagccccgactgcagccagtacgacagagtgtactgcggcgccggcgtgcagaaggagcacgaggagtacatgaagaacctgctgaaggtgggcggcatcctggtgatgcccctggaggagaagccctgccacagcgagagcggcaagagcagactggtgcagctgccccccgtggccgtgagaagcctgcaggacctggccagaatcgccatcagaggcaccatcaagaagatcatccaccaggagaccgtgagcaagaacggcaacggcctgaagaacacccccagattcaagagaagaagagtgagaagaagaagaatggagaccatcgtgttcctggacaaggaggtgttcgccagcagaatcagcaaccccagcgacgacaacagctgcgaggacctggaggaggagagaagagaggaggaggagaagaccccccccgagaccaagcccgacccccccgtgaacttcctgagacagaaggtgctgagcctgcccctgcccgaccccctgaagtactacctgctgtactacagagagaagtag

SEQ ID NO: 10747 - DNA, 1785 bp, synthetic construct
  source 1..1785: mol_type = other DNA; note = Synthetic coding sequence
atgagcagacccagcagcagagccatctacctgcacagaaaggagtacagccagaacctgaccagcgagcccaccctgctgcagcacagagtggagcacctgatgacctgcaagcagggcagccagagagtgcagggccccgaggacgccctgcagaagctgttcgagatggacgcccagggcagagtgtggagccaggacctgatcctgcaggtgagagacggctggctgcagctgctggacatcgagaccaaggaggagctggacagctacagactggacagcatccaggccatgaacgtggccctgaacacctgcagctacaacagcatcctgagcatcaccgtgcaggagcccggcctgcccggcaccagcaccctgctgttccagtgccaggaggtgggcgccgagagactgaagaccagcctgcagaaggccctggaggaggagctggagcagagcagacccagactgggcggcctgcagcccggccaggacagatggagaggccccgccatggagagacccctgcccatggagcaggccagatacctggagcccggcatcccccccgagcagccccaccagagaaccctggagcacagcctgccccccagccccagacccctgcccagacacaccagcgccagagagcccagcgccttcaccctgcccccccccagaagaagcagcagccccgaggaccccgagagagacgaggaggtgctgaaccacgtgctgagagacatcgagctgttcatgggcaagctggagaaggcccaggccaagaccagcagaaagaagaagttcggcaagaagaacaaggaccagggcggcctgacccaggcccagtacatcgactgcttccagaagatcaagcacagcttcaacctgctgggcagactggccacctggctgaaggagaccagcgcccccgagctggtgcacatcctgttcaagagcctgaacttcatcctggccagatgccccgaggccggcctggccgcccaggtgatcagccccctgctgacccccaaggccatcaacctgctgcagagctgcctgagcccccccgagagcaacctgtggatgggcctgggccccgcctggaccaccagcagagccgactggaccggcgacgagcccctgccctaccagcccaccttcagcgacgactggcagctgcccgagcccagcagccaggcccccctgggctaccaggaccccgtgagcctgagaagaggcagccacagactgggcagcaccagccacttcccccaggagaagacccacaaccacgacccccagcccggcgaccccaacagcagacccagcagccccaagcccgcccagcccgccctgaagatgcaggtgctgtacgagttcgaggccagaaaccccagagagctgaccgtggtgcagggcgagaagctggaggtgctggaccacagcaagagatggtggctggtgaagaacgaggccggcagaagcggctacatccccagcaacatcctggagcccctgcagcccggcacccccggcacccagggccagagccccagcagagtgcccatgctgagactgagcagcagacccgaggaggtgaccgactggctgcaggccgagaacttcagcaccgccaccgtgagaaccctgggcagcctgaccggcagccagctgctgagaatcagacccggcgagctgcagatgctgtgcccccaggaggcccccagaatcctgagcagactggaggccgtgagaagaatgctgggcatcagcccctag

SEQ ID NO: 10748 - DNA, 1500 bp, synthetic construct
  source 1..1500: mol_type = other DNA; note = Synthetic coding sequence
atgagcttcggcagcgagcactacctgtgcagcagcagcagctacagaaaggtgttcggcgacggcagcagactgagcgccagactgagcggcgccggcggcgccggcggcttcagaagccagagcctgagcagaagcaacgtggccagcagcgccgcctgcagcagcgccagcagcctgggcctgggcctggcctacagaagaccccccgccagcgacggcctggacctgagccaggccgccgccagaaccaacgagtacaagatcatcagaaccaacgagaaggagcagctgcagggcctgaacgacagattcgccgtgttcatcgagaaggtgcaccagctggagacccagaacagagccctggaggccgagctggccgccctgagacagagacacgccgagcccagcagagtgggcgagctgttccagagagagctgagagacctgagagcccagctggaggaggccagcagcgccagaagccaggccctgctggagagagacggcctggccgaggaggtgcagagactgagagccagatgcgaggaggagagcagaggcagagagggcgccgagagagccctgaaggcccagcagagagacgtggacggcgccaccctggccagactggacctggagaagaaggtggagagcctgctggacgagctggccttcgtgagacaggtgcacgacgaggaggtggccgagctgctggccaccctgcaggccagcagccaggccgccgccgaggtggacgtgaccgtggccaagcccgacctgaccagcgccctgagagagatcagagcccagtacgagagcctggccgccaagaacctgcagagcgccgaggagtggtacaagagcaagttcgccaacctgaacgagcaggccgccagaagcaccgaggccatcagagccagcagagaggagatccacgagtacagaagacagctgcaggccagaaccatcgagatcgagggcctgagaggcgccaacgagagcctggagagacagatcctggagctggaggagagacacagcgccgaggtggccggctaccaggacagcatcggccagctggagaacgacctgagaaacaccaagagcgagatggccagacacctgagagagtaccaggacctgctgaacgtgaagatggccctggacatcgagatcgccgcctacagaaagctgctggagggcgaggagaccagattcagcaccagcggcctgagcatcagcggcctgaaccccctgcccaaccccagctacctgctgccccccagaatcctgagcgccaccaccagcaaggtgagcagcaccggcctgagcctgaagaaggaggaggaggaggaggaggccagcaaggtggccagcaagaagaccagccagatcggcgagagcttcgaggagatcctggaggagaccgtgatcagcaccaagaagaccgagaagagcaacatcgaggagaccaccatcagcagccagaagatctag

SEQ ID NO: 10749 - DNA, 1131 bp, synthetic construct
  source 1..1131: mol_type = other DNA; note = Synthetic coding sequence
atggagagctacgacgtgatcgccaaccagcccgtggtgatcgacaacggcagcggcgtgatcaaggccggcttcgccggcgaccagatccccaagtactgcttccccaactacgtgggcagacccaagcacgtgagagtgatggccggcgccctggagggcgacatcttcatcggccccaaggccgaggagcacagaggcctgctgagcatcagataccccatggagcacggcatcgtgaaggactggaacgacatggagagaatctggcagtacgtgtacagcaaggaccagctgcagaccttcagcgaggagcaccccgtgctgctgaccgaggcccccctgaaccccagaaagaacagagagagagccgccgaggtgttcttcgagaccttcaacgtgcccgccctgttcatcagcatgcaggccgtgctgagcctgtacgccaccggcagaaccaccggcgtggtgctggacagcggcgacggcgtgacccacgccgtgcccatctacgagggcttcgccatgccccacagcatcatgagaatcgacatcgccggcagagacgtgagcagattcctgagactgtacctgagaaaggagggctacgacttccacagcagcagcgagttcgagatcgtgaaggccatcaaggagagagcctgctacctgagcatcaacccccagaaggacgagaccctggagaccgagaaggcccagtactacctgcccgacggcagcaccatcgagatcggccccagcagattcagagcccccgagctgctgttcagacccgacctgatcggcgaggagagcgagggcatccacgaggtgctggtgttcgccatccagaagagcgacatggacctgagaagaaccctgttcagcaacatcgtgctgagcggcggcagcaccctgttcaagggcttcggcgacagactgctgagcgaggtgaagaagctggcccccaaggacgtgaagatcagaatcagcgccccccaggagagactgtacagcacctggatcggcggcagcatcctggccagcctggacaccttcaagaagatgtgggtgagcaagaaggagtacgaggaggacggcgccagaagcatccacagaaagaccttctag

SEQ ID NO: 10750 - DNA, 783 bp, synthetic construct
  source 1..783: mol_type = other DNA; note = Synthetic coding sequence
atgagcctgcagaagaccccccccaccagagtgttcgtggagctggtgccctgggccgacagaagcagagagaacaacctggccagcggcagagagaccctgcccggcctgagacaccccctgagcagcacccaggcccagaccgccaccagagaggtgcaggtgagcggcaccagcgaggtgagcgccggccccgacagagcccaggtggtggtgagagtgagcagcaccaaggaggccgccgccgaggccaagaagagcgtgtgcagaagactggactacatcacccagagcctgcagcagcagggcgtgcaggccgagaacatcaccgtgaccaaggacttcagaagagtggagaacgcctaccacatggaggccgaggtgtgcatcaccttcaccgagttcggcaagatgcagaacatctgcaacttcctggtggagaagctggacagcagcgtggtgatcagccccccccagttctaccacacccccggcagcgtggagaacctgagaagacaggcctgcctggtggccgtggagaacgcctggagaaaggcccaggaggtgtgcaacctggtgggccagaccctgggcaagcccctgctgatcaaggaggaggagaccaaggagtgggagggccagatcgacgaccaccagagcagcagactgagcagcagcctgaccgtgcagcagaagatcaagagcgccaccatccacgccgccagcaaggtgttcatcaccttcgaggtgaagggcaaggagaagagaaagaagcacctgtag

SEQ ID NO: 10751 - DNA, 891 bp, synthetic construct
  source 1..891: mol_type = other DNA; note = Synthetic coding sequence
atggagcccagcggcggcgagcaggagcccggcgccgtgagattcctggacctgccctgggaggacgtgctgctgccccacgtgctgaacagagtgcccctgagacagctgctgagactgcagagagtgagcagagccttcagaagcctggtgcagctgcacctggccggcctgagaagattcgacgccgcccaggtgggcccccagatccccagagccgccctggccagactgctgagagacgccgagggcctgcaggagctggccctggccccctgccacgagtggctgagcgacgaggacctggtgcccgtgctggccagaaacccccagctgagaagcgtggccctgggcggctgcggccagctgagcagaagagccctgggcgccctggccgagggctgccccagactgcagagactgagcctggcccactgcgactgggtggacggcctggccctgagaggcctggccgacagatgccccgccctggaggagctggacctgaccgcctgcagacagctgaaggacgaggccatcgtgtacctggcccagagaagaggcgccggcctgagaagcctgagcctggccgtgaacgccaacgtgggcgacgccgccgtgcaggagctggccagaaactgccccgagctgcaccacctggacctgaccggctgcctgagagtgggcagcgacggcgtgagaaccctggccgagtactgccccgtgctgagaagcctgagagtgagacactgccaccacgtggccgagagcagcctgagcagactgagaaagagaggcgtggacatcgacgtggagccccccctgcaccaggccctggtgctgctgcaggacatggccggcttcgcccccttcgtgaacctgcaggtgtag

SEQ ID NO: 10752 - DNA, 2100 bp, synthetic construct
  source 1..2100: mol_type = other DNA; note = Synthetic coding sequence
atggccgacgccggcatcagaagagtggtgcccagcgacctgtaccccctggtgctgggcttcctgagagacaaccagctgagcgaggtggccaacaagttcgccaaggccaccggcgccacccagcaggacgccaacgccagcagcctgctggacatctacagcttctggctgaagagcgccaaggtgcccgagagaaagctgcaggccaacggccccgtggccaagaaggccaagaagaaggccagcagcagcgacagcgaggacagcagcgaggaggaggaggaggtgcagggcccccccgccaagaaggccgccgtgcccgccaagagagtgggcctgccccccggcaaggccgccgccaaggccagcgagagcagcagcagcgaggagagcagcgacgacgacgacgaggaggaccagaagaagcagcccgtgcagaagggcgtgaagccccaggccaaggccgccaaggccccccccaagaaggccaagagcagcgacagcgacagcgacagcagcagcgaggacgagccccccaagaaccagaagcccaagatcacccccgtgaccgtgaaggcccagaccaaggccccccccaagcccgccagagccgcccccaagatcgccaacggcaaggccgccagcagcagcagcagcagcagcagcagcagcagcagcgacgacagcgaggaggagaaggccgccgccacccccaagaagaccgtgcccaagaagcaggtggtggccaaggcccccgtgaaggccgccaccacccccaccagaaagagcagcagcagcgaggacagcagcagcgacgaggaggaggagcagaagaagcccatgaagaacaagcccggcccctacagcagcgtgcccccccccagcgcccccccccccaagaagagcctgggcacccagccccccaagaaggccgtggagaagcagcagcccgtggagagcagcgaggacagcagcgacgagagcgacagcagcagcgaggaggagaagaagccccccaccaaggccgtggtgagcaaggccaccaccaagcccccccccgccaagaaggccgccgagagcagcagcgacagcagcgacagcgacagcagcgaggacgacgaggcccccagcaagcccgccggcaccaccaagaacagcagcaacaagcccgccgtgaccaccaagagccccgccgtgaagcccgccgccgcccccaagcagcccgtgggcggcggccagaagctgctgaccagaaaggccgacagcagcagcagcgaggaggagagcagcagcagcgaggaggagaagaccaagaagatggtggccaccaccaagcccaaggccaccgccaaggccgccctgagcctgcccgccaagcaggccccccagggcagcagagacagcagcagcgacagcgacagcagcagcagcgaggaggaggaggagaagaccagcaagagcgccgtgaagaagaagccccagaaggtggccggcggcgccgcccccagcaagcccgccagcgccaagaagggcaaggccgagagcagcaacagcagcagcagcgacgacagcagcgaggaggaggaggagaagctgaagggcaagggcagccccagaccccaggcccccaaggccaacggcaccagcgccctgaccgcccagaacggcaaggccgccaagaacagcgaggaggaggaggaggagaagaagaaggccgccgtggtggtgagcaagagcggcagcctgaagaagagaaagcagaacgaggccgccaaggaggccgagaccccccaggccaagaagatcaagctgcagacccccaacaccttccccaagagaaagaagggcgagaagagagccagcagccccttcagaagagtgagagaggaggagatcgaggtggacagcagagtggccgacaacagcttcgacgccaagagaggcgccgccggcgactggggcgagagagccaaccaggtgctgaagttcaccaagggcaagagcttcagacacgagaagaccaagaagaagagaggcagctacagaggcggcagcatcagcgtgcaggtgaacagcatcaagttcgacagcgagtag

SEQ ID NO: 10753 - DNA, 1275 bp, synthetic construct
  source 1..1275: mol_type = other DNA; note = Synthetic coding sequence
atggaggagaacaacctgcagtgcagcagcgtggtggacggcaacttcgaggaggtgcccagagagaccgccatccagttcaagccccccctgtacagacagagataccagttcgtgaagaacctggtggaccagcacgagcccaagaaggtggccgacctgggctgcggcgacaccagcctgctgagactgctgaaggtgaacccctgcatcgagctgctggtgggcgtggacatcaacgaggacaagctgagatggagaggcgacagcctggcccccttcctgggcgacttcctgaagcccagagacctgaacctgaccatcaccctgtaccacggcagcgtggtggagagagacagcagactgctgggcttcgacctgatcacctgcatcgagctgatcgagcacctggacagcggcgacctggccagattccccgaggtggtgttcggctacctgagccccagcatgatcgtgatcagcacccccaacagcgagttcaaccccctgttccccagcgtgaccctgagagacagcgaccacaagttcgagtggaccagaatggagttccagacctgggccctgtacgtggccaacagatacgactacagcgtggagttcaccggcgtgggcgagccccccgccggcgccgagaacgtgggctactgcacccagatcggcatcttcagaaagaacggcggcaaggccaccgagagctgcctgagcgagcagcacgaccagcacgtgtacaaggccagacagggcctgaccatgctgcccagactggtgctgaacttccacccccaggccatcctgctgccccacctgcccaagatgctgagactgcaggtgttcaccaccagctaccccagcctgcagcaggagagattcttcaagctggtgctggtgaacgaggtgagccagcaggtggagagcctgagagtgagccacctgcccagaagaaaggagcaggccggcgagagaggcgacaagcccaaggacatcggcggcagcaaggcccccgtgccctgcttcggccccgtgttcaccgaggtggagaaggccaagatcgagaacagccccacccccttctgcgtgggcgacaagttcttcgtgcccctgcagagactgctggcctaccccaagctgaacagactgtgcgccaacgaggagatgatgagaagcgtgatcgccgacagcatccccctgagcagcgacggcagcgccgtggtggccgacctgagaaactacttcgacgagcagttcgagttctag

SEQ ID NO: 10754 - DNA, 1182 bp, synthetic construct
  source 1..1182: mol_type = other DNA; note = Synthetic coding sequence
atggaggagaacaacctgcagtgcagcagcgtggtggacggcaacttcgaggaggtgcccagagagaccgccatccagttcaagccccccctgtacagacagagataccagttcgtgaagaacctggtggaccagcacgagcccaagaaggtggccgacctgggctgcggcgacaccagcctgctgagactgctgaaggtgaacccctgcatcgagctgctggtgggcgtggacatcaacgaggacaagctgagatggagaggcgacagcctggcccccttcctgggcgacttcctgaagcccagagacctgaacctgaccatcaccctgtaccacggcagcgtggtggagagagacagcagactgctgggcttcgacctgatcacctgcatcgagctgatcgagcacctggacagcggcgacctggccagattccccgaggtggtgttcggctacctgagccccagcatgatcgtgatcagcacccccaacagcgagttcaaccccctgttccccagcgtgaccctgagagacagcgaccacaagttcgagtggaccagaatggagttccagacctgggccctgtacgtggccaacagatacgactacagcgtggagttcaccggcgtgggcgagccccccgccggcgccgagaacgtgggctactgcacccagatcggcatcttcagaaagaacggcggcaaggccaccgagagctgcctgagcgagcagcacgaccagcacgtgtacaaggccgtgttcaccaccagctaccccagcctgcagcaggagagattcttcaagctggtgctggtgaacgaggtgagccagcaggtggagagcctgagagtgagccacctgcccagaagaaaggagcaggccggcgagagaggcgacaagcccaaggacatcggcggcagcaaggcccccgtgccctgcttcggccccgtgttcaccgaggtggagaaggccaagatcgagaacagccccacccccttctgcgtgggcgacaagttcttcgtgcccctgcagagactgctggcctaccccaagctgaacagactgtgcgccaacgaggagatgatgagaagcgtgatcgccgacagcatccccctgagcagcgacggcagcgccgtggtggccgacctgagaaactacttcgacgagcagttcgagttctag

SEQ ID NO: 10755 - DNA, 1701 bp, synthetic construct
  source 1..1701: mol_type = other DNA; note = Synthetic coding sequence
atgagcgccagcaccggcggcggcggcgacagcggcggcagcggcggcagcagcagcagcagccaggccagctgcggccccgagagcagcggcagcgagctggccctggccacccccgtgccccagatgctgcagggcctgctgggcagcgacgacgaggagcaggaggaccccaaggactactgcaagggcggctaccaccccgtgaagatcggcgacgtgttcaacggcagataccacgtggtgagaaagctgggctggggccacttcagcaccgtgtggctgtgctgggacatccagagaaagagattcgtggccctgaaggtggtgaagagcgccggccactacaccgagaccgccgtggacgagatcaagctgctgaagtgcgtgagagacagcgaccccagcgaccccaagagagagaccatcgtgcagctgatcgacgacttcagaatcagcggcgtgaacggcgtgcacgtgtgcatggtgctggaggtgctgggccaccagctgctgaagtggatcatcaagagcaactaccagggcctgcccgtgccctgcgtgaagagcatcgtgagacaggtgctgcacggcctggactacctgcacaccaagtgcaagatcatccacaccgacatcaagcccgagaacatcctgctgtgcgtgggcgacgcctacatcagaagactggccgccgaggccaccgagtggcagcaggccggcgcccccccccccagcagaagcatcgtgagcaccgccccccaggaggtgctgaccggcaagctgagcaagaacaagagaaagaagatgagaagaaagagaaagcagcagaagagactgctggaggagagactgagagacctgcagagactggaggccatggaggccgccacccaggccgaggacagcggcctgagactggacggcggcagcggcagcaccagcagcagcggctgccaccccggcggcgccagagccggccccagccccgccagcagcagccccgcccccggcggcggcagaagcctgagcgccggcagccagaccagcggcttcagcggcagcctgttcagccccgccagctgcagcatcctgagcggcagcagcaaccagagagagaccggcggcctgctgagccccagcacccccttcggcgccagcaacctgctggtgaaccccctggagccccagaacgccgacaagatcaagatcaagatcgccgacctgggcaacgcctgctgggtgcacaagcacttcaccgaggacatccagaccagacagtacagagccgtggaggtgctgatcggcgccgagtacggcccccccgccgacatctggagcaccgcctgcatggccttcgagctggccaccggcgactacctgttcgagccccacagcggcgaggactacagcagagacgaggaccacatcgcccacatcgtggagctgctgggcgacatcccccccgccttcgccctgagcggcagatacagcagagagttcttcaacagaagaggcgagctgagacacatccacaacctgaagcactggggcctgtacgaggtgctgatggagaagtacgagtggcccctggagcaggccacccagttcagcgccttcctgctgcccatgatggagtacatccccgagaagagagccagcgccgccgactgcctgcagcacccctggctgaacccctag

SEQ ID NO: 10756 - DNA, 150 bp, synthetic construct
  source 1..150: mol_type = other DNA; note = Synthetic coding sequence
atggccggccccagagtggaggtggacggcagcatcatggagggcggcggccagatcctgagagtgagcaccgccctgagctgcctgctgggcctgcccctgagagtgcagaagatcagagccggcagaagcacccccggcctgagatag

SEQ ID NO: 10757 - DNA, 1101 bp, synthetic construct
  source 1..1101: mol_type = other DNA; note = Synthetic coding sequence
atggccggccccagagtggaggtggacggcagcatcatggagggcggcggccagatcctgagagtgagcaccgccctgagctgcctgctgggcctgcccctgagagtgcagaagatcagagccggcagaagcacccccggcctgagaccccagcacctgagcggcctggagatgatcagagacctgtgcgacggccagctggagggcgccgagatcggcagcaccgagatcaccttcacccccgagaagatcaagggcggcatccacaccgccgacaccaagaccgccggcagcgtgtgcctgctgatgcaggtgagcatgccctgcgtgctgttcgccgccagccccagcgagctgcacctgaagggcggcaccaacgccgagatggccccccagatcgactacaccgtgatggtgttcaagcccatcgtggagaagttcggcttcatcttcaactgcgacatcaagaccagaggctactaccccaagggcggcggcgaggtgatcgtgagaatgagccccgtgaagcagctgaaccccatcaacctgaccgagagaggctgcgtgaccaagatctacggcagagccttcgtggccggcgtgctgcccttcaaggtggccaaggacatggccgccgccgccgtgagatgcatcagaaaggagatcagagacctgtacgtgaacatccagcccgtgcaggagcccaaggaccaggccttcggcaacggcaacggcatcatcatcatcgccgagaccagcaccggctgcctgttcgccggcagcagcctgggcaagagaggcgtgaacgccgacaaggtgggcatcgaggccgccgagatgctgctggccaacctgagacacggcggcaccgtggacgagtacctgcaggaccagctgatcgtgttcatggccctggccaacggcgtgagcagaatcaagaccggccccgtgaccctgcacacccagaccgccatccacttcgccgagcagatcgccaaggccaagttcatcgtgaagaagagcgaggacgaggaggacgccgccaaggacacctacatcatcgagtgccagggcatcggcatgaccaaccccaacctgtag

SEQ ID NO: 10758 - DNA, 1155 bp, synthetic construct; identical to SEQ ID NO: 10264
  source 1..1155: mol_type = other DNA; note = Synthetic coding sequence

SEQ ID NO: 10759 - DNA, 804 bp, synthetic construct
  source 1..804: mol_type = other DNA; note = Synthetic coding sequence
atggccgagcccgtgcaggaggagctgagcgtgctggccgccatcttctgcagaccccacgagtgggaggtgctgagcagaagcgagaccgacggcaccgtgttcagaatccacaccaaggccgagggcttcatggacgtggacatccccctggagctggtgttccacctgcccgtgaactaccccagctgcctgcccggcatcagcatcaacagcgagcagctgaccagagcccagtgcgtgaccgtgaaggagaacctgctggagcaggccgagagcctgctgagcgagcccatggtgcacgagctggtgctgtggatccagcagaacctgagacacatcctgagccagcccgagaccggcagcggcagcgagaagtgcaccttcagcaccagcaccaccatggacgacggcctgtggatcaccctgctgcacctggaccacatgagagccaagaccaagtacgtgaagatcgtggagaagtgggccagcgacctgagactgaccggcagactgatgttcatgggcaagatcatcctgatcctgctgcagggcgacagaaacaacctgaaggagtacctgatcctgcagaagaccagcaaggtggacgtggacagcagcggcaagaagtgcaaggagaagatgatcagcgtgctgttcgagaccaaggtgcagaccgagcacaagagattcctggccttcgaggtgaaggagtacagcgccctggacgagctgcagaaggagttcgagaccgccggcctgaagaagctgttcagcgagttcgtgctggccctggtgaagtag

SEQ ID NO: 10760 - DNA, 2010 bp, synthetic construct
  source 1..2010: mol_type = other DNA; note = Synthetic coding sequence
atggccatcgtgcagaccctgcccgtgcccctggagcccgcccccgaggccgccaccgccccccaggcccccgtgatgggcagcgtgagcagcctgatcagcggcagaccctgccccggcggccccgccccccccagacaccacggcccccccggccccaccttcttcagacagcaggacggcctgctgagaggcggctacgaggcccaggagcccctgtgccccgccgtgccccccagaaaggccgtgcccgtgaccagcttcacctacatcaacgaggacttcagaaccgagagcccccccagccccagcagcgacgtggaggacgccagagagcagagagcccacaacgcccacctgagaggccccccccccaagctgatccccgtgagcggcaagctggagaagaacatggagaagatcctgatcagacccaccgccttcaagcccgtgctgcccaagcccagaggcgcccccagcctgcccagcttcatgggccccagagccaccggcctgagcggcagccagggcagcctgacccagctgttcggcggccccgccagcagcagcagcagcagcagcagcagcagcgccgccgacaagcccctggccttcagcggctgggccagcggctgccccagcggcaccctgagcgacagcggcagaaacagcctgagcagcctgcccacctacagcaccggcggcgccgagcccaccaccagcagccccggcggccacctgcccagccacggcagcggcagaggcgccctgcccggccccgccagaggcgtgcccaccggccccagccacagcgacagcggcagaagcagcagcagcaagagcaccggcagcctgggcggcagagtggccggcggcctgctgggcagcggcaccagagccagccccgacagcagcagctgcggcgagagaagcccccccccccccccccccccccccagcgacgaggccctgctgcactgcgtgctggagggcaagctgagagacagagaggccgagctgcagcagctgagagacagcctggacgagaacgaggccaccatgtgccaggcctacgaggagagacagagacactggcagagagagagagaggccctgagagaggactgcgccgcccaggcccagagagcccagagagcccagcagctgctgcagctgcaggtgttccagctgcagcaggagaagagacagctgcaggacgacttcgcccagctgctgcaggagagagagcagctggagagaagatgcgccaccctggagagagagcagagagagctgggccccagactggaggagaccaagtgggaggtgtgccagaagagcggcgagatcagcctgctgaagcagcagctgaaggagagccaggccgagctggtgcagaagggcagcgagctggtggccctgagagtggccctgagagaggccagagccaccctgagagtgagcgagggcagagccagaggcctgcaggaggccgccagagccagagagctggagctggaggcctgcagccaggagctgcagagacacagacaggaggccgagcagctgagagagaaggccggccagctggacgccgaggccgccggcctgagagagccccccgtgccccccgccaccgccgaccccttcctgctggccgagagcgacgaggccaaggtgcagagagccgccgccggcgtgggcggcagcctgagagcccaggtggagagactgagagtggagctgcagagagagagaagaagaggcgaggagcagagagacagcttcgagggcgagagactggcctggcaggccgagaaggagcaggtgatcagataccagaagcagctgcagcacaactacatccagatgtacagaagaaacagacagctggagcaggagctgcagcagctgagcctggagctggaggccagagagctggccgacctgggcctggccgagcaggccccctgcatctgcctggaggagatcaccgccaccgagatctag

SEQ ID NO: 10761 - DNA, 2010 bp, synthetic construct; identical to SEQ ID NO: 10760
  source 1..2010: mol_type = other DNA; note = Synthetic coding sequence

SEQ ID NO: 10762 - DNA, 1059 bp, synthetic construct
  source 1..1059: mol_type = other DNA; note = Synthetic coding sequence
atgaagctgaaggagctggagagacccgccgtgcaggcctggagccccgccagccagtaccccctgtacctggccaccggcaccagcgcccagcagctggacagcagcttcagcaccaacggcaccctggagatcttcgaggtggacttcagagaccccagcctggacctgaagcacagaggcgtgctgagcgccctgagcagattccacaagctggtgtggggcagcttcggcagcggcctgctggagagcagcggcgtgatcgtgggcggcggcgacaacggcatgctgatcctgtacaacgtgacccacatcctgagcagcggcaaggagcccgtgatcgcccagaagcagaagcacaccggcgccgtgagagccctggacctgaaccccttccagggcaacctgctggccagcggcgccagcgacagcgagatcttcatctgggacctgaacaacctgaacgtgcccatgaccctgggcagcaagagccagtaccacgagcagccccccgaggacatcaaggccctgagctggaacagacaggcccagcacatcctgagcagcgcccaccccagcggcaaggccgtggtgtgggacctgagaaagaacgagcccatcatcaaggtgagcgaccacagcaacagaatgcactgcagcggcctggcctggcaccccgacatcgccacccagctggtgctgtgcagcgaggacgacagactgcccgtgatccagctgtgggacctgagattcgccagcagccccctgaaggtgctggagagccacagcagaggcatcctgagcgtgagctggagccaggccgacgccgagctgctgctgaccagcgccaaggacagccagatcctgtgcagaaacctgggcagcagcgaggtggtgtacaagctgcccacccagagcagctggtgcttcgacgtgcagtggtgccccagagaccccagcgtgttcagcgccgccagcttcaacggctggatcagcctgtacagcgtgatgggcagaagctgggaggtgcagcacatgagacaggccgacaaggtgtag

SEQ ID NO: 10763 - DNA, 3540 bp, synthetic construct
  source 1..3540: mol_type = other DNA; note = Synthetic coding sequence
atgaagctgaaggagctggagagacccgccgtgcaggcctggagccccgccagccagtaccccctgtacctggccaccggcaccagcgcccagcagctggacagcagcttcagcaccaacggcaccctggagatcttcgaggtggacttcagagaccccagcctggacctgaagcacagaggcgtgctgagcgccctgagcagattccacaagctggtgtggggcagcttcggcagcggcctgctggagagcagcggcgtgatcgtgggcggcggcgacaacggcatgctgatcctgtacaacgtgacccacatcctgagcagcggcaaggagcccgtgatcgcccagaagcagaagcacaccggcgccgtgagagccctggacctgaaccccttccagggcaacctgctggccagcggcgccagcgacagcgagatcttcatctgggacctgaacaacctgaacgtgcccatgaccctgggcagcaagagccagcagccccccgaggacatcaaggccctgagctggaacagacaggcccagcacatcctgagcagcgcccaccccagcggcaaggccgtggtgtgggacctgagaaagaacgagcccatcatcaaggtgagcgaccacagcaacagaatgcactgcagcggcctggcctggcaccccgacatcgccacccagctggtgctgtgcagcgaggacgacagactgcccgtgatccagctgtgggacctgagattcgccagcagccccctgaaggtgctggagagccacagcagaggcatcctgagcgtgagctggagccaggccgacgccgagctgctgctgaccagcgccaaggacagccagatcctgtgcagaaacctgggcagcagcgaggtggtgtacaagctgcccacccagagcagctggtgcttcgacgtgcagtggtgccccagagaccccagcgtgttcagcgccgccagcttcaacggctggatcagcctgtacagcgtgatgggcagaagctgggaggtgcagcacatgagacaggccgacaagatcagcagcagcttcagcaagggccagcccctgccccccctgcaggtgcccgagcaggtggcccaggcccccctgatcccccccctgaagaagccccccaagtggatcagaagacccaccggcgtgagcttcgccttcggcggcaagctggtgaccttcggcctgcccagcacccccgcccacctggtgccccagccctgccccagactggtgttcatcagccaggtgaccaccgagagcgagttcctgatgagaagcgccgagctgcaggaggccctgggcagcggcaacctgctgaactactgccagaacaagagccagcaggccctgctgcagagcgagaagatgctgtggcagttcctgaaggtgaccctggagcaggacagcagaatgaagttcctgaagctgctgggctacagcaaggacgagctgcagaagaaggtggccacctggctgaagagcgacgtgggcctgggcgagagcccccagcccaagggcaacgacctgaacagcgacagacagcaggccttctgcagccaggccagcaagcacaccaccaaggaggccagcgccagcagcgccttcttcgacgagctggtgccccagaacatgaccccctgggagatccccatcaccaaggacatcgacggcctgctgagccaggccctgctgctgggcgagctgggccccgccgtggagctgtgcctgaaggaggagagattcgccgacgccatcatcctggcccaggccggcggcaccgacctgctgaagcagacccaggagagatacctggccaagaagaagaccaagatcagcagcctgctggcctgcgtggtgcagaagaactggaaggacgtggtgtgcacctgcagcctgaagaactggagagaggccctggccctgctgctgacctacagcggcaccgagaagttccccgagctgtgcgacatgctgggcaccagaatggagcaggagggcagcagagccctgaccagcgaggccagactgtgctacgtgtgcagcggcagcgtggagagactggtggagtgctgggccaagtgccaccaggccctgagccccatggccctgcaggacctgatggagaaggtgatggtgctgaacagaagcctggagcagctgagaggcccccacggcgtgagccccggccccgccaccacctacagagtgacccagtacgccaacctgctggccgcccagggcagcctggccaccgccatgagcttcctgcccagagactgcgcccagccccccgtgcagcagctgagagacagactgttccacgcccagggcagcgccgtgctgggccagcagagcccccccttccccttccccagaatcgtggtgggcgccaccctgcacagcaaggagaccagcagctacagactgggcagccagcccagccaccaggtgcccacccccagccccagacccagagtgttcaccccccagagcagccccgccatgcccctggcccccagccaccccagcccctaccagggccccagaacccagaacatcagcgactacagagcccccggcccccaggccatccagcccctgcccctgagccccggcgtgagacccgccagcagccagccccagctgctgggcggccagagagtgcaggtgcccaaccccgtgggcttccccggcacctggcccctgcccggcagccccctgcccatggcctgccccggcatcatgagacccggcagcaccagcctgcccgagacccccagactgttccccctgctgcccctgagacccctgggccccggcagaatggtgagccacacccccgccccccccgccagcttccccgtgccctacctgcccggcgaccccggcgccccctgcagcagcgtgctgcccaccaccggcatcctgaccccccaccccggcccccaggacagctggaaggaggcccccgcccccagaggcaacctgcagagaaacaagctgcccgagaccttcatgccccccgcccccatcaccgcccccgtgatgagcctgacccccgagctgcagggcatcctgcccagccagccccccgtgagcagcgtgagccacgccccccccggcgtgcccggcgagctgagcctgcagctgcagcacctgccccccgagaagatggagagaaaggagctgccccccgagcaccagagcctgaagagcagcttcgaggccctgctgcagagatgcagcctgagcgccaccgacctgaagaccaagagaaagctggaggaggccgcccagagactggagtacctgtacgagaagctgtgcgagggcaccctgagcccccacgtggtggccggcctgcacgaggtggccagatgcgtggacgccggcagcttcgagcagggcctggccgtgcacgcccaggtggccggctgcagcagcttcagcgaggtgagcagcttcatgcccatcctgaaggccgtgctgatcatcgcccacaagctgctggtgtag

SEQ ID NO: 10764 - DNA, 1635 bp, synthetic construct; identical to SEQ ID NO: 9499
  source 1..1635: mol_type = other DNA; note = Synthetic coding sequence

SEQ ID NO: 10765 - DNA, 1689 bp, synthetic construct; identical to SEQ ID NO: 10374
  source 1..1689: mol_type = other DNA; note = Synthetic coding sequence

SEQ ID NO: 10766 - DNA, 1689 bp, synthetic construct; identical to SEQ ID NO: 10374
  source 1..1689: mol_type = other DNA; note = Synthetic coding sequence

SEQ ID NO: 10767 - DNA, 1272 bp, synthetic construct
  source 1..1272: mol_type = other DNA; note = Synthetic coding sequence
atggaggacaagagaagcctgagcatggccagatgcgaggagagaaacagcagaggccaggaccacggcctggagagagtgcccttccccccccagctgcagagcgagacctacctgcaccccgccgaccccagccccgcctgggacgaccccggcagcaccggcagccccaacctgagactgctgaccgaggagatcgccttccagcccctggccgaggaggccagcttcagaagaccccaccccgacggcgacgtgcccccccagggcgaggacaacctgctgagcctgcccttcccccagaagctgtggagactggtgagcagcaaccagttcagcagcatctggtgggacgacagcggcgcctgcagagtgatcaaccagaagctgttcgagaaggagatcctgaagagagacgtggcccacaaggtgttcgccaccaccagcatcaagagcttcttcagacagctgaacctgtacggcttcagaaagagaagacagtgcaccttcagaaccttcaccagaatcttcagcgccaagagactggtgagcatcctgaacaagctggagttctactgccacccctacttccagagagacagcccccacctgctggtgagaatgaagagaagagtgggcgtgaagagcgcccccagacaccaggaggaggacaagcccgaggccgccggcagctgcctggcccccgccgacaccgagcagcaggaccacaccagccccaacgagaacgaccaggtgaccccccagcacagagagcccgccggccccaacacccagatcagaagcggcagcgccccccccgccacccccgtgatggtgcccgacagcgccgtggccagcgacaacagccccgtgacccagcccgccggcgagtggagcgagggcagccaggcccacgtgacccccgtggccgccgtgcccggccccgccgccctgcccttcctgtacgtgcccggcagccccacccagatgaacagctacggccccgtggtggccctgcccaccgccagcagaagcaccctggccatggacaccaccggcctgcccgcccccggcatgctgcccttctgccacctgtgggtgcccgtgaccctggtggccgccggcgccgcccagcccgccgccagcatggtgatgttcccccacctgcccgccctgcaccaccactgcccccacagccacagaaccagccagtacatgcccgccagcgacggcccccaggcctaccccgactacgccgaccagagcacctag

SEQ ID NO: 10768 - DNA, 675 bp, synthetic construct
  source 1..675: mol_type = other DNA; note = Synthetic coding sequence
atgcccaccctgttcaagggcgtgtggggcgtggtggagcacagcagagccctgggcagattctgccccgcctgcctgcccagcggcccccacctgcacacccagcccgccctgggcaccgccgagatgaccctgctgagcagccagagcagcagcctggtggcccccagcggcagcgtgagcgccgagaaccccgagcagagaatgctggagaagagagccaaggtgatcgaggagctgctgcagaccgagagagactacatcagagacctggagatgtgcatcgagagaatcatggtgcccatgcagcaggcccaggtgcccaacatcgacttcgagggcctgttcggcaacatgcagatggtgatcaaggtgagcaagcagctgctggccgccctggagatcagcgacgccgtgggccccgtgttcctgggccacagagacgagctggagggcacctacaagatctactgccagaaccacgacgaggccatcgccctgctggagatctacgagaaggacgagaagatccagaagcacctgcaggacagcctggccgacctgaacagcctggtgctgaagaagggctgcaccaactacatcaacctgggcagcttcctgatcaagcccgtgcagagagtgatgagataccccctgctgctgatggagctgtag

SEQ ID NO: 10769 - DNA, 1878 bp, synthetic construct
  source 1..1878: mol_type = other DNA; note = Synthetic coding sequence
atgagactgcccgagagacacggcggcccccagggcagcctgtgcctgatggacccctgctgccccctgagcctggccctgcaggacctggtggagagagactgcaacggcgacacccccaacctgagcttctacagaaacgagatcagattcctgcccaacggctgcttcatcgaggacatcctgcagaactggaccgacaactacgacctgctggaggacaaccacagctacatccagtggctgttccccctgagagagcccggcgtgaactggcacgccaagcccctgaccctgagagaggtggaggtgttcaagagcagccaggagatccaggagagactggtgagagcctacgagctgatgctgggcttctacggcatcagactggaggacagaggcaccggcaccgtgggcagagcccagaactaccagaagagattccagaacctgaactggagaagccacaacaacctgagaatcaccagaatcctgaagagcctgggcgagctgggcctggagcacttccaggcccccctggtgagattcttcctggaggagaccctggtgagaagagagctgcccggcgtgagacagagcgccctggactacttcatgttcgccgtgagatgcagacaccagagaagacagctggtgcacttcgcctgggagcacttcagacccagatgcaagttcgtgtggggcccccaggacaagctgagaagattcaagcccagcagcctgccccaccccctggagggcagcagaaaggtggaggaggagggcagccccggcgaccccgaccacgaggccagcacccagggcagaacctgcggccccgagcacagcaagggcggcggcagagtggacgagggcccccagcccagaagcgtggagccccaggacgccggccccctggagagaagccagggcgacgaggccggcggccacggcgaggacagacccgagcccctgagccccaaggagagcaagaagagaaagctggagctgagcagaagagagcagccccccaccgagcccggcccccagagcgccagcgaggtggagaagatcgccctgaacctggagggctgcgccctgagccagggcagcctgagaaccggcacccaggaggtgggcggccaggaccccggcgaggccgtgcagccctgcagacagcccctgggcgccagagtggccgacaaggtgagaaagagaagaaaggtggacgagggcgccggcgacagcgccgccgtggccagcggcggcgcccagaccctggccctggccggcagccccgcccccagcggccaccccaaggccggccacagcgagaacggcgtggaggaggacaccgagggcagaaccggccccaaggagggcacccccggcagccccagcgagacccccggccccagccccgccggccccgccggcgacgagcccgccgagagccccagcgagacccccggccccagacccgccggccccgccggcgacgagcccgccgagagccccagcgagacccccggccccagacccgccggccccgccggcgacgagcccgccgagagccccagcgagacccccggccccagccccgccggccccaccagagacgagcccgccgagagccccagcgagacccccggccccagacccgccggccccgccggcgacgagcccgccgagagccccagcgagacccccggccccagacccgccggccccgccggcgacgagcccgccgagagccccagcgagacccccggccccagccccgccggccccaccagagacgagcccgccaaggccggcgaggccgccgagctgcaggacgccgaggtggagagcagcgccaagagcggcaagccctag

SEQ ID NO: 10770 - DNA, 1386 bp, synthetic construct
  source 1..1386: mol_type = other DNA; note = Synthetic coding sequence
atggacgaccccgactgcgacagcacctgggaggaggacgaggaggacgccgaggacgccgaggacgaggactgcgaggacggcgaggccgccggcgccagagacgccgacgccggcgacgaggacgaggagagcgaggagcccagagccgccagacccagcagcttccagagcagaatgaccggcagcagaaactggagagccaccagagacatgtgcagatacagacacaactaccccgacctggtggagagagactgcaacggcgacacccccaacctgagcttctacagaaacgagatcagattcctgcccaacggctgcttcatcgaggacatcctgcagaactggaccgacaactacgacctgctggaggacaaccacagctacatccagtggctgttccccctgagagagcccggcgtgaactggcacgccaagcccctgaccctgagagaggtggaggtgttcaagagcagccaggagatccaggagagactggtgagagcctacgagctgatgctgggcttctacggcatcagactggaggacagaggcaccggcaccgtgggcagagcccagaactaccagaagagattccagaacctgaactggagaagccacaacaacctgagaatcaccagaatcctgaagagcctgggcgagctgggcctggagcacttccaggcccccctggtgagattcttcctggaggagaccctggtgagaagagagctgcccggcgtgagacagagcgccctggactacttcatgttcgccgtgagatgcagacaccagagaagacagctggtgcacttcgcctgggagcacttcagacccagatgcaagttcgtgtggggcccccaggacaagctgagaagattcaagcccagcagcctgccccaccccctggagggcagcagaaaggtggaggaggagggcagccccggcgaccccgaccacgaggccagcacccagggcagaacctgcggccccgagcacagcaagggcggcggcagagtggacgagggcccccagcccagaagcgtggagccccaggacgccggccccctggagagaagccagggcgacgaggccggcggccacggcgaggacagacccgagcccctgagccccaaggagagcaagaagagaaagctggagctgagcagaagagagcagccccccaccgagcccggcccccagagcgccagcgaggtggagaagatcgccctgaacctggagggctgcgccctgagccagggcagcctgagaaccggcacccaggaggtgggcggccaggaccccggcgagagcagctgcccctgctgcagaggctggggcctgagaagctgctgcggcctgcccagcggcagcgccagctag

SEQ ID NO: 10771 - DNA, 1539 bp, synthetic construct
  source 1..1539: mol_type = other DNA; note = Synthetic coding sequence
atgcccagccccagcagaagcggcagaagcagatgcctgaaggcccccagaagaagcagaagcggcctgagcggccccaccagcagctgctgggccagcaccatcagactggaggacagaggcaccggcaccgtgggcagagcccagaactaccagaagagattccagaacctgaactggagaagccacaacaacctgagaatcaccagaatcctgaagagcctgggcgagctgggcctggagcacttccaggcccccctggtgagattcttcctggaggagaccctggtgagaagagagctgcccggcgtgagacagagcgccctggactacttcatgttcgccgtgagatgcagacaccagagaagacagctggtgcacttcgcctgggagcacttcagacccagatgcaagttcgtgtggggcccccaggacaagctgagaagattcaagcccagcagcctgccccaccccctggagggcagcagaaaggtggaggaggagggcagccccggcgaccccgaccacgaggccagcacccagggcagaacctgcggccccgagcacagcaagggcggcggcagagtggacgagggcccccagcccagaagcgtggagccccaggacgccggccccctggagagaagccagggcgacgaggccggcggccacggcgaggacagacccgagcccctgagccccaaggagagcaagaagagaaagctggagctgagcagaagagagcagccccccaccgagcccggcccccagagcgccagcgaggtggagaagatcgccctgaacctggagggctgcgccctgagccagggcagcctgagaaccggcacccaggaggtgggcggccaggaccccggcgaggccgtgcagccctgcagacagcccctgggcgccagagtggccgacaaggtgagaaagagaagaaaggtggacgagggcgccggcgacagcgccgccgtggccagcggcggcgcccagaccctggccctggccggcagccccgcccccagcggccaccccaaggccggccacagcgagaacggcgtggaggaggacaccgagggcagaaccggccccaaggagggcacccccggcagccccagcgagacccccggccccagccccgccggccccgccggcgacgagcccgccgagagccccagcgagacccccggccccagacccgccggccccgccggcgacgagcccgccgagagccccagcgagacccccggccccagccccgccggccccaccagagacgagcccgccgagagccccagcgagacccccggccccagacccgccggccccgccggcgacgagcccgccgagagccccagcgagacccccggccccagacccgccggccccgccggcgacgagcccgccgagagccccagcgagacccccggccccagccccgccggccccaccagagacgagcccgccaaggccggcgaggccgccgagctgcaggacgccgaggtggagagcagcgccaagagcggcaagccctag

SEQ ID NO: 10772 - DNA, 312 bp, synthetic construct
  source 1..312: mol_type = other DNA; note = Synthetic coding sequence
atgggccagcagagcagcgtgagaagactgaagagaagcgtgccctgcgagagcaacgaggccaacgaggccaacgaggccaacaagaccatgcccgagacccccaccggcgacagcgacccccagcccgcccccaagaagatgaagaccagcgagagcagcaccatcctggtggtgagatacagaagaaacgtgaagagaaccagccccgaggagctggtgaacgaccacgccagagagaacagaatcaaccccgaccagatggaggaggaggagttcatcgagatcaccaccgagagacccaagaagtag

SEQ ID NO: 10773 - DNA, 1776 bp, synthetic construct
  source 1..1776: mol_type = other DNA; note = Synthetic coding sequence
atggagaaggccgtgaacgacggcagccacagcgaggagctgttctgccacctgaagaccatcagcgagaaggaggacctgcccagatgcaccagcgagagccacctgagctgcctgaagcaggacatcctgaacgagaagaccgagctggaggccaccctgaaggaggccgagctggtgacccacagcgtggagctgctgctgcccctgttcaaggacaccatcgagaagatcaacttcgagaacgccaacctgagcgccctgaacctgaagatcagcgagcagaaggagatcctgatcaaggagctggacaccttcaagagcgtgaagctggccctggagcacctgctgagaaagagagactacaagcagaccggcgacaacctgagcagcatgctgctggagaacctgaccgacaacgagagcgagaacaccaacctgaagaagaaggtgttcgagaaggaggcccacatccaggagctgagctgcctgttccagagcgagaaggccaacaccctgaaggccaacagattcagccagagcgtgaaggtggtgcacgagagactgcagatccagatccacaagagagaggccgagaacgacaagctgaaggagtacgtgaagagcctggagaccaagatcgccaagtggaacctgcagagcagaatgaacaagaacgaggccatcgtgatgaaggaggccagcagacagaagaccgtggccctgaagaaggccagcaaggtgtacaagcagagactggaccacttcaccggcgccatcgagaagctgaccagccagatcagagaccaggaggccaagctgagcgagaccatcagcgccagcaacgcctggaagagccactacgagaagatcgtgatcgagaagaccgagctggaggtgcagatcgagaccatgaagaagcagatcatcaacctgctggaggacctgaagaagatggaggaccacggcaagaacagctgcgaggagatcctgagaaaggtgcacagcatcgagtacgagaacgagaccctgaacctggagaacaccaagctgaagaccaccctggccgccctgaaggacgaggtggtgagcgtggagaacgagctgagcgagctgcaggaggtggagaagaagcagaagaccctgatcgagatgtacaagacccaggtgcagaagctgcaggaggccgccgagatcgtgaagagcagatgcgagaacctgctgcacaagaacaaccagatcaccaagaccaagaacaagaacgtggagaaggtggacggcaaccacaacctgctgaccaagctgagcctggaggaggagaactgcctgatccagctgaagtgcgagaacctgcagcagaagctggagcagatggacgccgagaacaaggagctggagaagaagctggccaaccaggaggagtgcctgaagcacagcaacctgaagttcaaggagaagagcgccgagtacaccgccctggccagacagctggaggccgccctggaggagggcagacagaaggtggccgaggagatcgagaagatgagcagcagagagagcgccctgcagatcaagatcctggacctggagaccgagctgagaaagaagaacgaggagcagaaccagctggtgtgcaagatgaacagcaaggcccagcaccaggaggtgtgcctgaaggaggtgcagaacagcctggagaagagcgagaaccagaacgagagcatcaagaactacctgcagttcctgaagaccagctacgtgaccatgttcgagtag

SEQ ID NO: 10774 - DNA, 1935 bp, synthetic construct
  source 1..1935: mol_type = other DNA; note = Synthetic coding sequence
atggagaaggccgtgaacgacggcagccacagcgaggagctgttctgccacctgaagaccatcagcgagaaggaggacctgcccagatgcaccagcgagagccacctgagctgcctgaagcaggacatcctgaacgagaagaccgagctggaggccaccctgaaggaggccgagctggtgacccacagcgtggagctgctgctgcccctgttcaaggacaccatcgagaagatcaacttcgagaacgccaacctgagcgccctgaacctgaagatcagcgagcagaaggagatcctgatcaaggagctggacaccttcaagagcgtgaagctggccctggagcacctgctgagaaagagagactacaagcagaccggcgacaacctgagcagcatgctgctggagaacctgaccgacaacgagagcgagaacaccaacctgaagaagaaggtgttcgagaaggaggcccacatccaggagctgagctgcctgttccagagcgagaaggccaacaccctgaaggccaacagattcagccagagcgtgaaggtggtgcacgagagactgcagatccagatccacaagagagaggccgagaacgacaagctgaaggagtacgtgaagagcctggagaccaagatcgccaagtggaacctgcagagcagaatgaacaagaacgaggccatcgtgatgaaggaggccagcagacagaagaccgtggccctgaagaaggccagcaaggtgtacaagcagagactggaccacttcaccggcgccatcgagaagctgaccagccagatcagagaccaggaggccaagctgagcgagaccatcagcgccagcaacgcctggaagagccactacgagaagatcgtgatcgagaagaccgagctggaggtgcagatcgagaccatgaagaagcagatcatcaacctgctggaggacctgaagaagatggaggaccacggcaagaacagctgcgaggagatcctgagaaaggtgcacagcatcgagtacgagaacgagaccctgaacctggagaacaccaagctgaagaccaccctggccgccctgaaggacgaggtggtgagcgtggagaacgagctgagcgagctgcaggaggtggagaagaagcagaagaccctgatcgagatgtacaagacccaggtgcagaagctgcaggaggccgccgagatcgtgaagagcagatgcgagaacctgctgcacaagaacaaccagatcaccaagaccaagaacaagaacgtggagaagatgagaggccagatggagagccacctgaaggagctggagagagtgtgcgacagcctgaccgccgccgagagaagactgcacgagtgccaggagagcctgcagtgctgcaagggcaagtgcgccgaccaggagcacaccatcagagagctgcagggccaggtggacggcaaccacaacctgctgaccaagctgagcctggaggaggagaactgcctgatccagctgaagtgcgagaacctgcagcagaagctggagcagatggacgccgagaacaaggagctggagaagaagctggccaaccaggaggagtgcctgaagcacagcaacctgaagttcaaggagaagagcgccgagtacaccgccctggccagacagctggaggccgccctggaggagggcagacagaaggtggccgaggagatcgagaagatgagcagcagagagagcgccctgcagatcaagatcctggacctggagaccgagctgagaaagaagaacgaggagcagaaccagctggtgtgcaagatgaacagcaaggcccagcaccaggaggtgtgcctgaaggaggtgcagaacagcctggagaagagcgagaaccagaacgagagcatcaagaactacctgcagttcctgaagaccagctacgtgaccatgttcgagtag

SEQ ID NO: 10775 - DNA, 2526 bp, synthetic construct
  source 1..2526: mol_type = other DNA; note = Synthetic coding sequence
atgatggccgacggcgccgccgccggcgccggcggcagccccagcctgagagagctgagagccagaatggtggccgccgccaacgagatcgccaaggagagaagaaagcaggacgtggtgaacagagtggccacccacagcagcaacatcagaagcaccttcaagcccgtgatcgacggcagcatgctgaagaacgacatcaagcagagactggccagagagagaagagaggagaagagaagacagcaggacgccaacaaggagacccagctgctggagaaggagagaaagaccaagctgcagtacgagaagcagatggaggagagacagagaaagctgaaggagagaaaggagaaggaggagcagagaagaatcgccgccgaggagaagagacaccagaaggacgaggcccagaaggagaagttcaccgccatcctgtacagaaccctggagagaagaagactggccgacgactaccagcagaagagatggagctggggcggcagcgccatggccaacagcgagagcaagaccggcaagaccgacaaggagagaagcagcagcctgaacagaagagacagcaacctgcacagcagcaccgacaaggagcaggccgagagaaagcccagagtgaccggcgtgaccaactacgtgatgcagtacgtgaccgtgcccctgagaaagtgcaccagcgacgagctgagagccgtgatgttccccatgagcaccatgaagatccccccccagaccaaggtggaggagagccccctggagaaggtggagaccccccccaaggccagcgtggacgcccccccccaggtgaacgtggaggtgttctgcaacaccagcatggaggccagccccaaggccggcgtgggcatggcccccgaggtgagcaccgacagcttccccgtggtgagcgtggacgtgagccccgtggtgagcacctacgacagcgagatgagcatggacgccagccccgagctgagcatcgaggccctgcccaaggtggacctggagaccgtgcccaaggtgagcatcgtggccagccccgaggccagcctggaggccccccccgaggtgagcctggaggccctgcccgaggtgagcgtggaggccgcccccgagggcagcctggaggccccccccaagggcagcgccgaggtggcccccaaggagagcgtgaagggcagccccaaggagagcatggaggccagccccgaggccatggtgaaggccagccccaagaccagcctggaggccagcatggaggccagccccaaggccaaggccagagacgcccccaagaagagcgagatggacaagcaggccctgatccccatcgccaagaagagactgagcagctacaccgagtgctacaagtggagcagcagccccgagaacgcctgcggcctgcccagccccatcagcaccaacagacagatccagaagaactgcccccccagccccctgcccctgatcagcaagcagagcccccagaccagcttcccctacaagatcatgcccatccagcacaccctgagcgtgcagagcgccagcagcaccgtgaagaagaagaaggagaccgtgagcaagaccaccaacagatgcgaggccctgagccagagacacatgatctacgaggagagcggcaacaagagcaccgccggcatcatgaacgccgaggccgccaccaagatcctgaccgagctgagaagactggccagagagcagagagagaaggaggaggaggagagacagagagaggagatgcagcagagagtgatcaagaagagcaaggacatggccaaggaggccgtgggcggccaggccgaggaccacctgaagctgaaggacggccagcagcagaacgagaccaagaagaagaagggctggctggaccaggaggaccaggaggcccccctgcagaagggcgacgccaagatcaaggcccaggaggaggccgacaagagaaagaaggagcacgagagaatcatgctgcagaacctgcaggagagactggagagaaagaagagaatcgaggagatcatgaagagaaccagaaagaccgacgtgaacgccagcaaggtgaccgagaccagcagccacgacatctacgaggaggccgaggccgacaacgaggagagcgacaaggacagcctgaacgagatgttccccagcgccatcctgaacggcaccggcagccccaccaagttcaagatgcccttcaacaacgccaagaagatgacccacaagctggtgttcctggaggacggcaccagccaggtgagaaaggagcccaagacctacttcaacggcgacctgaagaacttcagacagaagagcatgaaggacaccagcatccaggaggtggtgagcagacccagcagcaagagaatgaccagccacaccaccaagaccagaaaggccgacgagaccaacaccaccagcagaagcagcgcccagaccaagagcgagggcttccacgacatcctgcccaagagcagcgacaccttcagacagtag

SEQ ID NO: 10776 - DNA, 2577 bp, synthetic construct
  source 1..2577: mol_type = other DNA; note = Synthetic coding sequence
atgaccagccccagagtggccgccgccaacgagatcgccaaggagagaagaaagcaggacgtggtgaacagagtggccacccacagcagcaacatcagaagcaccttcaagcccgtgatcgacggcagcatgctgaagaacgacatcaagcagagactggccagagagagaagagaggagaagagaagacagcaggacgccaacaaggagacccagctgctggagaaggagagaaagaccaagctgcagtacgagaagcagatggaggagagacagagaaagctgaaggagagaaaggagaaggaggagcagagaagaatcgccgccgaggagaagagacaccagaaggacgaggcccagaaggagaagttcaccgccatcctgtacagaaccctggagagaagaagactggccgacgactaccagcagaagagatggagctggggcggcagcgccatggccaacagcgagagcaagaccgccaacaagagaagcgccagcaccgagaagctggagcagggcaccagcgccctgatcagacagatgcccctgagcagcgccggcctgcagaacagcgtggccaagagaaagaccgacaaggagagaagcagcagcctgaacagaagagacagcaacctgcacagcagcaccgacaaggagcaggccgagagaaagcccagagtgaccggcgtgaccaactacgtgatgcagtacgtgaccgtgcccctgagaaagtgcaccagcgacgagctgagagccgtgatgttccccatgagcaccatgaagatccccccccagaccaaggtggaggagagccccctggagaaggtggagaccccccccaaggccagcgtggacgcccccccccaggtgaacgtggaggtgttctgcaacaccagcatggaggccagccccaaggccggcgtgggcatggcccccgaggtgagcaccgacagcttccccgtggtgagcgtggacgtgagccccgtggtgagcacctacgacagcgagatgagcatggacgccagccccgagctgagcatcgaggccctgcccaaggtggacctggagaccgtgcccaaggtgagcatcgtggccagccccgaggccagcctggaggccccccccgaggtgagcctggaggccctgcccgaggtgagcgtggaggccgcccccgagggcagcctggaggccccccccaagggcagcgccgaggtggcccccaaggagagcgtgaagggcagccccaaggagagcatggaggccagccccgaggccatggtgaaggccagccccaagaccagcctggaggccagcatggaggccagccccaaggccaaggccagagacgcccccaagaagagcgagatggacaagcaggccctgatccccatcgccaagaagagactgagcagctacaccgagtgctacaagtggagcagcagccccgagaacgcctgcggcctgcccagccccatcagcaccaacagacagatccagaagaactgcccccccagccccctgcccctgatcagcaagcagagcccccagaccagcttcccctacaagatcatgcccatccagcacaccctgagcgtgcagagcgccagcagcaccgtgaagaagaagaaggagaccgtgagcaagaccaccaacagatgcgaggccctgagccagagacacatgatctacgaggagagcggcaacaagagcaccgccggcatcatgaacgccgaggccgccaccaagatcctgaccgagctgagaagactggccagagagcagagagagaaggaggaggaggagagacagagagaggagatgcagcagagagtgatcaagaagagcaaggacatggccaaggaggccgtgggcggccaggccgaggaccacctgaagctgaaggacggccagcagcagaacgagaccaagaagaagaagggctggctggaccaggaggaccaggaggcccccctgcagaagggcgacgccaagatcaaggcccaggaggaggccgacaagagaaagaaggagcacgagagaatcatgctgcagaacctgcaggagagactggagagaaagaagagaatcgaggagatcatgaagagaaccagaaagaccgacgtgaacgccagcaaggtgaccgagaccagcagccacgacatctacgaggaggccgaggccgacaacgaggagagcgacaaggacagcctgaacgagatgttccccagcgccatcctgaacggcaccggcagccccaccaagttcaagatgcccttcaacaacgccaagaagatgacccacaagctggtgttcctggaggacggcaccagccaggtgagaaaggagcccaagacctacttcaacggcgacctgaagaacttcagacagaagagcatgaaggacaccagcatccaggaggtggtgagcagacccagcagcaagagaatgaccagccacaccaccaagaccagaaaggccgacgagaccaacaccaccagcagaagcagcgcccagaccaagagcgagggcttccacgacatcctgcccaagagcagcgacaccttcagacagtag

SEQ ID NO: 10777 - DNA, 948 bp, synthetic construct
  source 1..948: mol_type = other DNA; note = Synthetic coding sequence
atgcccctgaagctgagaggcaagaagaaggccaagagcaaggagaccgccggcctggtggagggcgagcccaccggcgccggcggcggcagcctgagcgccagcagagcccccgccagaagactggtgttccacgcccagctggcccacggcagcgccaccggcagagtggagggcttcagcagcatccaggagctgtacgcccagatcgccggcgccttcgagatcagccccagcgagatcctgtactgcaccctgaacacccccaagatcgacatggagagactgctgggcggccagctgggcctggaggacttcatcttcgcccacgtgaagggcatcgagaaggaggtgaacgtgtacaagagcgaggacagcctgggcctgaccatcaccgacaacggcgtgggctacgccttcatcaagagaatcaaggacggcggcgtgatcgacagcgtgaagaccatctgcgtgggcgaccacatcgagagcatcaacggcgagaacatcgtgggctggagacactacgacgtggccaagaagctgaaggagctgaagaaggaggagctgttcaccatgaagctgatcgagcccaagaaggccttcgagatcgagctgagaagcaaggccggcaagagcagcggcgagaagatcggctgcggcagagccaccctgagactgagaagcaagggccccgccaccgtggaggagatgcccagcgagaccaaggccaaggccatcgagaagatcgacgacgtgctggagctgtacatgggcatcagagacatcgacctggccaccaccatgttcgaggccggcaaggacaaggtgaaccccgacgagttcgccgtggccctggacgagaccctgggcgacttcgccttccccgacgagttcgtgttcgacgtgtggggcgtgatcggcgacgccaagagaagaggcctgtag

SEQ ID NO: 10778 - DNA, 2487 bp, synthetic construct
  source 1..2487: mol_type = other DNA; note = Synthetic coding sequence
atgaccggcagcaacagccacatcaccatcctgaccctgaaggtgctgccccacttcgagagcctgggcaagcaggagaagatccccaacaagatgagcgccttcagaaaccactgcccccacctggacagcgtgggcgagatcaccaaggaggacctgatccagaagagcctgggcacctgccaggactgcaaggtgcagggccccaacctgtgggcctgcctggagaacagatgcagctacgtgggctgcggcgagagccaggtggaccacagcaccatccacagccaggagaccaagcactacctgaccgtgaacctgaccaccctgagagtgtggtgctacgcctgcagcaaggaggtgttcctggacagaaagctgggcacccagcccagcctgccccacgtgagacagccccaccagatccaggagaacagcgtgcaggacttcaagatccccagcaacaccaccctgaagacccccctggtggccgtgttcgacgacctggacatcgaggccgacgaggaggacgagctgagagccagaggcctgaccggcctgaagaacatcggcaacacctgctacatgaacgccgccctgcaggccctgagcaactgcccccccctgacccagttcttcctggactgcggcggcctggccagaaccgacaagaagcccgccatctgcaagagctacctgaagctgatgaccgagctgtggcacaagagcagacccggcagcgtggtgcccaccaccctgttccagggcatcaagaccgtgaaccccaccttcagaggctacagccagcaggacgcccaggagttcctgagatgcctgatggacctgctgcacgaggagctgaaggagcaggtgatggaggtggaggaggacccccagaccatcaccaccgaggagaccatggaggaggacaagagccagagcgacgtggacttccagagctgcgagagctgcagcaacagcgacagagccgagaacgagaacggcagcagatgcttcagcgaggacaacaacgagaccaccatgctgatccaggacgacgagaacaacagcgagatgagcaaggactggcagaaggagaagatgtgcaacaagatcaacaaggtgaacagcgagggcgagttcgacaaggacagagacagcatcagcgagaccgtggacctgaacaaccaggagaccgtgaaggtgcagatccacagcagagccagcgagtacatcaccgacgtgcacagcaacgacctgagcaccccccagatcctgcccagcaacgagggcgtgaaccccagactgagcgccagcccccccaagagcggcaacctgtggcccggcctggcccccccccacaagaaggcccagagcgccagccccaagagaaagaagcagcacaagaagtacagaagcgtgatcagcgacatcttcgacggcaccatcatcagcagcgtgcagtgcctgacctgcgacagagtgagcgtgaccctggagaccttccaggacctgagcctgcccatccccggcaaggaggacctggccaagctgcacagcagcagccaccccaccagcatcgtgaaggccggcagctgcggcgaggcctacgccccccagggctggatcgccttcttcatggagtacgtgaagagctggttctggggccccgtggtgaccctgcaggactgcctggccgccttcttcgccagagacgagctgaagggcgacaacatgtacagctgcgagaagtgcaagaagctgagaaacggcgtgaagttctgcaaggtgcagaacttccccgagatcctgtgcatccacctgaagagattcagacacgagctgatgttcagcaccaagatcagcacccacgtgagcttccccctggagggcctggacctgcagcccttcctggccaaggacagccccgcccagatcgtgacctacgacctgctgagcgtgatctgccaccacggcaccgccagcagcggccactacatcgcctactgcagaaacaacctgaacaacctgtggtacgagttcgacgaccagagcgtgaccgaggtgagcgagagcaccgtgcagaacgccgaggcctacgtgctgttctacagaaagagcagcgaggaggcccagaaggagagaagaagaatcagcaacctgctgaacatcatggagcccagcctgctgcagttctacatcagcagacagtggctgaacaagttcaagaccttcgccgagcccggccccatcagcaacaacgacttcctgtgcatccacggcggcgtgccccccagaaaggccggctacatcgaggacctggtgctgatgctgccccagaacatctgggacaacctgtacagcagatacggcggcggccccgccgtgaaccacctgtacatctgccacacctgccagatcgaggccgagaagatcgagaagagaagaaagaccgagctggagatcttcatcagagtgaagaagtag

SEQ ID NO: 10779 - DNA, 2829 bp, synthetic construct; identical to SEQ ID NO: 10447
  source 1..2829: mol_type = other DNA; note = Synthetic coding sequence

SEQ ID NO: 10780 - DNA, 2736 bp, synthetic construct
  source 1..2736: mol_type = other DNA; note = Synthetic coding sequence
atgagcgccttcagaaaccactgcccccacctggacagcgtgggcgagatcaccaaggaggacctgatccagaagagcctgggcacctgccaggactgcaaggtgcagggccccaacctgtgggcctgcctggagaacagatgcagctacgtgggctgcggcgagagccaggtggaccacagcaccatccacagccaggagaccaagcactacctgaccgtgaacctgaccaccctgagagtgtggtgctacgcctgcagcaaggaggtgttcctggacagaaagctgggcacccagcccagcctgccccacgtgagacagccccaccagatccaggagaacagcgtgcaggacttcaagatccccagcaacaccaccctgaagacccccctggtggccgtgttcgacgacctggacatcgaggccgacgaggaggacgagctgagagccagaggcctgaccggcctgaagaacatcggcaacacctgctacatgaacgccgccctgcaggccctgagcaactgcccccccctgacccagttcttcctggactgcggcggcctggccagaaccgacaagaagcccgccatctgcaagagctacctgaagctgatgaccgagctgtggcacaagagcagacccggcagcgtggtgcccaccaccctgttccagggcatcaagaccgtgaaccccaccttcagaggctacagccagcaggacgcccaggagttcctgagatgcctgatggacctgctgcacgaggagctgaaggagcaggtgatggaggtggaggaggacccccagaccatcaccaccgaggagaccatggaggaggacaagagccagagcgacgtggacttccagagctgcgagagctgcagcaacagcgacagagccgagaacgagaacggcagcagatgcttcagcgaggacaacaacgagaccaccatgctgatccaggacgacgagaacaacagcgagatgagcaaggactggcagaaggagaagatgtgcaacaagatcaacaaggtgaacagcgagggcgagttcgacaaggacagagacagcatcagcgagaccgtggacctgaacaaccaggagaccgtgaaggtgcagatccacagcagagccagcgagtacatcaccgacgtgcacagcaacgacctgagcaccccccagatcctgcccagcaacgagggcgtgaaccccagactgagcgccagcccccccaagagcggcaacctgtggcccggcctggcccccccccacaagaaggcccagagcgccagccccaagagaaagaagcagcacaagaagtacagaagcgtgatcagcgacatcttcgacggcaccatcatcagcagcgtgcagtgcctgacctgcgacagagtgagcgtgaccctggagaccttccaggacctgagcctgcccatccccggcaaggaggacctggccaagctgcacagcagcagccaccccaccagcatcgtgaaggccggcagctgcggcgaggcctacgccccccagggctggatcgccttcttcatggagtacgtgaagagattcgtggtgagctgcgtgcccagctggttctggggccccgtggtgaccctgcaggactgcctggccgccttcttcgccagagacgagctgaagggcgacaacatgtacagctgcgagaagtgcaagaagctgagaaacggcgtgaagttctgcaaggtgcagaacttccccgagatcctgtgcatccacctgaagagattcagacacgagctgatgttcagcaccaagatcagcacccacgtgagcttccccctggagggcctggacctgcagcccttcctggccaaggacagccccgcccagatcgtgacctacgacctgctgagcgtgatctgccaccacggcaccgccagcagcggccactacatcgcctactgcagaaacaacctgaacaacctgtggtacgagttcgacgaccagagcgtgaccgaggtgagcgagagcaccgtgcagaacgccgaggcctacgtgctgttctacagaaagagcagcgaggaggcccagaaggagagaagaagaatcagcaacctgctgaacatcatggagcccagcctgctgcagttctacatcagcagacagtggctgaacaagttcaagaccttcgccgagcccggccccatcagcaacaacgacttcctgtgcatccacggcggcgtgccccccagaaaggccggctacatcgaggacctggtgctgatgctgccccagaacatctgggacaacctgtacagcagatacggcggcggccccgccgtgaaccacctgtacatctgccacacctgccagatcgaggccgagaagatcgagaagagaagaaagaccgagctggagatcttcatcagactgaacagagccttccagaaggaggacagccccgccaccttctactgcatcagcatgcagtggttcagagagtgggagagcttcgtgaagggcaaggacggcgacccccccggccccatcgacaacaccaagatcgccgtgaccaagtgcggcaacgtgatgctgagacagggcgccgacagcggccagatcagcgaggagacctggaacttcctgcagagcatctacggcggcggccccgaggtgatcctgagaccccccgtggtgcacgtggaccccgacatcctgcaggccgaggagaagatcgaggtggagaccagaagcctgtag

SEQ ID NO: 10781 - DNA, 465 bp, synthetic construct
  source 1..465: mol_type = other DNA; note = Synthetic coding sequence
atggccccccccgtgagatactgcatccccggcgagagactgtgcaacctggaggagggcagccccggcagcggcacctacaccagacacggctacatcttcagcagcctggccggctgcctgatgaagagcagcgagaacggcgccctgcccgtggtgagcgtggtgagagagaccgagagccagctgctgcccgacgtgggcgccatcgtgacctgcaaggtggagatctacaagagcttcagacccggcgacatcgtgctggccaaggtgatcagcctgggcgacgcccagagcaactacctgctgaccaccgccgagaacgagctgggcgtggtggtggcccacagcgagagcggcatccagatggtgcccatcagctggtgcgagatgcagtgccccaagacccacaccaaggagttcagaaaggtggccagagtgcagcccgagttcctgcagacctag

SEQ ID NO: 10782 - DNA, 513 bp, synthetic construct
  source 1..513: mol_type = other DNA; note = Synthetic coding sequence
atggccccccccgtgagatactgcatccccggcgagagactgtgcaacctggaggagggcagccccggcagcggcacctacaccagacacggctacatcttcagcagcctggccggctgcctgatgaagagcagcgagaacggcgccgtgagcagcatcaacagcagattcgccaaggtgcacatcctgtacgtgggcagcatgcccctgaagaacagcttcagaggcaccatcagaaaggaggacgtgagagccaccgagaaggacaaggtggagatctacaagagcttcagacccggcgacatcgtgctggccaaggtgatcagcctgggcgacgcccagagcaactacctgctgaccaccgccgagaacgagctgggcgtggtggtggcccacagcgagagcggcatccagatggtgcccatcagctggtgcgagatgcagtgccccaagacccacaccaaggagttcagaaaggtggccagagtgcagcccgagttcctgcagacctag

SEQ ID NO: 10783 - DNA, 537 bp, synthetic construct
  source 1..537: mol_type = other DNA; note = Synthetic coding sequence
atggccccccccgtgagatactgcatccccggcgagagactgtgcaacctggaggagggcagccccggcagcggcacctacaccagacacggctacatcttcagcagcctggccggctgcctgatgaagagcagcgagaacggcgccctgcccgtggtgagcgtggtgagagagaccgagagccagctgctgcccgacgtgggcgccatcgtgacctgcaaggtgagcagcatcaacagcagattcgccaaggtgcacatcctgtacgtgggcagcatgcccctgaagaacagcttcagaggcaccatcagaaaggaggacgtgagagccaccgagaaggacaagatcagcctgggcgacgcccagagcaactacctgctgaccaccgccgagaacgagctgggcgtggtggtggcccacagcgagagcggcatccagatggtgcccatcagctggtgcgagatgcagtgccccaagacccacaccaaggagttcagaaaggtggccagagtgcagcccgagttcctgcagacctag

SEQ ID NO: 10784 - DNA, 2811 bp, synthetic construct
  source 1..2811: mol_type = other DNA; note = Synthetic coding sequence
atggccgccgccagagacccccccgaggtgagcctgagagaggccacccagagaaagctgagaagattcagcgagctgagaggcaagctggtggccagaggcgagttctgggacatcgtggccatcaccgccgccgacgagaagcaggagctggcctacaaccagcagctgagcgagaagctgaagagaaaggagctgcccctgggcgtgcagtaccacgtgttcgtggaccccgccggcgccaagatcggcaacggcggcagcaccctgtgcgccctgcagtgcctggagaagctgtacggcgacaagtggaacagcttcaccatcctgctgatccacagcgacgagtggaagaagaaggtgagcgagagctacgtgatcaccatcgagagactggaggacgacctgcagatcaaggagaaggagctgaccgagctgagaaacatcttcggcagcgacgaggccttcagcaaggtgaacctgaactacagaaccgagaacggcctgagcctgctgcacctgtgctgcatctgcggcggcaagaagagccacatcagaaccctgatgctgaagggcctgagacccagcagactgaccagaaacggcttcaccgccctgcacctggccgtgtacaaggacaacgccgagctgatcaccagcctgctgcacagcggcgccgacatccagcaggtgggctacggcggcctgaccgccctgcacatcgccaccatcgccggccacctggaggccgccgacgtgctgctgcagcacggcgccaacgtgaacatccaggacgccgtgttcttcacccccctgcacatcgccgcctactacggccacgagcaggtgaccagactgctgctgaagttcggcgccgacgtgaacgtgagcggcgaggtgggcgacagacccctgcacctggccagcgccaagggcttcctgaacatcgccaagctgctgatggaggagggcagcaaggccgacgtgaacgcccaggacaacgaggaccacgtgcccctgcacttctgcagcagattcggccaccacgacatcgtgaagtacctgctgcagagcgacctggaggtgcagccccacgtggtgaacatctacggcgacacccccctgcacctggcctgctacaacggcaagttcgaggtggccaaggagatcatccagatcagcggcaccgagagcctgaccaaggagaacatcttcagcgagaccgccttccacagcgcctgcacctacggcaagagcatcgacctggtgaagttcctgctggaccagaacgtgatcaacatcaaccaccagggcagagacggccacaccggcctgcacagcgcctgctaccacggccacatcagactggtgcagttcctgctggacaacggcgccgacatgaacctggtggcctgcgaccccagcagaagcagcggcgagaaggacgagcagacctgcctgatgtgggcctacgagaagggccacgacgccatcgtgaccctgctgaagcactacaagagaccccaggacgagctgccctgcaacgagtacagccagcccggcggcgacggcagctacgtgagcgtgcccagccccctgggcaagatcaagagcatgaccaaggagaaggccgacatcctgctgctgagagccggcctgcccagccacttccacctgcagctgagcgagatcgagttccacgagatcatcggcagcggcagcttcggcaaggtgtacaagggcagatgcagaaacaagatcgtggccatcaagagatacagagccaacacctactgcagcaagagcgacgtggacatgttctgcagagaggtgagcatcctgtgccagctgaaccacccctgcgtgatccagttcgtgggcgcctgcctgaacgaccccagccagttcgccatcgtgacccagtacatcagcggcggcagcctgttcagcctgctgcacgagcagaagagaatcctggacctgcagagcaagctgatcatcgccgtggacgtggccaagggcatggagtacctgcacaacctgacccagcccatcatccacagagacctgaacagccacaacatcctgctgtacgaggacggccacgccgtggtggccgacttcggcgagagcagattcctgcagagcctggacgaggacaacatgaccaagcagcccggcaacctgagatggatggcccccgaggtgttcacccagtgcaccagatacaccatcaaggccgacgtgttcagctacgccctgtgcctgtgggagatcctgaccggcgagatccccttcgcccacctgaagcccgccgccgccgccgccgacatggcctaccaccacatcagaccccccatcggctacagcatccccaagcccatcagcagcctgctgatcagaggctggaacgcctgccccgagggcagacccgagttcagcgaggtggtgatgaagctggaggagtgcctgtgcaacatcgagctgatgagccccgccagcagcaacagcagcggcagcctgagccccagcagcagcagcgactgcctggtgaacagaggcggccccggcagaagccacgtggccgccctgagaagcagattcgagctggagtacgccctgaacgccagaagctacgccgccctgagccagagcgccggccagtacagcagccagggcctgagcctggaggagatgaagagaagcctgcagtacacccccatcgacaagtacggctacgtgagcgaccccatgagcagcatgcacttccacagctgcagaaacagcagcagcttcgaggacagcagctag

SEQ ID NO: 10785 - DNA, 510 bp, synthetic construct
  source 1..510: mol_type = other DNA; note = Synthetic coding sequence
atggccgccgccagagacccccccgaggtgagcctgagagaggccacccagagaaagctgagaagattcagcgagctgagaggcaagctggtggccagaggcgagttctgggacatcgtggccatcaccgccgccgacgagaagcaggagctggcctacaaccagcagctgagcgagaagctgaagagaaaggagctgcccctgggcgtgcagtaccacgtgttcgtggaccccgccggcgccaagatcggcaacggcggcagcaccctgtgcgccctgcagtgcctggagaagctgtacggcgacaagtggaacagcttcaccatcctgctgatccacagcgtgagcttccagatctaccagaacgccctggccaagcaccccgtgagcttcaaggcctactggatccaggacgtgctgtggcacctggcccagctgtggagcatccccgactggggcctgatgttccagctgggcaagaccgccctgctggtggtgctgaccagctag

SEQ ID NO: 10786 - DNA, 1785 bp, synthetic construct
  source 1..1785: mol_type = other DNA; note = Synthetic coding sequence
atggccgccgccagagacccccccgaggtgagcctgagagaggccacccagagaaagctgagaagattcagcgagctgagaggcaagctggtggccagaggcgagttctgggacatcgtggccatcaccgccgccgacgagaagcaggagctggcctacaaccagcagctgagcgagaagctgaagagaaaggagctgcccctgggcgtgcagtaccacgtgttcgtggaccccgccggcgccaagatcggcaacggcggcagcaccctgtgcgccctgcagtgcctggagaagctgtacggcgacaagtggaacagcttcaccatcctgctgatccacagcggcggctacagccagagactgcccaacgccagcgccctgggcaagatcttcaccgccctgcccctgggcaaccccatctaccagatgctggagctgaagctggccatgtacatcgacttccccctgaacatgaaccccggcatcctggtgacctgcgccgacgacatcgagctgtacagcatcggcgagttcgagttcatcagattcgacaagcccggcttcaccgccctggcccaccccagcagcctgaccatcggcaccacccacggcgtgttcgtgctggaccccttcgacgacctgaagcacagagacctggagtacagaagctgccacagattcctgcacaagcccagcatcgagaagatgtaccagttcaacgccgtgtgcagacccggcaacttctgccagcaggacttcgccggcggcgacatcgccgacctgaagctggacagcgactacgtgtacaccgacagcctgttctacatggaccacaagagcgccaagatgctgctggccttctacgagaagatcggcaccctgagctgcgagatcgacgcctacggcgacttcctgcaggccctgggccccggcgccaccgtggagtacaccagaaacaccagcaacgtgatcaaggaggagagcgagctggtggagatgagacagagaatcttccacctgctgaagggcaccagcctgaacgtggtggtgctgaacaacagcaagttctaccacatcggcaccaccgaggagtacctgttctacttcaccagcgacaacagcctgaagagcgagctgggcctgcagagcatcaccttcagcatcttccccgacatccccgagtgcagcggcaagaccagctgcatcatccagagcatcctggacagcagatgcagcgtggcccccggcagcgtggtggagtacagcagactgggccccgacgtgagcgtgggcgagaactgcatcatcagcggcagctacatcctgaccaaggccgccctgcccgcccacagcttcgtgtgcagcctgagcctgaagatgaacagatgcctgaagtacgccaccatggccttcggcgtgcaggacaacctgaagaagagcgtgaagaccctgagcgacatcaagctgctgcagttcttcggcgtgtgcttcctgagctgcctggacgtgtggaacctgaaggtgaccgaggagctgttcagcggcaacaagacctgcctgagcctgtggaccgccagaatcttccccgtgtgcagcagcctgagcgacagcgtgatcaccagcctgaagatgctgaacgccgtgaagaacaagagcgccttcagcctgaacagctacaagctgctgagcatcgaggagatgctgatctacaaggacgtggaggacatgatcacctacagagagcagatcttcctggagatcagcctgaagagcagcctgatgtag

SEQ ID NO: 10787 - DNA, 588 bp, synthetic construct
  source 1..588: mol_type = other DNA; note = Synthetic coding sequence
atggccccccccgtgagatactgcatccccggcgagagactgtgcaacctggaggagggcagccccggcagcggcacctacaccagacacggctacatcttcagcagcctggccggctgcctgatgaagagcagcgagaacggcgccctgcccgtggtgagcgtggtgagagagaccgagagccagctgctgcccgacgtgggcgccatcgtgacctgcaaggtgagcagcatcaacagcagattcgccaaggtgcacatcctgtacgtgggcagcatgcccctgaagaacagcttcagaggcaccatcagaaaggaggacgtgagagccaccgagaaggacaaggtggagatctacaagagcttcagacccggcgacatcgtgctggccaaggtgatcagcctgggcgacgcccagagcaactacctgctgaccaccgccgagaacgagctgggcgtggtggtggcccacagcgagagcggcatccagatggtgcccatcagctggtgcgagatgcagtgccccaagacccacaccaaggagttcagaaaggtggccagagtgcagcccgagttcctgcagacctag

SEQ ID NO: 10788 - DNA, 1626 bp, synthetic construct
  source 1..1626: mol_type = other DNA; note = Synthetic coding sequence
atgaccggcgagaagatcagaagcctgagaagagaccacaagcccagcaaggaggagggcgacctgctggagcccggcgacgaggaggccgccgccgccctgggcggcaccttcaccagaagcagaatcggcaagggcggcaaggcctgccacaagatcttcagcaaccaccaccacagactgcagctgaaggccgcccccgccagcagcaacccccccggcgcccccgccctgcccctgcacaacagcagcgtgaccgccaacagccagagccccgccctgctggccggcaccaaccccgtggccgtggtggccgacggcggcagctgccccgcccactaccccgtgcacgagtgcgtgttcaagggcgacgtgagaagactgagcagcctgatcagaacccacaacatcggccagaaggacaaccacggcaacacccccctgcacctggccgtgatgctgggcaacaaggagtgcgcccacctgctgctggcccacaacgcccccgtgaaggtgaagaacgcccagggctggagccccctggccgaggccatcagctacggcgacagacagatgatcaccgccctgctgagaaagctgaagcagcagagcagagagagcgtggaggagaagagacccagactgctgaaggccctgaaggagctgggcgacttctacctggagctgcactgggacttccagagctgggtgcccctgctgagcagaatcctgcccagcgacgcctgcaagatctacaagcagggcatcaacatcagactggacaccaccctgatcgacttcaccgacatgaagtgccagagaggcgacctgagcttcatcttcaacggcgacgccgcccccagcgagagcttcgtggtgctggacaacgagcagaaggtgtaccagagaatccaccacgaggagagcgagatggagaccgaggaggaggtggacatcctgatgagcagcgacatctacagcgccaccctgagcaccaagagcatcagcttcaccagagcccagaccggctggctgttcagagaggacaagaccgagagagtgggcaacttcctggccgacttctacctggtgaacggcctggtgctggagagcagaaagagaagagagcacctgagcgaggaggacatcctgagaaacaaggccatcatggagagcctgagcaagggcggcaacatcatggagcagaacttcgagcccatcagaagacagagcctgaccccccccccccagaacaccatcacctgggaggagtacatcagcgccgagaacggcaaggccccccacctgggcagagagctggtgtgcaaggagagcaagaagaccttcaaggccaccatcgccatgagccaggagttccccctgggcatcgagctgctgctgaacgtgctggaggtggtggcccccttcaagcacttcaacaagctgagagagttcgtgcagatgaagctgccccccggcttccccgtgaagctggacatccccgtgttccccaccatcaccgccaccgtgaccttccaggagttcagatacgacgagttcgacggcagcatcttcaccatccccgacgactacaaggaggaccccagcagattccccgacctgtag

SEQ ID NO: 10789 - DNA, 840 bp, synthetic construct
  source 1..840: mol_type = other DNA; note = Synthetic coding sequence
atgccctgcagaagagaggaggaggaggaggccggcgaggaggccgagggcgaggaggaggaggaggacagcttcctgctgctgcagcagagcgtggccctgggcagcagcggcgaggtggacagactggtggcccagatcggcgagaccctgcagctggacgccgcccagcacagccccgccagcccctgcggcccccccggcgcccccctgagagcccccggccccctggccgccgccgtgcccgccgacaaggccagaagccccgccgtgcccctgctgctgccccccgccctggccgagaccgtgggccccgccccccccggcgtgctgagatgcgccctgggcgacagaggcagagtgagaggcagagccgccccctactgcgtggccgagctggccaccggccccagcgccctgagccccctgcccccccaggccgacctggacggcccccccggcgccggcaagcagggcatcccccagcccctgagcggcccctgcagaagaggctggctgagaggcgccgccgccagcagaagactgcagcagagaagaggcagccagcccgagaccagaaccggcgacgacgacccccacagactgctgcagcagctggtgctgagcggcaacctgatcaaggaggccgtgagaagactgcacagcagaagactgcagctgagagccaagctgccccagagacccctgctgggccccctgagcgcccccgtgcacgagccccccagccccagaagccccagagccgcctgcagcgaccccggcgccagcggcagagcccagctgagaaccggcgacggcgtgctggtgcccggcagctag

SEQ ID NO: 10790 - DNA, 1209 bp, synthetic construct
  source 1..1209: mol_type = other DNA; note = Synthetic coding sequence
atgcccctgcacagcagcctgggcaacaagagcgagaccctgagccagaagaagaacaacaacaacaaggagaagaccaagagaaacagcagaaacccccccagaaccgccctgaaggagggcaagatggaggagctgagccaggccctggccagcagcttcagcgtgagccaggacctgaacagcaccgccgccccccaccccagactgagccagtacaagagcaagtacagcagcctggagcagagcgagagaagaagaagactgctggagctgcagaagagcaagagactggactacgtgaaccacgccagaagactggccgaggacgactggaccggcatggagagcgaggaggagaacaagaaggacgacgaggagatggacatcgacaccgtgaagaagctgcccaagcactacgccaaccagctgatgctgagcgagtggctgatcgacgtgcccagcgacctgggccaggagtggatcgtggtggtgtgccccgtgggcaagagagccctgatcgtggccagcagaggcagcaccagcgcctacaccaagagcggctactgcgtgaacagattcagcagcctgctgcccggcggcaacagaagaaacagcaccgccaaggactacaccatcctggactgcatctacaacgaggtgaaccagacctactacgtgctggacgtgatgtgctggagaggccaccccttctacgactgccagaccgacttcagattctactggatgcacagcaagctgcccgaggaggagggcctgggcgagaagaccaagctgaaccccttcaagttcgtgggcctgaagaacttcccctgcacccccgagagcctgtgcgacgtgctgagcatggacttccccttcgaggtggacggcctgctgttctaccacaagcagacccactacagccccggcagcacccccctggtgggctggctgagaccctacatggtgagcgacgtgctgggcgtggccgtgcccgccggccccctgaccaccaagcccgactacgccggccaccagctgcagcagatcatggagcacaagaagagccagaaggagggcatgaaggagaagctgacccacaaggccagcgagaacggccactacgagctggagcacctgagcacccccaagctgaagggcagcagccacagccccgaccaccccggctgcctgatggagaactag

SEQ ID NO: 10791 - DNA, 1107 bp, synthetic construct
  source 1..1107: mol_type = other DNA; note = Synthetic coding sequence
atgagcctgttcggcaccaccagcggcttcggcaccagcggcaccagcatgttcggcagcgccaccaccgacaaccacaaccccatgaaggacatcgaggtgaccagcagccccgacgacagcatcggctgcctgagcttcagcccccccaccctgcccggcaacttcctgatcgccggcagctgggccaacgacgtgagatgctgggaggtgcaggacagcggccagaccatccccaaggcccagcagatgcacaccggccccgtgctggacgtgtgctggagcgacgacggcagcaaggtgttcaccgccagctgcgacaagaccgccaagatgtgggacctgagcagcaaccaggccatccagatcgcccagcacgacgcccccgtgaagaccatccactggatcaaggcccccaactacagctgcgtgatgaccggcagctgggacaagaccctgaagttctgggacaccagaagcagcaaccccatgatggtgctgcagctgcccgagagatgctactgcgccgacgtgatctaccccatggccgtggtggccaccgccgagagaggcctgatcgtgtaccagctggagaaccagcccagcgagttcagaagaatcgagagccccctgaagcaccagcacagatgcgtggccatcttcaaggacaagcagaacaagcccaccggcttcgccctgggcagcatcgagggcagagtggccatccactacatcaacccccccaaccccgccaaggacaacttcaccttcaagtgccacagaagcaacggcaccaacaccagcgccccccaggacatctacgccgtgaacggcatcgccttccaccccgtgcacggcaccctggccaccgtgggcagcgacggcagattcagcttctgggacaaggacgccagaaccaagctgaagaccagcgagcagctggaccagcccatcagcgcctgctgcttcaaccacaacggcaacatcttcgcctacgccagcagctacgactggagcaagggccacgagttctacaacccccagaagaagaactacatcttcctgagaaacgccgccgaggagctgaagcccagaaacaagaagtag

SEQ ID NO: 10792 - DNA, 552 bp, synthetic construct
  source 1..552: mol_type = other DNA; note = Synthetic coding sequence
atgagaaagagcagctgcgtggagagcttcgacgaccagagaagaatgagcctgcacctgcacggcgccgactgcgaccccaagacccagaacgagatgaacatctgcgaggaggagttcgtggagtacaagaacagagacgccatcagcgccctgatgcccctgttcagcgaggaggagagcagcgacggcagcaagcacaacaacggcctgcccgaccacatcagcgcccagctgcagaacacctacaccctgaaggccttcaccgtgggcagcaagtgcgtggtgtggagcagcctgagaaacacctggagcaagtgcgagatcctggagaccgccgaggagggcaccagagtgctgaacctgagcaacggcatggaggagatcgtgaaccccgagaacgtgtggaacggcatccccaagctggacaagagcccccccgaggccgtgagccagagagtgggcaaggacctgtacttcatgagcgtgggcgacaccaccatcaaggagaagggcttcggcggcgacggcgacctgaccgtggacctgtag

SEQ ID NO: 10793 - DNA, 1821 bp, synthetic construct
  source 1..1821: mol_type = other DNA; note = Synthetic coding sequence
atgcccagcccccagctgctggtgctgttcggcagccagaccggcaccgcccaggacgtgagcgagagactgggcagagaggccagaagaagaagactgggctgcagagtgcaggccctggacagctaccccgtggtgaacctgatcaacgagcccctggtgatcttcgtgtgcgccaccaccggccagggcgacccccccgacaacatgaagaacttctggagattcatcttcagaaagaacctgcccagcaccgccctgtgccagatggacttcgccgtgctgggcctgggcgacagcagctacgccaagttcaacttcgtggccaagaagctgcacagaagactgctgcagctgggcggcagcgccctgctgcccgtgtgcctgggcgacgaccagcacgagctgggccccgacgccgccgtggacccctggctgagagacctgtgggacagagtgctgggcctgtacccccccccccccggcctgaccgagatcccccccggcgtgcccctgcccagcaagttcaccctgctgttcctgcaggaggcccccagcaccggcagcgagggccagagagtggcccaccccggcagccaggagccccccagcgagagcaagcccttcctggcccccatgatcagcaaccagagagtgaccggccccagccacttccaggacgtgagactgatcgagttcgacatcctgggcagcggcatcagcttcgccgccggcgacgtggtgctgatccagcccagcaacagcgccgcccacgtgcagagattctgccaggtgctgggcctggaccccgaccagctgttcatgctgcagcccagagagcccgacgtgagcagccccaccagactgccccagccctgcagcatgagacacctggtgagccactacctggacatcgccagcgtgcccagaagaagcttcttcgagctgctggcctgcctgagcctgcacgagctggagagagagaagctgctggagttcagcagcgcccagggccaggaggagctgttcgagtactgcaacagacccagaagaaccatcctggaggtgctgtgcgacttcccccacaccgccgccgccatcccccccgactacctgctggacctgatccccgtgatcagacccagagccttcagcatcgccagcagcctgctgacccaccccagcagactgcagatcctggtggccgtggtgcagttccagaccagactgaaggagcccagaagaggcctgtgcagcagctggctggccagcctggaccccggccagggccccgtgagagtgcccctgtgggtgagacccggcagcctggccttccccgagacccccgacacccccgtgatcatggtgggccccggcaccggcgtggcccccttcagagccgccatccaggagagagtggcccagggccagaccggcaacttcctgttcttcggctgcagatggagagaccaggacttctactgggaggccgagtggcaggagctggagaagagagactgcctgaccctgatccccgccttcagcagagagcagccccccgccctgttcagcgccctgcaggagcagaaggtgtacgtgcagcacagactgagagagctgggcagcctggtgtgggagctgctggacagacagggcgcctacttctacctggccggcaacgccaagagcatgcccgccgacgtgagcgaggccctgatgagcatcttccaggaggagggcggcctgtgcagccccgacgccgccgcctacctggccagactgcagcagaccagaagattccagaccgagacctgggcctag

SEQ ID NO: 10794 - DNA, 420 bp, synthetic construct
  source 1..420: mol_type = other DNA; note = Synthetic coding sequence
atggccgagagcgactgggacaccgtgaccgtgctgagaaagaagggccccaccgccgcccaggccaagagcaagcaggccatcctggccgcccagagaagaggcgaggacgtggagaccagcaagaagtgggccgccggccagaacaagcagcacagcatcaccaagaacaccgccaagctggacagagagaccgaggagctgcaccacgacagagtgaccctggaggtgggcaaggtgatccagcagggcagacagagcaagggcctgacccagaaggacctggccaccaagatcaacgagaagccccaggtgatcgccgactacgagagcggcagagccatccccaacaaccaggtgctgggcaagatcgagagagccatcggcgagtgccccagcaccctgagaagagtgagatag

SEQ ID NO: 10795 - DNA, 426 bp, synthetic construct
  source 1..426: mol_type = other DNA; note = Synthetic coding sequence
atggccgagagcgactgggacaccgtgaccgtgctgagaaagaagggccccaccgccgcccaggccaagagcaagcaggccatcctggccgcccagagaagaggcgaggacgtggagaccagcaagaagtgggccgccggccagaacaagcagcacagcatcaccaagaacaccgccaagctggacagagagaccgaggagctgcaccacgacagagtgaccctggaggtgggcaaggtgatccagcagggcagacagagcaagggcctgacccagaaggacctggccaccaagatcaacgagaagccccaggtgatcgccgactacgagagcggcagagccatccccaacaaccaggtgctgggcaagatcgagagagccatcgacgtgggcaccagaagcgccagagtgctgagagcccagtag

SEQ ID NO: 10796 - DNA, 150 bp, synthetic construct
  source 1..150: mol_type = other DNA; note = Synthetic coding sequence
atggccacccagagaaagcacctggtgaaggacttcaacccctacatcacctgctacatctgcaagggctacctgatcaagcccaccaccgtgaccgagtgcctgcacaccagcgccgagagctactggatgagcacctggatgagctag

SEQ ID NO: 10797 - DNA, 960 bp, synthetic construct
  source 1..960: mol_type = other DNA; note = Synthetic coding sequence
atgatggtgctgaaggtggaggagctggtgaccggcaagaagaacggcaacggcgaggccggcgagttcctgcccgaggacttcagagacggcgagtacgaggccgccgtgaccctggagaagcaggaggacctgaagaccctgctggcccaccccgtgaccctgggcgagcagcagtggaagagcgagaagcagagagaggccgagctgaagaagaagaagctggagcagagaagcaagctggagaacctggaggacctggagatcatcatccagctgaagaagagaaagaagtacagaaagaccaaggtgcccgtggtgaaggagcccgagcccgagatcatcaccgagcccgtggacgtgcccaccttcctgaaggccgccctggagaacaagctgcccgtggtggagaagttcctgagcgacaagaacaaccccgacgtgtgcgacgagtacaagagaaccgccctgcacagagcctgcctggagggccacctggccatcgtggagaagctgatggaggccggcgcccagatcgagttcagagacatgctggagagcaccgccatccactgggccagcagaggcggcaacctggacgtgctgaagctgctgctgaacaagggcgccaagatcagcgccagagacaagctgctgagcaccgccctgcacgtggccgtgagaaccggccactacgagtgcgccgagcacctgatcgcctgcgaggccgacctgaacgccaaggacagagagggcgacacccccctgcacgacgccgtgagactgaacagatacaagatgatcagactgctgatcatgtacggcgccgacctgaacatcaagaactgcgccggcaagacccccatggacctggtgctgcactggcagaacggcaccaaggccatcttcgacagcctgagagagaacagctacaagaccagcagaatcgccaccttctag

SEQ ID NO: 10798 - DNA, 1089 bp, synthetic construct
  source 1..1089: mol_type = other DNA; note = Synthetic coding sequence
atgagcggctaccagagaagacccggcgccacccccctgagcagagccagaagcctggccatccccgacgacgacagattcgaggacctggaggaggccaaccccttcagcttcagagagttcctgaagaccaagaacctgggcctgagcaaggaggaccccgccagcagaatctacgccaaggaggccagcagacacagcctgggcctggaccacaacagcccccccagccagaccggcggctacggcctggagtaccagcagcccttcttcgaggaccccaccggcgccggcgacctgctggacgaggaggaggacgaggacaccggctggagcggcgcctacctgcccagcgccatcgagcagacccaccccgagagagtgcccgccggcaccagcccctgcagcacctacctgagcttcttcagcacccccagcgagctggccggccccgagagcctgcccagctgggccctgagcgacaccgacagcagagtgagccccgccagccccgccggcagccccagcgccgacttcgccgtgcacggcgagagcctgggcgacagacacctgagaaccctgcagatcagctacgacgccctgaaggacgagaacagcaagctgagaagaaagctgaacgaggtgcagagcttcagcgaggcccagaccgagatggtgagaaccctggagagaaagctggaggccaagatgatcaaggaggagagcgactaccacgacctggagagcgtggtgcagcaggtggagcagaacctggagctgatgaccaagagagccgtgaaggccgagaaccacgtggtgaagctgaagcaggagatcagcctgctgcaggcccaggtgagcaacttccagagagagaacgaggccctgagatgcggccagggcgccagcctgaccgtggtgaagcagaacgccgacgtggccctgcagaacctgagagtggtgatgaacagcgcccaggccagcatcaagcagctggtgagcggcgccgagaccctgaacctggtggccgagatcctgaagagcatcgacagaatcagcgaggtgaaggacgaggaggaggacagctag

SEQ ID NO: 10799 - DNA, 5463 bp, synthetic construct
  source 1..5463: mol_type = other DNA; note = Synthetic coding sequence
atggagagcaacttcaaccaggagggcgtgcccagacccagctacgtgttcagcgccgaccccatcgccagacccagcgagatcaacttcgacggcatcaagctggacctgagccacgagttcagcctggtggcccccaacaccgaggccaacagcttcgagagcaaggactacctgcaggtgtgcctgagaatcagacccttcacccagagcgagaaggagctggagagcgagggctgcgtgcacatcctggacagccagaccgtggtgctgaaggagccccagtgcatcctgggcagactgagcgagaagagcagcggccagatggcccagaagttcagcttcagcaaggtgttcggccccgccaccacccagaaggagttcttccagggctgcatcatgcagcccgtgaaggacctgctgaagggccagagcagactgatcttcacctacggcctgaccaacagcggcaagacctacaccttccagggcaccgaggagaacatcggcatcctgcccagaaccctgaacgtgctgttcgacagcctgcaggagagactgtacaccaagatgaacctgaagccccacagaagcagagagtacctgagactgagcagcgagcaggagaaggaggagatcgccagcaagagcgccctgctgagacagatcaaggaggtgaccgtgcacaacgacagcgacgacaccctgtacggcagcctgaccaacagcctgaacatcagcgagttcgaggagagcatcaaggactacgagcaggccaacctgaacatggccaacagcatcaagttcagcgtgtgggtgagcttcttcgagatctacaacgagtacatctacgacctgttcgtgcccgtgagcagcaagttccagaagagaaagatgctgagactgagccaggacgtgaagggctacagcttcatcaaggacctgcagtggatccaggtgagcgacagcaaggaggcctacagactgctgaagctgggcatcaagcaccagagcgtggccttcaccaagctgaacaacgccagcagcagaagccacagcatcttcaccgtgaagatcctgcagatcgaggacagcgagatgagcagagtgatcagagtgagcgagctgagcctgtgcgacctggccggcagcgagagaaccatgaagacccagaacgagggcgagagactgagagagaccggcaacatcaacaccagcctgctgaccctgggcaagtgcatcaacgtgctgaagaacagcgagaagagcaagttccagcagcacgtgcccttcagagagagcaagctgacccactacttccagagcttcttcaacggcaagggcaagatctgcatgatcgtgaacatcagccagtgctacctggcctacgacgagaccctgaacgtgctgaagttcagcgccatcgcccagaaggtgtgcgtgcccgacaccctgaacagcagccaggagaagctgttcggccccgtgaagagcagccaggacgtgagcctggacagcaacagcaacagcaagatcctgaacgtgaagagagccaccatcagctgggagaacagcctggaggacctgatggaggacgaggacctggtggaggagctggagaacgccgaggagacccagaacgtggagaccaagctgctggacgaggacctggacaagaccctggaggagaacaaggccttcatcagccacgaggagaagagaaagctgctggacctgatcgaggacctgaagaagaagctgatcaacgagaagaaggagaagctgaccctggagttcaagatcagagaggaggtgacccaggagttcacccagtactgggcccagagagaggccgacttcaaggagaccctgctgcaggagagagagatcctggaggagaacgccgagagaagactggccatcttcaaggacctggtgggcaagtgcgacaccagagaggaggccgccaaggacatctgcgccaccaaggtggagaccgaggagacccacaactacgtgggcttcgaggacatcatcgacagcctgcaggacaacgtggccgacatcaagaagcaggccgagatcgcccacctgtacatcgccagcctgcccgacccccaggaggccaccgcctgcctggagctgaagttcaaccagatcaaggccgagctggccaagaccaagggcgagctgatcaagaccaaggaggagctgaagaagagagagaacgagagcgacagcctgatccaggagctggagaccagcaacaagaagatcatcacccagaaccagagaatcaaggagctgatcaacatcatcgaccagaaggaggacaccatcaacgagttccagaacctgaagagccacatggagaacaccttcaagtgcaacgacaaggccgacaccagcagcctgatcatcaacaacaagctgatctgcaacgagaccgtggaggtgcccaaggacagcaagagcaagatctgcagcgagagaaagagagtgaacgagaacgagctgcagcaggacgagccccccgccaagaagggcagcatccacgtgagcagcgccatcaccgaggaccagaagaagagcgaggaggtgagacccaacatcgccgagatcgaggacatcagagtgctgcaggagaacaacgagggcctgagagccttcctgctgaccatcgagaacgagctgaagaacgagaaggaggagaaggccgagctgaacaagcagatcgtgcacttccagcaggagctgagcctgagcgagaagaagaacctgaccctgagcaaggaggtgcagcagatccagagcaactacgacatcgccatcgccgagctgcacgtgcagaagagcaagaaccaggagcaggaggagaagatcatgaagctgagcaacgagatcgagaccgccaccagaagcatcaccaacaacgtgagccagatcaagctgatgcacaccaagatcgacgagctgagaaccctggacagcgtgagccagatcagcaacatcgacctgctgaacctgagagacctgagcaacggcagcgaggaggacaacctgcccaacacccagctggacctgctgggcaacgactacctggtgagcaagcaggtgaaggagtacagaatccaggagcccaacagagagaacagcttccacagcagcatcgaggccatctgggaggagtgcaaggagatcgtgaaggccagcagcaagaagagccaccagatcgaggagctggagcagcagatcgagaagctgcaggccgaggtgaagggctacaaggacgagaacaacagactgaaggagaaggagcacaagaaccaggacgacctgctgaaggagaaggagaccctgatccagcagctgaaggaggagctgcaggagaagaacgtgaccctggacgtgcagatccagcacgtggtggagggcaagagagccctgagcgagctgacccagggcgtgacctgctacaaggccaagatcaaggagctggagaccatcctggagacccagaaggtggagtgcagccacagcgccaagctggagcaggacatcctggagaaggagagcatcatcctgaagctggagagaaacctgaaggagttccaggagcacctgcaggacagcgtgaagaacaccaaggacctgaacgtgaaggagctgaagctgaaggaggagatcacccagctgaccaacaacctgcaggacatgaagcacctgctgcagctgaaggaggaggaggaggagaccaacagacaggagaccgagaagctgaaggaggagctgagcgccagcagcgccagaacccagaacctgaaggccgacctgcagagaaaggaggaggactacgccgacctgaaggagaagctgaccgacgccaagaagcagatcaagcaggtgcagaaggaggtgagcgtgatgagagacgaggacaagctgctgagaatcaagatcaacgagctggagaagaagaagaaccagtgcagccaggagctggacatgaagcagagaaccatccagcagctgaaggagcagctgaacaaccagaaggtggaggaggccatccagcagtacgagagagcctgcaaggacctgaacgtgaaggagaagatcatcgaggacatgagaatgaccctggaggagcaggagcagacccaggtggagcaggaccaggtgctggaggccaagctggaggaggtggagagactggccaccgagctggagaagtggaaggagaagtgcaacgacctggagaccaagaacaaccagagaagcaacaaggagcacgagaacaacaccgacgtgctgggcaagctgaccaacctgcaggacgagctgcaggagagcgagcagaagtacaacgccgacagaaagaagtggctggaggagaagatgatgctgatcacccaggccaaggaggccgagaacatcagaaacaaggagatgaagaagtacgccgaggacagagagagattcttcaagcagcagaacgagatggagatcctgaccgcccagctgaccgagaaggacagcgacctgcagaagtggagagaggagagagaccagctggtggccgccctggagatccagctgaaggccctgatcagcagcaacgtgcagaaggacaacgagatcgagcagctgaagagaatcatcagcgagaccagcaagatcgagacccagatcatggacatcaagcccaagagaatcagcagcgccgaccccgacaagctgcagaccgagcccctgagcaccagcttcgagatcagcagaaacaagatcgaggacggcagcgtggtgctggacagctgcgaggtgagcaccgagaacgaccagagcaccagattccccaagcccgagctggagatccagttcacccccctgcagcccaacaagatggccgtgaagcaccccggctgcaccacccccgtgaccgtgaagatccccaaggccagaaagagaaagagcaacgagatggaggaggacctggtgaagtgcgagaacaagaagaacgccacccccagaaccaacctgaagttccccatcagcgacgacagaaacagcagcgtgaagaaggagcagaaggtggccatcagacccagcagcaagaagacctacagcctgagaagccaggccagcatcatcggcgtgaacctggccaccaagaagaaggagggcaccctgcagaagttcggcgacttcctgcagcacagccccagcatcctgcagagcaaggccaagaagatcatcgagaccatgagcagcagcaagctgagcaacgtggaggccagcaaggagaacgtgagccagcccaagagagccaagagaaagctgtacaccagcgagatcagcagccccatcgacatcagcggccaggtgatcctgatggaccagaagatgaaggagagcgaccaccagatcatcaagagaagactgagaaccaagaccgccaagtag

SEQ ID NO: 10800 - DNA, 1485 bp, synthetic construct
  source 1..1485: mol_type = other DNA; note = Synthetic coding sequence
atgaagctgggcaagaagcccatgtacaagcccgtggacccctacagcagaatgcagagcacctacaactacaacatgagaggcggcgcctacccccccagatacttctaccccttccccgtgccccccctgctgtaccaggtggagctgagcgtgggcggccagcagttcaacggcaagggcaagaccagacaggccgccaagcacgacgccgccgccaaggccctgagaatcctgcagaacgagcccctgcccgagagactggaggtgaacggcagagagagcgaggaggagaacctgaacaagagcgagatcagccaggtgttcgagatcgccctgaagagaaacctgcccgtgaacttcgaggtggccagagagagcggccccccccacatgaagaacttcgtgaccaaggtgagcgtgggcgagttcgtgggcgagggcgagggcaagagcaagaagatcagcaagaagaacgccgccatcgccgtgctggaggagctgaagaagctgccccccctgcccgccgtggagagagtgaagcccagaatcaagaagaagaccaagcccatcgtgaagaccagccccgagtacggccagggcatcaaccccatcagcagactggcccagatccagcaggccaagaaggagaaggagcccgagtacaccctgctgaccgagagaggcctgcccagaagaagagagttcgtgatgcaggtgaaggtgggcaaccacaccgccgagggcaccggcaccaacaagaaggtggccaagagaaacgccgccgagaacatgctggagatcctgggcttcaaggtgccccaggcccagcccaccaagcccgccctgaagagcgaggagaagacccccatcaagaagcccggcgacggcagaaaggtgaccttcttcgagcccggcagcggcgacgagaacggcaccagcaacaaggaggacgagttcagaatgccctacctgagccaccagcagctgcccgccggcatcctgcccatggtgcccgaggtggcccaggccgtgggcgtgagccagggccaccacaccaaggacttcaccagagccgcccccaaccccgccaaggccaccgtgaccgccatgatcgccagagagctgctgtacggcggcaccagccccaccgccgagaccatcctgaagaacaacatcagcagcggccacgtgccccacggccccctgaccagacccagcgagcagctggactacctgagcagagtgcagggcttccaggtggagtacaaggacttccccaagaacaacaagaacgagttcgtgagcctgatcaactgcagcagccagccccccctgatcagccacggcatcggcaaggacgtggagagctgccacgacatggccgccctgaacatcctgaagctgctgagcgagctggaccagcagagcaccgagatgcccagaaccggcaacggccccatgagcgtgtgcggcagatgctag

SEQ ID NO: 10801 - DNA, 1509 bp, synthetic construct
  source 1..1509: mol_type = other DNA; note = Synthetic coding sequence
atgaagctgggcaagaagcccatgtacaagcccgtggacccctacagcagaatgcagagcacctacaactacaacatgagaggcggcgcctacccccccagatacttctaccccttccccgtgccccccctgctgtaccaggtggagctgagcgtgggcggccagcagttcaacggcaagggcaagaccagacaggccgccaagcacgacgccgccgccaaggccctgagaatcctgcagaacgagcccctgcccgagagactggaggtgaacggcagagagagcgaggaggagaacctgaacaagagcgagatcagccaggtgttcgagatcgccctgaagagaaacctgcccgtgaacttcgagagcttccccctgaagcaggtggccagagagagcggccccccccacatgaagaacttcgtgaccaaggtgagcgtgggcgagttcgtgggcgagggcgagggcaagagcaagaagatcagcaagaagaacgccgccatcgccgtgctggaggagctgaagaagctgccccccctgcccgccgtggagagagtgaagcccagaatcaagaagaagaccaagcccatcgtgaagccccagaccagccccgagtacggccagggcatcaaccccatcagcagactggcccagatccagcaggccaagaaggagaaggagcccgagtacaccctgctgaccgagagaggcctgcccagaagaagagagttcgtgatgcaggtgaaggtgggcaaccacaccgccgagggcaccggcaccaacaagaaggtggccaagagaaacgccgccgagaacatgctggagatcctgggcttcaaggtgccccaggcccagcccaccaagcccgccctgaagagcgaggagaagacccccatcaagaagcccggcgacggcagaaaggtgaccttcttcgagcccggcagcggcgacgagaacggcaccagcaacaaggaggacgagttcagaatgccctacctgagccaccagcagctgcccgccggcatcctgcccatggtgcccgaggtggcccaggccgtgggcgtgagccagggccaccacaccaaggacttcaccagagccgcccccaaccccgccaaggccaccgtgaccgccatgatcgccagagagctgctgtacggcggcaccagccccaccgccgagaccatcctgaagaacaacatcagcagcggccacgtgccccacggccccctgaccagacccagcgagcagctggactacctgagcagagtgcagggcttccaggtggagtacaaggacttccccaagaacaacaagaacgagttcgtgagcctgatcaactgcagcagccagccccccctgatcagccacggcatcggcaaggacgtggagagctgccacgacatggccgccctgaacatcctgaagctgctgagcgagctggaccagcagagcaccgagatgcccagaaccggcaacggccccatgagcgtgtgcggcagatgctag

SEQ ID NO: 10802 - DNA, 1491 bp, synthetic construct; identical to SEQ ID NO: 10231
  source 1..1491: mol_type = other DNA; note = Synthetic coding sequence

SEQ ID NO: 10803 - DNA, 1473 bp, synthetic construct
  source 1..1473: mol_type = other DNA; note = Synthetic coding sequence
atgagcgaggtgaccaagaacagcctggagaagatcctgccccagctgaagtgccacttcacctggaacctgttcaaggaggacagcgtgagcagagacctggaggacagagtgtgcaaccagatcgagttcctgaacaccgagttcaaggccaccatgtacaacctgctggcctacatcaagcacctggacggcaacaacgaggccgccctggagtgcctgagacaggccgaggagctgatccagcaggagcacgccgaccaggccgagatcagaagcctggtgacctggggcaactacgcctgggtgtactaccacctgggcagactgagcgacgcccagatctacgtggacaaggtgaagcagacctgcaagaagttcagcaacccctacagcatcgagtacagcgagctggactgcgaggagggctggacccagctgaagtgcggcagaaacgagagagccaaggtgtgcttcgagaaggccctggaggagaagcccaacaaccccgagttcagcagcggcctggccatcgccatgtaccacctggacaaccaccccgagaagcagttcagcaccgacgtgctgaagcaggccatcgagctgagccccgacaaccagtacgtgaaggtgctgctgggcctgaagctgcagaagatgaacaaggaggccgagggcgagcagttcgtggaggaggccctggagaagagcccctgccagaccgacgtgctgagaagcgccgccaagttctacagaagaaagggcgacctggacaaggccatcgagctgttccagagagtgctggagagcacccccaacaacggctacctgtaccaccagatcggctgctgctacaaggccaaggtgagacagatgcagaacaccggcgagagcgaggccagcggcaacaaggagatgatcgaggccctgaagcagtacgccatggactacagcaacaaggccctggagaagggcctgaaccccctgaacgcctacagcgacctggccgagttcctggagaccgagtgctaccagacccccttcaacaaggaggtgcccgacgccgagaagcagcagagccaccagagatactgcaacctgcagaagtacaacggcaagagcgaggacaccgccgtgcagcacggcctggagggcctgagcatcagcaagaagagcaccgacaaggaggagatcaaggaccagccccagaacgtgagcgagaacctgctgccccagaacgcccccaactactggtacctgcagggcctgatccacaagcagaacggcgacctgctgcaggccgccaagtgctacgagaaggagctgggcagactgctgagagacgcccccagcggcatcggcagcatcttcctgagcgccagcgagctggaggacggcagcgaggagatgggccagggcgccgtgagcagcagccccagagagctgctgagcaacagcgagcagctgaactag

SEQ ID NO: 10804 - DNA, 1473 bp, synthetic construct; identical to SEQ ID NO: 10803
  source 1..1473: mol_type = other DNA; note = Synthetic coding sequence

SEQ ID NO: 10805 - DNA, 1509 bp, synthetic construct; identical to SEQ ID NO: 10801
  source 1..1509: mol_type = other DNA; note = Synthetic coding sequence

SEQ ID NO: 10806 - DNA, 654 bp, synthetic construct
  source 1..654: mol_type = other DNA; note = Synthetic coding sequence
atggccgagggcagccagagcgcccccgaggccggcaacgacatgggcaacgacgacgccatcggcggcaacgtgagcaagtacatcgtgctgcccaccggctactgcggccagcccaagaagggccacctgatcttcgacgcctgcttcgagagcggcaacctgggcagagtggaccaggtgagcgagttcgagtacgacctgttcatcagacccgacacctgcaaccccagattcagagtgtggttcaacttcaccgtggagaacgtgaaggagagccagagagtgatcttcaacatcgtgaacttcagcaagaccaagagcctgtacagagacggcatggcccccatggtgaagagcaccagcagacccaagtggcagagactgccccccaagaacgtgtactactacagatgccccgaccacagaaagaactacgtgatgagcttcgccttctgcttcgacagagaggaggacatctaccagttcgcctactgctacccctacacctacaccagattccagcactacctggacagcctgcagaagagaaacatggactacttcttcagagagcagctgggccagagcgtgcagcagagaaagctggacctgctgaccatcaccagccccgccggcagatggagctggtag

SEQ ID NO: 10807 - DNA, 963 bp, synthetic construct
  source 1..963: mol_type = other DNA; note = Synthetic coding sequence
atggccgagggcagccagagcgcccccgaggccggcaacgacatgggcaacgacgacgccatcggcggcaacgtgagcaagtacatcgtgctgcccaccggctactgcggccagcccaagaagggccacctgatcttcgacgcctgcttcgagagcggcaacctgggcagagtggaccaggtgagcgagttcgagtacgacctgttcatcagacccgacacctgcaaccccagattcagagtgtggttcaacttcaccgtggagaacgtgaaggagagccagagagtgatcttcaacatcgtgaacttcagcaagaccaagagcctgtacagagacggcatggcccccatggtgaagagcaccagcagacccaagtggcagagactgccccccaagaacgtgtactactacagatgccccgaccacagaaagaactacgtgatgagcttcgccttctgcttcgacagagaggaggacatctaccagttcgcctactgctacccctacacctacaccagattccagcactacctggacagcctgcagaagagaaacatggactacttcttcagagagcagctgggccagagcgtgcagcagagaaagctggacctgctgaccatcaccagccccgacaacctgagagagggcgccgagcagaaggtggtgttcatcaccggcagagtgcaccccggcgagacccccagcagcttcgtgtgccagggcatcatcgacttcctggtgagccagcaccccatcgcctgcgtgctgagagagtacctggtgttcaagatcgcccccatgctgaaccccgacggcgtgtacctgggcaactacagatgcagcctgatgggcttcgacctgaacagacactggctggaccccagcccctgggtgcaccccaccctgcacggcgtgaagcagctgatcgtgcagatgtacaacgaccccgtgagcaactag

SEQ ID NO: 10808 - DNA, 1512 bp, synthetic construct
  source 1..1512: mol_type = other DNA; note = Synthetic coding sequence
atggccgagggcagccagagcgcccccgaggccggcaacgacatgggcaacgacgacgccatcggcggcaacgtgagcaagtacatcgtgctgcccaccggctactgcggccagcccaagaagggccacctgatcttcgacgcctgcttcgagagcggcaacctgggcagagtggaccaggtgagcgagttcgagtacgacctgttcatcagacccgacacctgcaaccccagattcagagtgtggttcaacttcaccgtggagaacgtgaaggagagccagagagtgatcttcaacatcgtgaacttcagcaagaccaagagcctgtacagagacggcatggcccccatggtgaagagcaccagcagacccaagtggcagagactgccccccaagaacgtgtactactacagatgccccgaccacagaaagaactacgtgatgagcttcgccttctgcttcgacagagaggaggacatctaccagttcgcctactgctacccctacacctacaccagattccagcactacctggacagcctgcagaagagaaacatggactacttcttcagagagcagctgggccagagcgtgcagcagagaaagctggacctgctgaccatcaccagccccgacaacctgagagagggcgccgagcagaaggtggtgttcatcaccggcagagtgcaccccggcgagacccccagcagcttcgtgtgccagggcatcatcgacttcctggtgagccagcaccccatcgcctgcgtgctgagagagtacctggtgttcaagatcgcccccatgctgaaccccgacggcgtgtacctgggcaactacagatgcagcctgatgggcttcgacctgaacagacactggctggaccccagcccctgggtgcaccccaccctgcacggcgtgaagcagctgatcgtgcagatgtacaacgaccccaagaccagcctggagttctacatcgacatccacgcccacagcaccatgatgaacggcttcatgtacggcaacatcttcgaggacgaggagagattccagagacaggccatcttccccaagctgctgtgccagaacgccgaggacttcagctacagcagcaccagcttcaacagagacgccgtgaaggccggcaccggcagaagattcctgggcggcctgctggaccacaccagctactgctacaccctggaggtgagcttctacagctacatcatcagcggcaccaccgccgccgtgccctacaccgaggaggcctacatgaagctgggcagaaacgtggccagaaccttcctggactactacagactgaaccccgtggtggagaaggtggccatccccatgcccagactgagaaacaaggagatcgaggtgcagagaagaaaggagaagagccccccctacaagcaccccctgctgagaggccccgccagcaactaccccaacagcaagggcgacaagaagagcagcgtgaaccacaaggaccccagcacccccttctag

SEQ ID NO: 10809 - DNA, 1734 bp, synthetic construct
  source 1..1734: mol_type = other DNA; note = Synthetic coding sequence
atgagccaggtgcaggtgcaggtgcagaaccccagcgccgccctgagcggcagccagatcctgaacaagaaccagagcctgctgagccagcccctgatgagcatccccagcaccaccagcagcctgcccagcgagaacgccggcagacccatccagaacagcgccctgcccagcgccagcatcaccagcaccagcgccgccgccgagagcatcacccccaccgtggagctgaacgccctgtgcatgaagctgggcaagaagcccatgtacaagcccgtggacccctacagcagaatgcagagcacctacaactacaacatgagaggcggcgcctacccccccagatacttctaccccttccccgtgccccccctgctgtaccaggtggagctgagcgtgggcggccagcagttcaacggcaagggcaagaccagacaggccgccaagcacgacgccgccgccaaggccctgagaatcctgcagaacgagcccctgcccgagagactggaggtgaacggcagagagagcgaggaggagaacctgaacaagagcgagatcagccaggtgttcgagatcgccctgaagagaaacctgcccgtgaacttcgaggtggccagagagagcggccccccccacatgaagaacttcgtgaccaaggtgagcgtgggcgagttcgtgggcgagggcgagggcaagagcaagaagatcagcaagaagaacgccgccatcgccgtgctggaggagctgaagaagctgccccccctgcccgccgtggagagagtgaagcccagaatcaagaagaagaccaagcccatcgtgaagccccagaccagccccgagtacggccagggcatcaaccccatcagcagactggcccagatccagcaggccaagaaggagaaggagcccgagtacaccctgctgaccgagagaggcctgcccagaagaagagagttcgtgatgcaggtgaaggtgggcaaccacaccgccgagggcaccggcaccaacaagaaggtggccaagagaaacgccgccgagaacatgctggagatcctgggcttcaaggtgccccaggcccagcccaccaagcccgccctgaagagcgaggagaagacccccatcaagaagcccggcgacggcagaaaggtgaccttcttcgagcccggcagcggcgacgagaacggcaccagcaacaaggaggacgagttcagaatgccctacctgagccaccagcagctgcccgccggcatcctgcccatggtgcccgaggtggcccaggccgtgggcgtgagccagggccaccacaccaaggacttcaccagagccgcccccaaccccgccaaggccaccgtgaccgccatgatcgccagagagctgctgtacggcggcaccagccccaccgccgagaccatcctgaagaacaacatcagcagcggccacgtgccccacggccccctgaccagacccagcgagcagctggactacctgagcagagtgcagggcttccaggtggagtacaaggacttccccaagaacaacaagaacgagttcgtgagcctgatcaactgcagcagccagccccccctgatcagccacggcatcggcaaggacgtggagagctgccacgacatggccgccctgaacatcctgaagctgctgagcgagctggaccagcagagcaccgagatgcccagaaccggcaacggccccatgagcgtgtgcggcagatgctag

SEQ ID NO: 10810 - DNA, 852 bp, synthetic construct
  source 1..852: mol_type = other DNA; note = Synthetic coding sequence
atgagcggcgccgtgctgctggagagagagagactgaccagcggcaccacctggcacaccgccggcctgctgtggcagctgagacccagcgacgtggaggtggagctgctggcccacaccagaagagtggtgagcagagagctggaggaggagaccggcctgcacaccggctggatccagaacggcggcctgttcatcgccagcaacagacagagactggacgagtacaagagactgatgagcctgggcaaggcctacggcgtggagagccacgtgctgagccccgccgagaccaagaccctgtaccccctgatgaacgtggacgacctgtacggcaccctgtacgtgccccacgacggcaccatggaccccgccggcacctgcaccaccctggccagagccgccagcgccagaggcgcccaggtgatcgagaactgccccgtgaccggcatcagagtgtggaccgacgacttcggcgtgagaagagtggccggcgtggagacccagcacggcagcatccagaccccctgcgtggtgaactgcgccggcgtgtgggccagcgccgtgggcagaatggccggcgtgaaggtgcccctggtggccatgcaccacgcctacgtggtgaccgagagaatcgagggcatccagaacatgcccaacgtgagagaccacgacgccagcgtgtacctgagactgcagggcgacgccctgagcgtgggcggctacgaggccaaccccatcttctgggaggaggccgtgaagtacagacccagagccgccggcggcctgtgcctgaagaccagcaccgagaaggtgtgcgccgtgtggagcgacgacctgagaagagcctag

SEQ ID NO: 10811 - DNA, 1107 bp, synthetic construct
  source 1..1107: mol_type = other DNA; note = Synthetic coding sequence
atgagctacttcggcaagttctacctggtgggcctggacgccagaaaggccgccgactggctgttcagcgccgacgtgagcagaccccccggcagcaccgtgtacacctgcatgctgaaccacagaggcggcaccgagagcgacctgaccgtgagcagactggcccccagccaccaggccagccccctggcccccgccttcgagggcgacggctactacctggccatgggcggcgccgtggcccagcacaactggagccacatcaccaccgtgctgcaggaccagaagagccagtgccagctgatcgacagcagcgaggacctgggcatgatcagcatccagggccccgccagcagagccatcctgcaggaggtgctggacgccgacctgagcaacgaggccttccccttcagcacccacaagctgctgagagccgccggccacctggtgagagccatgagactgagcttcgtgggcgagctgggctgggagctgcacatccccaaggccagctgcgtgcccgtgtacagagccgtgatggccgccggcgccaagcacggcctgatcaacgccggctacagagccatcgacagcctgagcatcgagaagggctacagacactggcacgccgacctgagacccgacgacagccccctggaggccggcctggccttcacctgcaagctgaagagccccgtgcccttcctgggcagagaggccctggagcagcagagagccgccggcctgagaagaagactggtgtgcttcaccatggaggagcccctgtggaccagaccccaccccgccgtgagcggcgcccccgccttcagcaccgccagcagcagcaaggtgcccatgttcggcctggaggccatctggagaaacggccaggtggtgggccacgtgagaagagccgacttcggcttcgccatcgacaagaccatcgcctacggctacatccacgaccccagcggcggccccgtgagcctggacttcgtgaagagcggcgactacgccctggagagaatgggcgtgacctacggcgcccaggcccacctgaagagccccttcgaccccaacaacaagagagtgaagggcatctactag

SEQ ID NO: 10812 - DNA, 2757 bp, synthetic construct
  source 1..2757: mol_type = other DNA; note = Synthetic coding sequence
atggccagcctgagcagagccctgagagtggccgccgcccaccccagacagagccccaccagaggcatgggcccctgcaacctgagcagcgccgccggccccaccgccgagaagagcgtgccctaccagagaaccctgaaggagggccagggcaccagcgtggtggcccagggccccagcagacccctgcccagcaccgccaacgtggtggtgatcggcggcggcagcctgggctgccagaccctgtaccacctggccaagctgggcatgagcggcgccgtgctgctggagagagagagactgaccagcggcaccacctggcacaccgccggcctgctgtggcagctgagacccagcgacgtggaggtggagctgctggcccacaccagaagagtggtgagcagagagctggaggaggagaccggcctgcacaccggctggatccagaacggcggcctgttcatcgccagcaacagacagagactggacgagtacaagagactgatgagcctgggcaaggcctacggcgtggagagccacgtgctgagccccgccgagaccaagaccctgtaccccctgatgaacgtggacgacctgtacggcaccctgtacgtgccccacgacggcaccatggaccccgccggcacctgcaccaccctggccagagccgccagcgccagaggcgcccaggtgatcgagaactgccccgtgaccggcatcagagtgtggaccgacgacttcggcgtgagaagagtggccggcgtggagacccagcacggcagcatccagaccccctgcgtggtgaactgcgccggcgtgtgggccagcgccgtgggcagaatggccggcgtgaaggtgcccctggtggccatgcaccacgcctacgtggtgaccgagagaatcgagggcatccagaacatgcccaacgtgagagaccacgacgccagcgtgtacctgagactgcagggcgacgccctgagcgtgggcggctacgaggccaaccccatcttctgggaggaggtgagcgacaagttcgccttcggcctgttcgacctggactgggaggtgttcacccagcacatcgagggcgccatcaacagagtgcccgtgctggagaagaccggcatcaagagcaccgtgtgcggccccgagagcttcacccccgaccacaagcccctgatgggcgaggcccccgagctgagaggcttcttcctgggctgcggcttcaacagcgccggcatgatgctgggcggcggctgcggccaggagctggcccactggatcatccacggcagacccgagaaggacatgcacggctacgacatcagaagattccaccacagcctgaccgaccaccccagatggatcagagagagaagccacgagagctacgccaagaactacagcgtggtgttcccccacgacgagcccctggccggcagaaacatgagaagagaccccctgcacgaggagctgctgggccagggctgcgtgttccaggagagacacggctgggagagacccggctggttccaccccagaggccccgcccccgtgctggagtacgactactacggcgcctacggcagcagagcccacgaggactacgcctacagaagactgctggccgacgagtacaccttcgccttccccccccaccacgacaccatcaagaaggagtgcctggcctgcagaggcgccgccgccgtgttcgacatgagctacttcggcaagttctacctggtgggcctggacgccagaaaggccgccgactggctgttcagcgccgacgtgagcagaccccccggcagcaccgtgtacacctgcatgctgaaccacagaggcggcaccgagagcgacctgaccgtgagcagactggcccccagccaccaggccagccccctggcccccgccttcgagggcgacggctactacctggccatgggcggcgccgtggcccagcacaactggagccacatcaccaccgtgctgcaggaccagaagagccagtgccagctgatcgacagcagcgaggacctgggcatgatcagcatccagggccccgccagcagagccatcctgcaggaggtgctggacgccgacctgagcaacgaggccttccccttcagcacccacaagctgctgagagccgccggccacctggtgagagccatgagactgagcttcgtgggcgagctgggctgggagctgcacatccccaaggccagctgcgtgcccgtgtacagagccgtgatggccgccggcgccaagcacggcctgatcaacgccggctacagagccatcgacagcctgagcatcgagaagggctacagacactggcacgccgacctgagacccgacgacagccccctggaggccggcctggccttcacctgcaagctgaagagccccgtgcccttcctgggcagagaggccctggagcagcagagagccgccggcctgagaagaagactggtgtgcttcaccatggaggacaaggtgcccatgttcggcctggaggccatctggagaaacggccaggtggtgggccacgtgagaagagccgacttcggcttcgccatcgacaagaccatcgcctacggctacatccacgaccccagcggcggccccgtgagcctggacttcgtgaagagcggcgactacgccctggagagaatgggcgtgacctacggcgcccaggcccacctgaagagccccttcgaccccaacaacaagagagtgaagggcatctactag

SEQ ID NO: 10813 - DNA, 720 bp, synthetic construct
  source 1..720: mol_type = other DNA; note = Synthetic coding sequence
atggagggcaccgtggagagccagacccccgacctgagagacgtggagggcaaggtgggcagaaagacccccgagggcctgctgagaggcctgagaggcgagtgcgagctgggcaccagcggcgccctgctgctgcccggcgccagcagcaccggccacgacctgggcgacaagatcatggccctgaagatggagctggcctacctgagagccatcgacgtgaagatcctgcagcagctggtgaccctgaacgagggcatcgaggccgtgagatggctgctggaggagagaggcaccctgaccagccactgcagcagcctgaccagcagccagtacagcctgaccggcggcagccccggcagaagcagaagaggcagctgggacagcctgcccgacaccagcaccaccgacagactggacagcgtgagcatcggcagcttcctggacaccgtggcccccagcgagctggacgagcagggcccccccggcgcccccagaagcgagatggactgggccaaggtgatcgccggcggcgagagagccagaaccgaggtggacgtggccgccaccagactgggcagcctgagagccgtgtggaagccccccggcgagagactgcagggcggcccccccgagagccccgaggacgagagcgccaagctgggcttcgaggcccactggttctgggagcagtgccaggacgacgtgaccttcctgtag

SEQ ID NO: 10814 - DNA, 294 bp, synthetic construct
  source 1..294: mol_type = other DNA; note = Synthetic coding sequence
atgagcagcggcaacgccaagatcggccaccccgcccccaacttcaaggccaccgccgacgagggcatcagcttcagaggcctgttcatcatcgacgacaagggcatcctgagacagatcaccgtgaacgacctgcccgtgggcagaagcgtggacgagaccctgagactggtgcaggccttccagttcaccgacaagcacggcgaggtgtgccccgccggctggaagcccggcagcgacaccatcaagcccgacgtgcagaagagcaaggagtacttcagcaagcagaagtag

SEQ ID NO: 10815 - DNA, 1668 bp, synthetic construct
  source 1..1668: mol_type = other DNA; note = Synthetic coding sequence
atggacagaagcaagagaaacagcatcgccggcttcccccccagagtggagagactggaggagttcgagggcggcggcggcggcgagggcaacgtgagccaggtgggcagagtgtggcccagcagctacagagccctgatcagcgccttcagcagactgaccagactggacgacttcacctgcgagaagatcggcagcggcttcttcagcgaggtgttcaaggtgagacacagagccagcggccaggtgatggccctgaagatgaacaccctgagcagcaacagagccaacatgctgaaggaggtgcagctgatgaacagactgagccaccccaacatcctgagatacatcaacagcggcaacctggagcagctgctggacagcaacctgcacctgccctggaccgtgagagtgaagctggcctacgacatcgccgtgggcctgagctacctgcacttcaagggcatcttccacagagacctgaccagcaagaactgcctgatcaagagagacgagaacggctacagcgccgtggtggccgacttcggcctggccgagaagatccccgacgtgagcatgggcagcgagaagctggccgtggtgggcagccccttctggatggcccccgaggtgctgagagacgagccctacaacgagaaggccgacgtgttcagctacggcatcatcctgtgcgagatcatcgccagaatccaggccgaccccgactacctgcccagaaccgagaacttcggcctggactacgacgccttccagcacatggtgggcgactgcccccccgacttcctgcagctgaccttcaactgctgcaacatggaccccaagctgagacccagcttcgtggagatcggcaagaccctggaggagatcctgagcagactgcaggaggaggagcaggagagagacagaaagctgcagcccaccgccagaggcctgctggagaaggcccccggcgtgaagagactgagcagcctggacgacaagatcccccacaagagcccctgccccagaagaaccatctggctgagcagaagccagagcgacatcttcagcagaaagccccccagaaccgtgagcgtgctggacccctactacagacccagagacggcgccgccagaacccccaaggtgaaccccttcagcgccagacaggacctgatgggcggcaagatcaagttcttcgacctgcccagcaagagcgtgatcagcctggtgttcgacctggacgcccccggccccggcaccatgcccctggccgactggcaggagcccctggccccccccatcagaagatggagaagcctgcccggcagccccgagttcctgcaccaggaggcctgccccttcgtgggcagagaggagagcctgagcgacggccccccccccagactgagcagcctgaagtacagagtgaaggagatcccccccttcagagccagcgccctgcccgccgcccaggcccacgaggccatggactgcagcatcctgcaggaggagaacggcttcggcagcagaccccagggcaccagcccctgccccgccggcgccagcgaggagatggaggtggaggagagacccgccggcagcacccccgccaccttcagcaccagcggcatcggcctgcagacccagggcaagcaggacggctag

SEQ ID NO: 10816 - DNA, 1629 bp, synthetic construct; identical to SEQ ID NO: 10242
  source 1..1629: mol_type = other DNA; note = Synthetic coding sequence

SEQ ID NO: 10817 - DNA, 1716 bp, synthetic construct
  source 1..1716: mol_type = other DNA; note = Synthetic coding sequence
atggacagaagcaagagaaacagcatcgccggcttcccccccagagtggagagactggaggagttcgagggcggcggcggcggcgagggcaacgtgagccaggtgggcagagtgtggcccagcagctacagagccctgatcagcgccttcagcagactgaccagactggacgacttcacctgcgagaagatcggcagcggcttcttcagcgaggtgttcaaggtgagacacagagccagcggccaggtgatggccctgaagatgaacaccctgagcagcaacagagccaacatgctgaaggaggtgcagctgatgaacagactgagccaccccaacatcctgagattcatgggcgtgtgcgtgcaccagggccagctgcacgccctgaccgagtacatcaacagcggcaacctggagcagctgctggacagcaacctgcacctgccctggaccgtgagagtgaagctggcctacgacatcgccgtgggcctgagctacctgcacttcaagggcatcttccacagagacctgaccagcaagaactgcctgatcaagagagacgagaacggctacagcgccgtggtggccgacttcggcctggccgagaagatccccgacgtgagcatgggcagcgagaagctggccgtggtgggcagccccttctggatggcccccgaggtgctgagagacgagccctacaacgagaaggccgacgtgttcagctacggcatcatcctgtgcgagatcatcgccagaatccaggccgaccccgactacctgcccagaaccgagaacttcggcctggactacgacgccttccagcacatggtgggcgactgcccccccgacttcctgcagctgaccttcaactgctgcaacatggaccccaagctgagacccagcttcgtggagatcggcaagaccctggaggagatcctgagcagactgcaggaggaggagcaggagagagacagaaagctgcagcccaccgccagaggcctgctggagaaggcccccggcgtgaagagactgagcagcctggacgacaagatcccccacaagagcccctgccccagaagaaccatctggctgagcagaagccagagcgacatcttcagcagaaagccccccagaaccgtgagcgtgctggacccctactacagacccagagacggcgccgccagaacccccaaggtgaaccccttcagcgccagacaggacctgatgggcggcaagatcaagttcttcgacctgcccagcaagagcgtgatcagcctggtgttcgacctggacgcccccggccccggcaccatgcccctggccgactggcaggagcccctggccccccccatcagaagatggagaagcctgcccggcagccccgagttcctgcaccaggaggcctgccccttcgtgggcagagaggagagcctgagcgacggccccccccccagactgagcagcctgaagtacagagtgaaggagatcccccccttcagagccagcgccctgcccgccgcccaggcccacgaggccatggactgcagcatcctgcaggaggagaacggcttcggcagcagaccccagggcaccagcccctgccccgccggcgccagcgaggagatggaggtggaggagagacccgccggcagcacccccgccaccttcagcaccagcggcatcggcctgcagacccagggcaagcaggacggctag

SEQ ID NO: 10818 - DNA, 1416 bp, synthetic construct
  source 1..1416: mol_type = other DNA; note = Synthetic coding sequence
atgctgggcagctggggctgctacagatacgccaagctgttcagctgcagcctgagcacccacgccagattcatcaagatcctggacagcgtgctgcaccacctggtgcccgcctgggaccacaccctgggcaccttcagcgagatcaagcaggtgaagcagttcctgctgctgagcagacagagacccggcctggtggcccagtgcctgagagacagcgagagcagcaagcccagcttcatgcccagactgtacatcaacagaagactggccatggagcacagagcctgccccagcagagaccccgcctgcaagaacgccgtgttcacccaggtgtacgagggcctgaagcccagcgacaagtacgagaagcccctggactacagatggcccatgagatacgaccagtggtgggagtgcaagttcatcgccgagggcatcatcgaccagggcggcggcttcagagacagcctggccgacatgagcgaggagctgtgccccagcagcgccgacacccccgtgcccctgcccttcttcgtgagaaccgccaaccagggcaacggcaccggcgaggccagagacatgtacgtgcccaaccccagctgcagagacttcgccaagtacgagtggatcggccagctgatgggcgccgccctgagaggcaaggagttcctggtgctggccctgcccggcttcgtgtggaagcagctgagcggcgaggaggtgagctggagcaaggacttccccgccgtggacagcgtgctggtgaagctgctggaggtgatggagggcatggacaaggagaccttcgagttcaagttcggcaaggagctgaccttcaccaccgtgctgagcgaccagcaggtggtggagctgatccccggcggcgccggcatcgtggtgggctacggcgacagaagcagattcatccagctggtgcagaaggccagactggaggagagcaaggagcaggtggccgccatgcaggccggcctgctgaaggtggtgccccaggccgtgctggacctgctgacctggcaggagctggagaagaaggtgtgcggcgaccccgaggtgaccgtggacgccctgagaaagctgaccagattcgaggacttcgagcccagcgacagcagagtgcagtacttctgggaggccctgaacaacttcaccaacgaggacagaagcagattcctgagattcgtgaccggcagaagcagactgcccgccagaatctacatctaccccgacaagctgggctacgagaccaccgacgccctgcccgagagcagcacctgcagcagcaccctgttcctgccccactacgccagcgccaaggtgtgcgaggagaagctgagatacgccgcctacaactgcgtggccatcgacaccgacatgagcccctgggaggagtag

SEQ ID NO: 10819 - DNA, 825 bp, synthetic construct
  source 1..825: mol_type = other DNA; note = Synthetic coding sequence
atggccgcccccgaggccgaggtgctgagcagcgccgccgtgcccgacctggagtggtacgagaagagcgaggagacccacgccagccagatcgagctgctggagaccagcagcacccaggagcccctgaacgccagcgaggccttctgccccagagactgcatggtgcccgtggtgttccccggccccgtgagccaggagggctgctgccagttcacctgcgagctgctgaagcacatcatgtaccagagacagcagctgcccctgccctacgagcagctgaagcacttctacagaaagcccagcccccaggccgaggagatgctgaagaagaagcccagagccaccaccgaggtgagcagcagaaagtgccagcaggccctggccgagctggagagcgtgctgagccacctggaggacttcttcgccagaaccctggtgcccagagtgctgatcctgctgggcggcaacgccctgagccccaaggagttctacgagctggacctgagcctgctggccccctacagcgtggaccagagcctgagcaccgccgcctgcctgagaagactgttcagagccatcttcatggccgacgccttcagcgagctgcaggccccccccctgatgggcaccgtggtgatggcccagggccacagaaactgcggcgaggactggttcagacccaagctgaactacagagtgcccagcagaggccacaagctgaccgtgaccctgagctgcggcagacccagcatcagaaccaccgcctgggaggactacatctggttccaggcccccgtgaccttcaagggcttcagagagtag

SEQ ID NO: 10820 - DNA, 2586 bp, synthetic construct
  source 1..2586: mol_type = other DNA; note = Synthetic coding sequence
atggccggccccggccccggcgccgtgctggagagccccagacagctgctgggcagagtgagattcctggccgaggccgccagaagcctgagagccggcagacccctgcccgccgccctggccttcgtgcccagagaggtgctgtacaagctgtacaaggaccccgccggccccagcagagtgctgctgcccgtgtgggaggccgagggcctgggcctgagagtgggcgccgccggccccgcccccggcaccggcagcggccccctgagagccgccagagacagcatcgagctgagaagaggcgcctgcgtgagaaccaccggcgaggagctgtgcaacggccacggcctgtgggtgaagctgaccaaggagcagctggccgagcacctgggcgactgcggcctgcaggagggctggctgctggtgtgcagacccgccgagggcggcgccagactggtgcccatcgacacccccaaccacctgcagagacagcagcagctgttcggcgtggactacagacccgtgctgagatgggagcaggtggtggacctgacctacagccacagactgggcagcagaccccagcccgccgaggcctacgccgaggccgtgcagagactgctgtacgtgccccccacctggacctacgagtgcgacgaggacctgatccacttcctgtacgaccacctgggcaaggaggacgagaacctgggcagcgtgaagcagtacgtggagagcatcgacgtgagcagctacaccgaggagttcaacgtgagctgcctgaccgacagcaacgccgacacctactgggagagcgacggcagccagtgccagcactgggtgagactgaccatgaagaagggcaccatcgtgaagaagctgctgctgaccgtggacaccaccgacgacaacttcatgcccaagagagtggtggtgtacggcggcgagggcgacaacctgaagaagctgagcgacgtgagcatcgacgagaccctgatcggcgacgtgtgcgtgctggaggacatgaccgtgcacctgcccatcatcgagatcagaatcgtggagtgcagagacgacggcatcgacgtgagactgagaggcgtgaagatcaagagcagcagacagagagagctgggcctgaacgccgacctgttccagcccaccagcctggtgagataccccagactggagggcaccgaccccgaggtgctgtacagaagagccgtgctgctgcagagattcatcaagatcctggacagcgtgctgcaccacctggtgcccgcctgggaccacaccctgggcaccttcagcgagatcaagcaggtgaagcagttcctgctgctgagcagacagagacccggcctggtggcccagtgcctgagagacagcgagagcagcaagcccagcttcatgcccagactgtacatcaacagaagactggccatggagcacagagcctgccccagcagagaccccgcctgcaagaacgccgtgttcacccaggtgtacgagggcctgaagcccagcgacaagtacgagaagcccctggactacagatggcccatgagatacgaccagtggtgggagtgcaagttcatcgccgagggcatcatcgaccagggcggcggcttcagagacagcctggccgacatgagcgaggagctgtgccccagcagcgccgacacccccgtgcccctgcccttcttcgtgagaaccgccaaccagggcaacggcaccggcgaggccagagacatgtacgtgcccaaccccagctgcagagacttcgccaagtacgagtggatcggccagctgatgggcgccgccctgagaggcaaggagttcctggtgctggccctgcccggcttcgtgtggaagcagctgagcggcgaggaggtgagctggagcaaggacttccccgccgtggacagcgtgctggtgaagctgctggaggtgatggagggcatggacaaggagaccttcgagttcaagttcggcaaggagctgaccttcaccaccgtgctgagcgaccagcaggtggtggagctgatccccggcggcgccggcatcgtggtgggctacggcgacagaagcagattcatccagctggtgcagaaggccagactggaggagagcaaggagcaggtggccgccatgcaggccggcctgctgaaggtggtgccccaggccgtgctggacctgctgacctggcaggagctggagaagaaggtgtgcggcgaccccgaggtgaccgtggacgccctgagaaagctgaccagattcgaggacttcgagcccagcgacagcagagtgcagtacttctgggaggccctgaacaacttcaccaacgaggacagaagcagattcctgagattcgtgaccggcagaagcagactgcccgccagaatctacatctaccccgacaagctgggctacgagaccaccgacgccctgcccgagagcagcacctgcagcagcaccctgttcctgccccactacgccagcgccaaggtgtgcgaggagaagctgagatacgccgcctacaactgcgtggccatcgacaccgacatgagcccctgggaggagtag

SEQ ID NO: 10821 - DNA, 1197 bp, synthetic construct
  source 1..1197: mol_type = other DNA; note = Synthetic coding sequence
atggagagcgtgctgagcaagtacgaggaccagatcaccatcttcaccgactacctggaggagtaccccgacaccgacgagctggtgtggatcctgggcaagcagcacctgctgaagaccgagaagagcaagctgctgagcgacatcagcgccagactgtggttcacctacagaagaaagttcagccccatcggcggcaccggccccagcagcgacgccggctggggctgcatgctgagatgcggccagatgatgctggcccaggccctgatctgcagacacctgggcagagactggagctgggagaagcagaaggagcagcccaaggagtaccagagaatcctgcagtgcttcctggacagaaaggactgctgctacagcatccaccagatggcccagatgggcgtgggcgagggcaagagcatcggcgagtggttcggccccaacaccgtggcccaggtgctgaagaagctggccctgttcgacgagtggaacagcctggccgtgtacgtgagcatggacaacaccgtggtgatcgaggacatcaagaagatgtgcagagtgctgcccctgagcgccgacaccgccggcgacagaccccccgacagcctgaccgccagcaaccagagcaagggcaccagcgcctactgcagcgcctggaagcccctgctgctgatcgtgcccctgagactgggcatcaaccagatcaaccccgtgtacgtggacgccttcaaggagtgcttcaagatgccccagagcctgggcgccctgggcggcaagcccaacaacgcctactacttcatcggcttcctgggcgacgagctgatcttcctggacccccacaccacccagaccttcgtggacaccgaggagaacggcaccgtgaacgaccagaccttccactgcctgcagagcccccagagaatgaacatcctgaacctggaccccagcgtggccctgggcttcttctgcaaggaggagaaggacttcgacaactggtgcagcctggtgcagaaggagatcctgaaggagaacctgagaatgttcgagctggtgcagaagcaccccagccactggccccccttcgtgccccccgccaagcccgaggtgaccaccaccggcgccgagttcatcgacagcaccgagcagctggaggagttcgacctggaggaggacttcgagatcctgagcgtgtag

SEQ ID NO: 10822 - DNA, 1701 bp, synthetic construct; identical to SEQ ID NO: 10391
  source 1..1701: mol_type = other DNA; note = Synthetic coding sequence

SEQ ID NO: 10823 - DNA, 930 bp, synthetic construct
  source 1..930: mol_type = other DNA; note = Synthetic coding sequence
atgcccagagccagaagcggcagaagaagcagaggcgccggcggcagagaggagaccttcctgagagtgagagccaacagacagaccagactgaacgccagaatcggcaagatgaagagaagaaagcaggacgagggccaggtgtgccccctgtgcaacagacccctggccggcagcgagcaggagatgagcagacacgtggagcactgcctgagcaagagagagggcagctgcatggccgaggacgacgccgtggacatcgagcacgagaacaacaacagattcgaggagtacgagtggtgcggccagaagagaatcagagccaccaccctgctggagggcggcttcagaggcagcggcttcatcatgtgcagcggcaaggagaaccccgacagcgacgccgacctggacgtggacggcgacgacaccctggagtacggcaagccccagtacaccgaggccgacgtgatcccctgcaccggcgaggagcccggcgaggccaaggagagagaggccctgagaggcgccgtgctgaacggcggcccccccagcaccagaatcacccccgagttcagcaagtgggccagcgacgccgagatgcccagcaccagcaacggcgagagcagcaagcaggaggccatgcagaagacctgcaagaacagcgacatcgagaagatcaccgaggacagcgccgtgaccaccttcgaggccctgaaggccagagtgagagagctggagagacagctgagcagaggcgacagatacaagtgcctgatctgcatggacagctacagcatgcccctgaccagcatccagtgctggcacgtgcactgcgaggagtgctggctgagaaccctgggcgccaagaagctgtgcccccagtgcaacaccatcaccgcccccggcgacctgagaagaatctacctgtag

SEQ ID NO: 10824 - DNA, 1125 bp, synthetic construct
  source 1..1125: mol_type = other DNA; note = Synthetic coding sequence
atggagagcgtgctgagcaagtacgaggaccagatcaccatcttcaccgactacctggaggagtaccccgacaccgacgagctggtgtggatcctgggcaagcagcacctgctgaagaccggcggcaccggccccagcagcgacgccggctggggctgcatgctgagatgcggccagatgatgctggcccaggccctgatctgcagacacctgggcagagactggagctgggagaagcagaaggagcagcccaaggagtaccagagaatcctgcagtgcttcctggacagaaaggactgctgctacagcatccaccagatggcccagatgggcgtgggcgagggcaagagcatcggcgagtggttcggccccaacaccgtggcccaggtgctgaagaagctggccctgttcgacgagtggaacagcctggccgtgtacgtgagcatggacaacaccgtggtgatcgaggacatcaagaagatgtgcagagtgctgcccctgagcgccgacaccgccggcgacagaccccccgacagcctgaccgccagcaaccagagcaagggcaccagcgcctactgcagcgcctggaagcccctgctgctgatcgtgcccctgagactgggcatcaaccagatcaaccccgtgtacgtggacgccttcaaggagtgcttcaagatgccccagagcctgggcgccctgggcggcaagcccaacaacgcctactacttcatcggcttcctgggcgacgagctgatcttcctggacccccacaccacccagaccttcgtggacaccgaggagaacggcaccgtgaacgaccagaccttccactgcctgcagagcccccagagaatgaacatcctgaacctggaccccagcgtggccctgggcttcttctgcaaggaggagaaggacttcgacaactggtgcagcctggtgcagaaggagatcctgaaggagaacctgagaatgttcgagctggtgcagaagcaccccagccactggccccccttcgtgccccccgccaagcccgaggtgaccaccaccggcgccgagttcatcgacagcaccgagcagctggaggagttcgacctggaggaggacttcgagatcctgagcgtgtag

SEQ ID NO: 10825 - DNA, 558 bp, synthetic construct
  source 1..558: mol_type = other DNA; note = Synthetic coding sequence
atggagggctgcgtgagcaacctgatggtgtgcaacctggcctacagcggcaagctggaggagctgaaggagagcatcctggccgacaagagcctggccaccagaaccgaccaggacagcagaaccgccctgcactgggcctgcagcgccggccacaccgagatcgtggagttcctgctgcagctgggcgtgcccgtgaacgacaaggacgacgccgccagcaagaacagacacgagatcgccgtgatgctgctggagggcggcgccaaccccgacgccaaggaccactacgaggccaccgccatgcacagagccgccgccaagggcaacctgaagatgatccacatcctgctgtactacaaggccagcaccaacatccaggacaccgagggcaacacccccctgcacctggcctgcgacgaggagagagtggaggaggccaagctgctggtgagccagggcgccagcatctacatcgagaacaaggaggagaagacccccctgcaggtggccaagggcggcctgggcctgatcctgaagagaatggtggagggctag

SEQ ID NO: 10826 - DNA, 333 bp, synthetic construct
  source 1..333: mol_type = other DNA; note = Synthetic coding sequence
atggagggctgcgtgagcaacctgatggtgtgcaacctggcctacagcggcaagctggaggagctgaaggagagcatcctggccgacaagagcctggccaccagaaccgaccaggacagcagaaccgccctgcactgggcctgcagcgccggccacaccgagatcgtggagttcctgctgcagctgggcgtgcccgtgaacgacaaggacgacgccgccagcaagaacagacacgagatcgccgtgatgctgctggagggcggcgccaaccccgacgccaaggaccactacgaggccaccgccatgcacagagccgccgccaaggacacctag

SEQ ID NO: 10827 - DNA, 546 bp, synthetic construct
  source 1..546: mol_type = other DNA; note = Synthetic coding sequence
atggtgctgggcgccggctggggctgggcctaccagctgcacctgctgcaggccctgaagagaaagcccgacctgttcctgtgcgagagactggacgtgaaggccgtgttccagtgcgccgtgctggccctgaagttccccgaggcccccaccgtgaaggccagctgcggcttcttcaccgagctgctgcccagatgcggcgaggtggagagcgtgggcaaggtggtgcaggaggacggcagaatgctgctgatcgccgtgctggaggccatcggcggccaggccagcagaagcctgatggactgcttcgccgacatcctgttcgccctgaacaagcactgcttcagcctgctgagcatgtggatcaaggaggccctgcagccccccggcttccccagcgccagactgagccccgagcagaaggacaccttcagccagcagatcctgagagagagagtgaacaagagaagagtgaaggagatggtgaaggagttcaccctgctgtgcagaggcctgcacggcaccgactacaccgccgactactag

SEQ ID NO: 10828 - DNA, 2892 bp, synthetic construct
  source 1..2892: mol_type = other DNA; note = Synthetic coding sequence
atggagagaagagaggagcagcccggcgccgccggcgccggcgccgcccccgccctggacttcaccgtggagaacgtggagaaggccctgcaccagctgtactacgaccccaacatcgagaacaagaacctggcccagaagtggctgatgcaggcccaggtgagcccccaggcctggcacttcagctggcagctgctgcagcccgacaaggtgcccgagatccagtacttcggcgccagcgccctgcacatcaagatcagcagatactggagcgacatccccaccgaccagtacgagagcctgaaggcccagctgttcacccagatcaccagattcgccagcggcagcaagatcgtgctgaccagactgtgcgtggccctggccagcctggccctgagcatgatgcccgacgcctggccctgcgccgtggccgacatggtgagactgttccaggccgaggacagccccgtggacggccagggcagatgcctggccctgctggagctgctgaccgtgctgcccgaggagttccagaccagcagactgccccagtacagaaagggcctggtgagaaccagcctggccgtggagtgcggcgccgtgttccccctgctggagcagctgctgcagcagcccagcagccccagctgcgtgagacagaaggtgctgaagtgcttcagcagctgggtgcagctggaggtgcccctgcaggactgcgaggccctgatccaggccgccttcgccgccctgcaggacagcgagctgttcgacagcagcgtggaggccatcgtgaacgccatcagccagcccgacgcccagagatacgtgaacaccctgctgaagctgatccccctggtgctgggcctgcaggagcagctgagacaggccgtgcagaacggcgacatggagaccagccacggcatctgcagaatcgccgtggccctgggcgagaaccacagcagagccctgctggaccaggtggagcactggcagagcttcctggccctggtgaacatgatcatgttctgcaccggcatccccggccactaccccgtgaacgagaccaccagcagcctgaccctgaccttctggtacaccctgcaggacgacatcctgagcttcgaggccgagaagcaggccgtgtaccagcaggtgtacagacccgtgtacttccagctggtggacgtgctgctgcacaaggcccagttccccagcgacgaggagtacggcttctggagcagcgacgagaaggagcagttcagaatctacagagtggacatcagcgacaccctgatgtacgtgtacgagatgctgggcgccgagctgctgagcaacctgtacgacaagctgggcagactgctgaccagcagcgaggagccctacagctggcagcacaccgaggccctgctgtacggcttccagagcatcgccgagaccatcgacgtgaactacagcgacgtggtgcccggcctgatcggcctgatccccagaatcagcatcagcaacgtgcagctggccgacaccgtgatgttcaccatcggcgccctgagcgagtggctggccgaccaccccgtgatgatcaacagcgtgctgcccctggtgctgcacgccctgggcaaccccgagctgagcgtgagcagcgtgagcaccctgaagaagatctgcagagagtgcaagtacgacctgcccccctacgccgccaacatcgtggccgtgagccaggacgtgctgatgaagcagatccacaagaccagccagtgcatgtggctgatgcaggccctgggcttcctgctgagcgccctgcaggtggaggagatcctgaagaacctgcacagcctgatcagcccctacatccagcagctggagaagctggccgaggagatccccaaccccagcaacaagctggccatcgtgcacatcctgggcctgctgagcaacctgttcaccaccctggacatcagccaccacgaggacgaccacgagggccccgagctgagaaagctgcccgtgccccagggccccaaccccgtggtggtggtgctgcagcaggtgttccagctgatccagaaggtgctgagcaagtggctgaacgacgcccaggtggtggaggccgtgtgcgccatcttcgagaagagcgtgaagaccctgctggacgacttcgcccccatggtgccccagctgtgcgagatgctgggcagaatgtacagcaccatcccccaggccagcgccctggacctgaccagacagctggtgcacatcttcgcccacgagcccgcccacttcccccccatcgaggccctgttcctgctggtgaccagcgtgaccctgaccctgttccagcagggccccagagaccaccccgacatcgtggacagcttcatgcagctgctggcccaggccctgaagagaaagcccgacctgttcctgtgcgagagactggacgtgaaggccgtgttccagtgcgccgtgctggccctgaagttccccgaggcccccaccgtgaaggccagctgcggcttcttcaccgagctgctgcccagatgcggcgaggtggagagcgtgggcaaggtggtgcaggaggacggcagaatgctgctgatcgccgtgctggaggccatcggcggccaggccagcagaagcctgatggactgcttcgccgacatcctgttcgccctgaacaagcactgcttcagcctgctgagcatgtggatcaaggaggccctgcagccccccggcttccccagcgccagactgagccccgagcagaaggacaccttcagccagcagatcctgagagagagagtgaacaagagaagagtgaaggagatggtgaaggagttcaccctgctgtgcagaggcctgcacggcaccgactacaccgccgactactag

SEQ ID NO: 10829 - DNA, 2907 bp, synthetic construct
  source 1..2907: mol_type = other DNA; note = Synthetic coding sequence
atgagactgctgagacacaccgagagcgagcagtggttccacagattccccctgtgccccagcctgaccttctgggcccccgtggccatgtggccccagacccactgcgtgggcggcagaagcagcggcctgaccaagtggacctacagcttcagcgccagcctgcaggacggcagcttcccctacgacagcgtgccctggcagcagaacaccaaccagccccccggcagcctgagcgtggtgaccaccgtgtggggcgtgaccaacaccagccagagccaggccgacgtgctgatcccccacgccacctgcagacccggccccctgctgatcaccgcctgggagccctacggccagtgccagcagccccacgagagcagaagacagccccacggcgtgggccacgaccaccagcagcccagaccccagctgcccaccgtgtgcggcgccgccgccgccgtgctgagccagggctggcccagaagcgccctgcaccccgccgagcacgtgtggcccgcccagctgcccagacagagaggcctgtggggccagcccgccgccgccgccgccgccgccgccgtggccgccgccgccgccaccgccaccgccaccgccaccgccaccgtggccgccctgcaggagacccagaacaaggacatcaaccagtacggccccgcccccgtgctgctgcccgacctgctgaaggacggcctgggcgacgaggagagaggcgcccccatcggcatgcagaacagcatgaaccccgccagcatggccgccggcatgacccccagcggcatgagcggcccccccatgggcatgaaccagcccagaccccccggcatcagccccttcggcacccacggccagagaatgccccagcagacctaccccggccccagaccccagagcctgcccatccagaacatcaagagaccctaccccggcgagcccaactacggcaaccagcagtacggccccaacagccagttccccacccagcccggccagtaccccgcccccaacccccccagacccctgaccagccccaactaccccggccagagaatgcccagccagcccagcagcggccagtaccccccccccaccgtgaacatgggccagtactacaagcccgagcagttcaacggccagaacaacaccttcagcggcagcagctacagcaactacagccagggcaacgtgaacagaccccccagacccgtgcccgtggccaactacccccacagccccgtgcccggcaaccccaccccccccatgacccccggcagcagcatccccccctacctgagccccagccaggacgtgaagccccccttcccccccgacatcaagcccaacatgagcgccctgccccccccccccgaccacaacgacgagctgagactgaccttccccgtgagagacggcgtggtgctggagcccttcagactggagcacaacctggccgtgagcaaccacgtgttccacctgagacccaccgtgcaccagaccctgatgtggagcgacctggagctgcagttcaagtgctaccaccacgaggacagacagatgaacaccaactggcccgccagcgtgcaggtgagcgtgaacgccacccccctgaccatcgagagaggcgacaacaagaccagccacaagcccctgcacctgaagcacgtgtgccagcccggcagaaacaccatccagatcaccgtgaccgcctgctgctgcagccacctgttcgtgctgcagctggtgcacagacccagcgtgagaagcgtgctgcagggcctgctgaagaagagactgctgcccgccgagcactgcatcaccaagaagagaaacttcagcagcgtggccgccagcagcggcaacaccaccctgaacggcgaggacggcgtggagcagaccgccatcaaggtgagcctgaagtgccccatcaccttcagaagaatccagctgcccgccagaggccacgactgcaagcacgtgcagtgcttcgacctggagagctacctgcagctgaactgcgagagaggcacctggagatgccccgtgtgcaagaccgccctgctggagggcctggaggtggaccagtacatgtggggcatcctgaacgccatccacagcgagttcgaggaggtgaccatcgaccccacctgcagctggagacccgtgcccatcaagagcgacctgcacatcaaggacgaccccgacggcatccccagcaagagattcaagaccatgagccccagccagatgatcatgcccaacgtgatggagatgatcgccgccctgggccccggccccagcccctaccccctgccccccccccccggcggcaccaacagcaacgactacagcagccagaacaactaccagggccacggcaacttcgacttcccccacggcaaccccggcggcaccagcatgaacgacttcatgcacggccccccccagctgagccacccccccgacatgcccaacaacatggccgccctggagaagcccctgagccaccccatgcaggagaccatgccccacgccggcagcagcgaccagccccaccccagcatccagcagggcctgcacgtgccccaccccagcagccagagcggcccccccctgcaccacagcggcgcccccccccccccccccagccagccccccagacagcccccccaggccgcccccagcagccacccccacagcgacctgaccttcaaccccagcagcgccctggagggccaggccggcgcccagggcgccagcgacatgcccgagcccagcctggacctgctgcccgagctgaccaaccccgacgagctgctgagctacctggacccccccgacctgcccagcaacagcaacgacgacctgctgagcctgttcgagaacaactag

SEQ ID NO: 10830 - DNA, 603 bp, synthetic construct
  source 1..603: mol_type = other DNA; note = Synthetic coding sequence
atggccatggagatgagactgcccgtggccagaaagcccctgagcgagagactgggcagagacaccaagaagcacctggtggtgcccggcgacaccatcaccaccgacaccggcttcatgagaggccacggcacctacatgggcgaggagaagctgatcgccagcgtggccggcagcgtggagagagtgaacaagctgatctgcgtgaaggccctgaagaccagatacatcggcgaggtgggcgacatcgtggtgggcagaatcaccgaggtgcagcagaagagatggaaggtggagaccaacagcagactggacagcgtgctgctgctgagcagcatgaacctgcccggcggcgagctgagaagaagaagcgccgaggacgagctggccatgagaggcttcctgcaggagggcgacctgatcagcgccgaggtgcaggccgtgttcagcgacggcgccgtgagcctgcacaccagaagcctgaagtacggcaagacccacttccacgacctgccctgcggcgccagcgtgatcctgggcaacaacggcttcatctggatctaccccacccccgagcacaaggaggaggaggccggcggctag

SEQ ID NO: 10831 - DNA, 792 bp, synthetic construct
  source 1..792: mol_type = other DNA; note = Synthetic coding sequence
atggccatggagatgagactgcccgtggccagaaagcccctgagcgagagactgggcagagacaccaagaagcacctggtggtgcccggcgacaccatcaccaccgacaccggcttcatgagaggccacggcacctacatgggcgaggagaagctgatcgccagcgtggccggcagcgtggagagagtgaacaagctgatctgcgtgaaggccctgaagaccagatacatcggcgaggtgggcgacatcgtggtgggcagaatcaccgagagaagaagaagcgccgaggacgagctggccatgagaggcttcctgcaggagggcgacctgatcagcgccgaggtgcaggccgtgttcagcgacggcgccgtgagcctgcacaccagaagcctgaagtacggcaagctgggccagggcgtgctggtgcaggtgagccccagcctggtgaagagacagaagacccacttccacgacctgccctgcggcgccagcgtgatcctgggcaacaacggcttcatctggatctaccccacccccgagcacaaggaggaggaggccggcggcttcatcgccaacctggagcccgtgagcctggccgacagagaggtgatcagcagactgagaaactgcatcatcagcctggtgacccagagaatgatgctgtacgacaccagcatcctgtactgctacgaggccagcctgccccaccagatcaaggacatcctgaagcccgagatcatggaggagatcgtgatggagaccagacagagactgctggagcaggagggctag

SEQ ID NO: 10832 - DNA, 858 bp, synthetic construct
  source 1..858: mol_type = other DNA; note = Synthetic coding sequence
atggccatggagatgagactgcccgtggccagaaagcccctgagcgagagactgggcagagacaccaagaagcacctggtggtgcccggcgacaccatcaccaccgacaccggcttcatgagaggccacggcacctacatgggcgaggagaagctgatcgccagcgtggccggcagcgtggagagagtgaacaagctgatctgcgtgaaggccctgaagaccagatacatcggcgaggtgggcgacatcgtggtgggcagaatcaccgaggtgcagcagaagagatggaaggtggagaccaacagcagactggacagcgtgctgctgctgagcagcatgaacctgcccggcggcgagctgagaagaagaagcgccgaggacgagctggccatgagaggcttcctgcaggagggcgacctgatcagcgccgaggtgcaggccgtgttcagcgacggcgccgtgagcctgcacaccagaagcctgaagtacggcaaggtgagccccagcctggtgaagagacagaagacccacttccacgacctgccctgcggcgccagcgtgatcctgggcaacaacggcttcatctggatctaccccacccccgagcacaaggaggaggaggccggcggcttcatcgccaacctggagcccgtgagcctggccgacagagaggtgatcagcagactgagaaactgcatcatcagcctggtgacccagagaatgatgctgtacgacaccagcatcctgtactgctacgaggccagcctgccccaccagatcaaggacatcctgaagcccgagatcatggaggagatcgtgatggagaccagacagagactgctggagcaggagggctag

SEQ ID NO: 10833 - DNA, 882 bp, synthetic construct
  source 1..882: mol_type = other DNA; note = Synthetic coding sequence
atggccatggagatgagactgcccgtggccagaaagcccctgagcgagagactgggcagagacaccaagaagcacctggtggtgcccggcgacaccatcaccaccgacaccggcttcatgagaggccacggcacctacatgggcgaggagaagctgatcgccagcgtggccggcagcgtggagagagtgaacaagctgatctgcgtgaaggccctgaagaccagatacatcggcgaggtgggcgacatcgtggtgggcagaatcaccgaggtgcagcagaagagatggaaggtggagaccaacagcagactggacagcgtgctgctgctgagcagcatgaacctgcccggcggcgagctgagaagaagaagcgccgaggacgagctggccatgagaggcttcctgcaggagggcgacctgatcagcgccgaggtgcaggccgtgttcagcgacggcgccgtgagcctgcacaccagaagcctgaagtacggcaagctgggccagggcgtgctggtgcaggtgagccccagcctggtgaagagacagaagacccacttccacgacctgccctgcggcgccagcgtgatcctgggcaacaacggcttcatctggatctaccccacccccgagcacaaggaggaggaggccggcggcttcatcgccaacctggagcccgtgagcctggccgacagagaggtgatcagcagactgagaaactgcatcatcagcctggtgacccagagaatgatgctgtacgacaccagcatcctgtactgctacgaggccagcctgccccaccagatcaaggacatcctgaagcccgagatcatggaggagatcgtgatggagaccagacagagactgctggagcaggagggctag

SEQ ID NO: 10834 - DNA, 3195 bp, synthetic construct
  source 1..3195: mol_type = other DNA; note = Synthetic coding sequence
atggccagcgagagcgagaccctgaaccccagcgccagaatcatgaccttctaccccaccatggaggagttcagaaacttcagcagatacatcgcctacatcgagagccagggcgcccacagagccggcctggccaaggtggtgccccccaaggagtggaagcccagagccagctacgacgacatcgacgacctggtgatccccgcccccatccagcagctggtgaccggccagagcggcctgttcacccagtacaacatccagaagaaggccatgaccgtgagagagttcagaaagatcgccaacagcgacaagtactgcacccccagatacagcgagttcgaggagctggagagaaagtactggaagaacctgaccttcaacccccccatctacggcgccgacgtgaacggcaccctgtacgagaagcacgtggacgagtggaacatcggcagactgagaaccatcctggacctggtggagaaggagagcggcatcaccatcgagggcgtgaacaccccctacctgtacttcggcatgtggaagaccagcttcgcctggcacaccgaggacatggacctgtacagcatcaactacctgcacttcggcgagcccaagagctggtacagcgtgccccccgagcacggcaagagactggagagactggccaagggcttcttccccggcagcgcccagagctgcgaggccttcctgagacacaagatgaccctgatcagccccctgatgctgaagaagtacggcatccccttcgacaaggtgacccaggaggccggcgagttcatgatcaccttcccctacggctaccacgccggcttcaaccacggcttcaactgcgccgagagcaccaacttcgccaccagaagatggatcgagtacggcaagcaggccgtgctgtgcagctgcagaaaggacatggtgaagatcagcatggacgtgttcgtgagaaagttccagcccgagagatacaagctgtggaaggccggcaaggacaacaccgtgatcgaccacaccctgcccacccccgaggccgccgagttcctgaaggagagcgagctgccccccagagccggcaacgaggaggagtgccccgaggaggacatggagggcgtggaggacggcgaggagggcgacctgaagaccagcctggccaagcacagaatcggcaccaagagacacagagtgtgcctggagatcccccaggaggtgagccagagcgagctgttccccaaggaggacctgagcagcgagcagtacgagatgaccgagtgccccgccgccctggcccccgtgagacccacccacagcagcgtgagacaggtggaggacggcctgaccttccccgactacagcgacagcaccgaggtgaagttcgaggagctgaagaacgtgaagctggaggaggaggacgaggaggaggagcaggccgccgccgccctggacctgagcgtgaaccccgccagcgtgggcggcagactggtgttcagcggcagcaagaagaagagcagcagcagcctgggcagcggcagcagcagagacagcatcagcagcgacagcgagaccagcgagcccctgagctgcagagcccagggccagaccggcgtgctgaccgtgcacagctacgccaagggcgacggcagagtgaccgtgggcgagccctgcaccagaaagaagggcagcgccgccagaagcttcagcgagagagagctggccgaggtggccgacgagtacatgttcagcctggaggagaacaagaagagcaagggcagaagacagcccctgagcaagctgcccagacaccaccccctggtgctgcaggagtgcgtgagcgacgacgagaccagcgagcagctgacccccgaggaggaggccgaggagaccgaggcctgggccaagcccctgagccagctgtggcagaacagaccccccaacttcgaggccgagaaggagttcaacgagaccatggcccagcaggccccccactgcgccgtgtgcatgatcttccagacctaccaccaggtggagttcggcggcttcaaccagaactgcggcaacgccagcgacctggccccccagaagcagagaaccaagcccctgatccccgagatgtgcttcaccagcaccggctgcagcaccgacatcaacctgagcaccccctacctggaggaggacggcaccagcatcctggtgagctgcaagaagtgcagcgtgagagtgcacgccagctgctacggcgtgccccccgccaaggccagcgaggactggatgtgcagcagatgcagcgccaacgccctggaggaggactgctgcctgtgcagcctgagaggcggcgccctgcagagagccaacgacgacagatgggtgcacgtgagctgcgccgtggccatcctggaggccagattcgtgaacatcgccgagagaagccccgtggacgtgagcaagatccccctgcccagattcaagctgaagtgcatcttctgcaagaagagaagaaagagaaccgccggctgctgcgtgcagtgcagccacggcagatgccccaccgccttccacgtgagctgcgcccaggccgccggcgtgatgatgcagcccgacgactggcccttcgtggtgttcatcacctgcttcagacacaagatccccaacctggagagagccaagggcgccctgcagagcatcaccgccggccagaaggtgatcagcaagcacaagaacggcagattctaccagtgcgaggtggtgagactgaccaccgagaccttctacgaggtgaacttcgacgacggcagcttcagcgacaacctgtaccccgaggacatcgtgagccaggactgcctgcagttcggcccccccgccgagggcgaggtggtgcaggtgagatggaccgacggccaggtgtacggcgccaagttcgtggccagccaccccatccagatgtaccaggtggagttcgaggacggcagccagctggtggtgaagagagacgacgtgtacaccctggacgaggagctgcccaagagagtgaagagcagactgagcgtggccagcgacatgagattcaacgagatcttcaccgagaaggaggtgaagcaggagaagaagagacagagagtgatcaacagcagatacagagaggactacatcgagcccgccctgtacagagccatcatggagtag

SEQ ID NO: 10835 - DNA, 2745 bp, synthetic construct; identical to SEQ ID NO: 9882
  source 1..2745: mol_type = other DNA; note = Synthetic coding sequence

SEQ ID NO: 10836 - DNA, 1215 bp, synthetic construct
  source 1..1215: mol_type = other DNA; note = Synthetic coding sequence
atggacttcaacatgaagaagctggccagcgacgccggcatcttcttcaccagagccgtgcagttcaccgaggagaagttcggccaggccgagaagaccgagctggacgcccacttcgagaacctgctggccagagccgacagcaccaagaactggaccgagaagatcctgagacagaccgaggtgctgctgcagcccaaccccagcgccagagtggaggagttcctgtacgagaagctggacagaaaggtgcccagcagagtgaccaacggcgagctgctggcccagtacatggccgacgccgccagcgagctgggccccaccaccccctacggcaagaccctgatcaaggtggccgaggccgagaagcagctgggcgccgccgagagagacttcatccacaccgccagcatcagcttcctgacccccctgagaaacttcctggagggcgactggaagaccatcagcaaggagagaagactgctgcagaacagaagactggacctggacgcctgcaaggccagactgaagaaggccaaggccgccgaggccaaggccacctgcgagggcgacaccgtgcccgacttccaggagaccagacccagaaactacatcctgagcgccagcgccagcgccctgtggaacgacgaggtggacaaggccgagcaggagctgagagtggcccagaccgagttcgacagacaggccgaggtgaccagactgctgctggagggcatcagcagcacccacgtgaaccacctgagatgcctgcacgagttcgtgaagagccagaccacctactacgcccagtgctacagacacatgctggacctgcagaagcagctgggcagcagccagggcgccatcttccccggcaccttcgtgggcaccaccgagcccgccagcccccccctgagcagcaccagccccaccaccgccgccgccaccatgcccgtggtgcccagcgtggccagcctggccccccccggcgaggccagcctgtgcctggaggaggtggccccccccgccagcggcaccagaaaggccagagtgctgtacgactacgaggccgccgacagcagcgagctggccctgctggccgacgagctgatcaccgtgtacagcctgcccggcatggaccccgactggctgatcggcgagagaggcaacaagaagggcaaggtgcccgtgacctacctggagctgctgagctag

SEQ ID NO: 10837 - DNA, 1188 bp, synthetic construct
  source 1..1188: mol_type = other DNA; note = Synthetic coding sequence
atggacttcaacatgaagaagctggccagcgacgccggcatcttcttcaccagagccgtgcagttcaccgaggagaagttcggccaggccgagaagaccgagctggacgcccacttcgagaacctgctggccagagccgacagcaccaagaactggaccgagaagatcctgagacagaccgaggtgctgctgcagcccaaccccagcgccagagtggaggagttcctgtacgagaagctggacagaaaggtgcccagcagagtgaccaacggcgagctgctggcccagtacatggccgacgccgccagcgagctgggccccaccaccccctacggcaagaccctgatcaaggtggccgaggccgagaagcagctgggcgccgccgagagagacttcatccacaccgccagcatcagcttcctgacccccctgagaaacttcctggagggcgactggaagaccatcagcaaggagagaagactgctgcagaacagaagactggacctggacgcctgcaaggccagactgaagaaggccaaggccgccgaggccaaggccaccaccgtgcccgacttccaggagaccagacccagaaactacatcctgagcgccagcgccagcgccctgtggaacgacgaggtggacaaggccgagcaggagctgagagtggcccagaccgagttcgacagacaggccgaggtgaccagactgctgctggagggcatcagcagcacccacgtgaaccacctgagatgcctgcacgagttcgtgaagagccagaccacctactacgcccagtgctacagacacatgctggacctgcagaagcagctgggcagattccccggcaccttcgtgggcaccaccgagcccgccagcccccccctgagcagcaccagccccaccaccgccgccgccaccatgcccgtggtgcccagcgtggccagcctggccccccccggcgaggccagcctgtgcctggaggaggtggccccccccgccagcggcaccagaaaggccagagtgctgtacgactacgaggccgccgacagcagcgagctggccctgctggccgacgagctgatcaccgtgtacagcctgcccggcatggaccccgactggctgatcggcgagagaggcaacaagaagggcaaggtgcccgtgacctacctggagctgctgagctag

SEQ ID NO: 10838 - DNA, 1188 bp, synthetic construct; identical to SEQ ID NO: 10837
  source 1..1188: mol_type = other DNA; note = Synthetic coding sequence

SEQ ID NO: 10839 - DNA, 615 bp, synthetic construct
  source 1..615: mol_type = other DNA; note = Synthetic coding sequence
atgagctggacctgccccagatgccagcagcccgtgttcttcgccgagaaggtgagcagcctgggcaagaactggcacagattctgcctgaagtgcgagagatgccacagcatcctgagccccggcggccacgccgagcacaacggcagaccctactgccacaagccctgctacggcgccctgttcggccccagaggcgtgaacatcggcggcgtgggcagctacctgtacaacccccccacccccagccccggctgcaccacccccctgagccccagcagcttcagcccccccagacccagaaccggcctgccccagggcaagaagagccccccccacatgaagaccttcaccggcgagaccagcctgtgccccggctgcggcgagcccgtgtacttcgccgagaaggtgatgagcctgggcagaaactggcacagaccctgcctgagatgccagagatgccacaagaccctgaccgccggcagccacgccgagcacgacggcgtgccctactgccacgtgccctgctacggctacctgttcggccccaagggcgtgaacatcggcgacgtgggctgctacatctacgaccccgtgaagatcaagttcaagtag

SEQ ID NO: 10840 - DNA, 1221 bp, synthetic construct
  source 1..1221: mol_type = other DNA; note = Synthetic coding sequence
atggagagcctgagaggctacacccacagcgacatcggctacagaagcctggccgtgggcgaggacatcgaggaggtgaacgacgagaagctgaccgtgaccagcctgatggccagaggcggcgaggacgaggagaacaccagaagcaagcccgagtacggcaccgaggccgagaacaacgtgggcaccgagggcagcgtgcccagcgacgaccaggacagagagggcggcggcggccacgagcccgagcagcagcaggaggagccccccctgaccaagcccgagcagcagcaggaggagccccccctgctggagctgaagcaggagcaggaggagcccccccagaccaccgtggagggcccccagcccgccgagggcccccagaccgccgagggcccccagccccccgagagaaagagaagaagaagaaccgccttcacccagttccagctgcaggagctggagaacttcttcgacgagagccagtaccccgacgtggtggccagagagagactggccgccagactgaacctgaccgaggacagagtgcaggtgtggttccagaacagaagagccaagtggaagagaaaccagagagtgctgatgctgagaaacaccgccaccgccgacctggcccaccccctggacatgttcctgggcggcgcctactacgccgcccccgccctggaccccgccctgtgcgtgcacctggtgccccagctgcccagaccccccgtgctgcccgtgccccccatgccccccagaccccccatggtgcccatgccccccagaccccccatcgcccccatgccccccatggcccccgtgccccccggcagcagaatggcccccgtgccccccggccccagaatggcccccgtgcccccctggccccccatggcccccgtgcccccctggccccccatggcccccgtgcccaccggcccccccatggcccccgtgccccccggcccccccatggccagagtgccccccggcccccccatggccagagtgccccccggcccccccatggcccccctgccccccggcccccccatggcccccctgccccccggcccccccatggcccccctgccccccggcccccccatggcccccctgccccccagaagccacgtgccccacaccggcctggcccccgtgcacatcacctgggcccccgtgatcaacagctactacgcctgccccttcttctag

SEQ ID NO: 10841 - DNA, 873 bp, synthetic construct
  source 1..873: mol_type = other DNA; note = Synthetic coding sequence
atgagccccagcgccaagaagagacccaagaacagcagagtgagcaagatgcaggacgagaagctgagagacgagaccgagcagcccgtgagcaaggtgatcgagagaaacagactgagaaccgtgctgaagaacctgagcctgctgaagctgctgaagagcagcaacagaagaatccaggagctgcacaagctggccaagagatgctggcacagcctgctgagcgtgcccaagatcctgagaatcagcagcggcgagaacagcgcctgcaacaagaccaagcagaacaacgaggagttccaggagatcggctgcagcgagaaggagctgaagagcaagaagctggagagcaccggcgaccccaagaagaaggagtacaaggagtggaagagccaggtgcagagcggcatgagaaacaaggagaagaccagcctggccgccatgcccagaaaggagaagcacatcgagcccgaggtgcccagaaccagcagagacgacagcctgaaccccggcgtgcagggcagacagcccctgaccgagggccccagagtgatcttcatcaagccctacagaaacagaacccccatgggccacatgaagcagctggacgtggccgaccagtggatctggttcgagggcctgcccaccagaatccacctgcccgcccccagagtgatgtgcagaagcagcaccctgagatgggtgaagagaagatgcaccagattctgcagcgccagcctggagatgcccatgtggcacccctacaaggtggacgtgacctggaccagagccagaggcgccagcagaggctggagaagcagacaccagctgaagggcagaaacggctggagaaacagcagagtgtacaagtag

SEQ ID NO: 10842 - DNA, 1644 bp, synthetic construct; identical to SEQ ID NO: 10555
  source 1..1644: mol_type = other DNA; note = Synthetic coding sequence

SEQ ID NO: 10843 - DNA, 1881 bp, synthetic construct
  source 1..1881: mol_type = other DNA; note = Synthetic coding sequence
atgtgcagcaccctgaagaagtgcggcacctacagaaccgaggtggccgagtgccacgaccacggcagcaccttccagggcagaaagaagggcggcagcagcttcagagacaacttcgacaagagaagctgccactacgagcacggcggctacgagagaccccccagccactgccaggagaacgacggcagcgtggagatgagagacgtgcacaaggaccagcagctgagacacaccccctacagcatcagatgcgagagaagaatgaagtggcacagcgaggacgagatcagaatcaccacctggagaaacagaaagccccccgagagaaagatgagccagaacacccaggacggctacaccagaaactggttcaaggtgaccatcccctacggcatcaagtacgacaaggcctggctgatgaacagcatccagagccactgcagcgacagattcacccccgtggacttccactacgtgagaaacagagcctgcttcttcgtgcaggacgccagcgccgccagcgccctgaaggacgtgagctacaagatctacgacgacgagaaccagaagatctgcatcttcgtgaaccacagcaccgccccctacagcgtgaagaacaagctgaagcccggccagatggagatgctgaagctgaccatgaacaagagatacaacgtgagccagcaggccctggacctgcagaacctgagattcgaccccgacctgatgggcagagacatcgacatcatcctgaacagaagaaactgcatggccgccaccctgaagatcatcgagagaaacttccccgagctgctgagcctgaacctgtgcaacaacaagctgtaccagctggacggcctgagcgacatcaccgagaaggcccccaaggtgaagaccctgaacctgagcaagaacaagctggagagcgcctgggagctgggcaaggtgaagggcctgaagctggaggagctgtggctggagggcaaccccctgtgcagcaccttcagcgaccagagcgcctacgtgagcgccatcagagactgcttccccaagctgctgagactggacggcagagagctgagcgcccccgtgatcgtggacatcgacagcagcgagaccatgaagccctgcaaggagaacttcaccggcagcgagaccctgaagcacctggtgctgcagttcctgcagcagtactacagcatctacgacagcggcgacagacagggcctgctgggcgcctaccacgacgaggcctgcttcagcctggccatccccttcgaccccaaggacagcgcccccagcagcctgtgcaagtacttcgaggacagcagaaacatgaagaccctgaaggacccctacctgaagggcgagctgctgagaagaaccaagagagacatcgtggacagcctgagcgccctgcccaagacccagcacgacctgagcagcatcctggtggacgtgtggtgccagaccgagagaatgctgtgcttcagcgtgaacggcgtgttcaaggaggtggagggccagagccagggcagcgtgctggccttcaccagaaccttcatcgccacccccggcagcagcagcagcctgtgcatcgtgaacgacgagctgttcgtgagagacgccagcccccaggagacccagagcgccttcagcatccccgtgagcaccctgagcagcagcagcgagcccagcctgagccaggagcagcaggagatggtgcaggccttcagcgcccagagcggcatgaagctggagtggagccagaagtgcctgcaggacaacgagtggaactacaccagagccggccaggccttcaccatgctgcagaccgagggcaagatccccgccgaggccttcaagcagatcagctag

SEQ ID NO: 10844 - DNA, 1881 bp, synthetic construct; identical to SEQ ID NO: 10843
  source 1..1881: mol_type = other DNA; note = Synthetic coding sequence

SEQ ID NO: 10845 - DNA, 1230 bp, synthetic construct
  source 1..1230: mol_type = other DNA; note = Synthetic coding sequence
atgaagtggcacagcgaggacgagatcagaatcaccacctggagaaacagaaagccccccgagagaaagatgagccagaacacccaggacggctacaccagaaactggttcaaggtgaccatcccctacggcatcaagtacgacaaggcctggctgatgaacagcatccagagccactgcagcgacagattcacccccgtggacttccactacgtgagaaacagagcctgcttcttcgtgcaggacgccagcgccgccagcgccctgaaggacgtgagctacaagatctacgacgacgagaaccagaagatctgcatcttcgtgaaccacagcaccgccccctacagcgtgaagaacaagctgaagcccggccagatggagatgctgaagctgaccatgaacaagagatacaacgtgagccagcaggccctggacctgcagaacctgagattcgaccccgacctgatgggcagagacatcgacatcatcctgaacagaagaaactgcatggccgccaccctgaagatcatcgagagaaacttccccgagctgctgagcctgaacctgtgcaacaacaagctgtaccagctggacggcctgagcgacatcaccgagaaggcccccaaggtgaagaccctgaacctgagcaagaacaagctggagagcgcctgggagctgggcaaggtgaagggcctgaagctggaggagctgtggctggagggcaaccccctgtgcagcaccttcagcgaccagagcgcctacgtgagcgccatcagagactgcttccccaagctgctgagactggacggcagagagctgagcgcccccgtgatcgtggacatcgacagcagcgagaccatgaagccctgcaaggagaacttcaccggcagcgagaccctgaagcacctggtgctgcagttcctgcagcagtactacagcatctacgacagcggcgacagacagggcctgctgggcgcctaccacgacgaggcctgcttcagcctggccatccccttcgaccccaaggacagcgcccccagcagcctgtgcaagtacttcgaggacagcagaaacatgaagaccctgaaggacccctacctgaagggcgagctgctgagaagaaccaagagagacatcgtggacagcctgagcgccctgcccaagacccagcacgacctgagcagcatcctggtggacgtgtggtgccagaccgtgcccagcggccagtag

SEQ ID NO: 10846 - DNA, 1326 bp, synthetic construct; identical to SEQ ID NO: 9196
  source 1..1326: mol_type = other DNA; note = Synthetic coding sequence

SEQ ID NO: 10847 - DNA, 1158 bp, synthetic construct
  source 1..1158: mol_type = other DNA; note = Synthetic coding sequence
atggccagcgtggccgccgccagagccgtgcccgtgggcagcggcctgagaggcctgcagagaaccctgcccctggtggtgatcctgggcgccaccggcaccggcaagagcaccctggccctgcagctgggccagagactgggcggcgagatcgtgagcgccgacagcatgcagccccaggagatgggcaccgagaaggtgatcgacagaaaggtggagctggagaaggaggacggcctggtgctgcacaagagactgagccaggtggaccccgagatggccgccaagctgcacccccacgacaagagaaaggtggccagaagcctgcaggtgttcgaggagaccggcatcagccacagcgagttcctgcacagacagcacaccgaggagggcggcggccccctgggcggccccctgaagttcagcaacccctgcatcctgtggctgcacgccgaccaggccgacgagagactggacaagagagtggacgacatgctggccgccggcctgctggaggagctgagagacttccacagaagatacaaccagaagaacgtgagcgagaacagccaggactaccagcacggcatcttccagagcatcggcttcaaggagttccacgagtacctgatcaccgagggcaagtgcaccctggagaccagcaaccagctgctgaagaagggcatcgaggccctgaagcaggtgaccaagagatacgccagaaagcagaacagatgggtgaagaacagattcctgagcagacccggccccatcgtgccccccgtgtacggcctggaggtgagcgacgtgagcaagtgggaggagagcgtgctggagcccgccctggagatcgtgcagagcttcatccagggccacaagcccaccgccacccccatcaagatgccctacaacgaggccgagaacaagagaagctaccacctgtgcgacctgtgcgacagaatcatcatcggcgacagagagtgggccgcccacatcaagagcaagagccacctgaaccagctgaagaagagaagaagactggacagcgacgccgtgaacaccatcgagagccagagcgtgagccccgaccacaacaaggagcccaaggagaagggcagccccggccagaacgaccaggagctgaagtgcagcgtgtag

SEQ ID NO: 10848 - DNA, 987 bp, synthetic construct
  source 1..987: mol_type = other DNA; note = Synthetic coding sequence
atgaagagacccaaggagcccagcggcagcgacggcgagagcgacggccccatcgacgtgggccaggagggccagctgagccagatggccagacccctgagcacccccagcagcagccagatgcaggccagaaagaagcacagaggcatcatcgagaagagaagaagagacagaatcaacagcagcctgagcgagctgagaagactggtgcccaccgccttcgagaagcagggcagcagcaagctggagaaggccgaggtgctgcagatgaccgtggaccacctgaagatgctgcacgccaccggcggcaccggcttcttcgacgccagagccctggccgtggacttcagaagcatcggcttcagagagtgcctgaccgaggtgatcagatacctgggcgtgctggagggccccagcagcagagccgaccccgtgagaatcagactgctgagccacctgaacagctacgccgccgagatggagcccagccccacccccaccggccccctggccttccccgcctggccctggagcttcttccacagctgccccggcctgcccgccctgagcaaccagctggccatcctgggcagagtgcccagccccgtgctgcccggcgtgagcagccccgcctaccccatccccgccctgagaaccgcccccctgagaagagccaccggcatcatcctgcccgccagaagaaacgtgctgcccagcagaggcgccagcagcaccagaagagccagacccctggagagacccgccacccccgtgcccgtggcccccagcagcagagccgccagaagcagccacatcgcccccctgctgcagagcagcagccccaccccccccggccccaccggcagcgccgcctacgtggccgtgcccacccccaacagcagcagccccggccccgccggcagacccgccggcgccatgctgtaccacagctgggtgagcgagatcaccgagatcggcgccttctag

SEQ ID NO: 10849 - DNA, 2262 bp, synthetic construct
  source 1..2262: mol_type = other DNA; note = Synthetic coding sequence
atggagaccttcgagcccatcagccaggagcccctgagccaggccagctacgacaaggcccccgaccccgtgcccgagctgcaggacagcttctacgccgagctgcagagagccgagagcctgcaggagaagagcatcaaggaggccaagaccaagtgcagaaccatcgccagcctgctgaccgccgcccccaacccccacagcaagggcgtgctgatgttcaagaagagaagacagagagccaagaagtacaccctggtgagcttcggcgccgccgccggcaccggcgccgaggaggaggacggcgtgccccccaccagcgagagcgagctggacgaggaggccttcagcgacgccagaagcctgaccaaccagagcgactgggacagcccctacctggacatggagctggccagagccggcagcagagccagcgagggccagggcagcggcctgggcggccagctgagcgaggtgagcggcagaggcgtgcagctgttcgagcagcagagacagagagccgacagcagcacccaggagctggccagagtggagcccgccgccatgctgaacggcgagggcctgcagagcccccccagagcccagagcgccccccccgaggccgccgtgctgccccccagccccctgcccgcccccgtggccagccccagacccttccagcccggcggcggcgcccccacccccgcccccagcatcttcaacagaagcgccagacccttcacccccggcctgcagggccagagacccaccaccaccagcgtgatcttcagacccctggcccccaagagagccaacgacagcctgggcggcctgagccccgcccccccccccttcctgagcagccagggccccacccccctgcccagcttcaccagcggcgtgcccagccacgcccccgtgagcggcagccccagcacccccagaagcagcggccccgtgaccgccaccagcagcctgtacatccccgcccccagcagacccgtgacccccggcggcgcccccgagccccccgccccccccagcgccgccgccatgaccagcaccgccagcatcttcctgagcgcccccctgagacccagcgccagacccgaggcccccgcccccggccccggcgcccccgagccccccagcgccagagagcagagaatcagcgtgcccgccgccagaaccggcatcctgcaggaggccagaagaagaggcaccagaaagcagatgttcagacccggcaaggaggagaccaagaacagccccaaccccgagctgctgagcctggtgcagaacctggacgagaagcccagagccggcggcgccgagagcggccccgaggaggacgccctgagcctgggcgccgaggcctgcaacttcatgcagcccgtgggcgccagaagctacaagaccctgccccacgtgacccccaagacccccccccccatggcccccaagacccccccccccatgacccccaagacccccccccccgtggcccccaagccccccagcagaggcctgctggacggcctggtgaacggcgccgccagcagcgccggcatccccgagccccccagactgcagggcagaggcggcgagctgttcgccaagagacagagcagagccgacagatacgtggtggagggcacccccggccccggcctgggccccagacccagaagccccagccccacccccagcctgccccccagctggaagtacagccccaacatcagagcccccccccccatcgcctacaaccccctgctgagccccttcttcccccaggccgccagaaccctgcccaaggcccagagccagggccccagagccacccccaagcagggcatcaaggccctggacttcatgagacaccagccctaccagctgaagaccgccatgttctgcttcgacgaggtgccccccacccccggccccatcgccagcggcagccccaagaccgccagagtgcaggagatcagaagattcagcacccccgccccccagcccaccgccgagcccctggcccccaccgtgctggcccccagagccgccaccaccctggacgagcccatctggagaaccgagctggccagcgcccccgtgcccagccccgcccccccccccgaggcccccagaggcctgggcgccagccccagcagctgcggcttccaggtggccagacccagattcagcgccaccagaaccggcctgcaggcccacgtgtggagacccggcgccggccaccagtag

SEQ ID NO: 10850 - DNA, 1041 bp, synthetic construct; identical to SEQ ID NO: 9303
  source 1..1041: mol_type = other DNA; note = Synthetic coding sequence

SEQ ID NO: 10851 - DNA, 1569 bp, synthetic construct
  source 1..1569: mol_type = other DNA; note = Synthetic coding sequence
atgagcccccagaagagagtgaagaacgtgcaggcccagaacagaaccagccagggcagcagcagcttccagaccaccctgagcgcctggaaggtgaagcaggaccccagcaacagcaagaacatcagcaagcacggccagaacaaccccgtgggcgactacgagcacgccgacgaccaggccgaggaggacgccctgcagatggccgtgggctacttcgagaagggccccatcaaggccagccagaacaaggacaagaccctggagaagcacctgaagaccgtggagaacgtggcctggaagaacggcctggccagcgaggagatcgacatcctgctgaacatcgccctgagcggcaagttcggcaacgccgtgaacaccagaatcctgaagtgcatgatccccgccaccgtgatcagcgaggacagcgtggtgaaggccgtgagctggctgtgcgtgggcaagtgcagcggcagcaccaaggtgctgttctacagatggctggtggccatgttcgacttcatcgacagaaaggagcagatcaacctgctgtacggcttcttcttcgccagcctgcaggacgacgccctgtgcccctacgtgtgccacctgctgtacctgctgaccaagaaggagaacgtgaagcccttcagagtgagaaagctgctggacctgcaggccaagatgggcatgcagccccacctgcaggccctgctgagcctgtacaagttcttcgcccccgccctgatcagcgtgagcctgcccgtgagaaagaagatctacttcaagaacagcgagaacctgtggaagaccgccctgctggccgtgaagcagagaaacagaggccccagccccgagcccctgaagctgatgctgggccccgccaacgtgagacccctgaagagaaagtggaacagcctgagcgtgatccccgtgctgaacagcagcagctacaccaaggagtgcggcaagaaggagatgagcctgagcgactgcctgaacagaagcggcagcttccccctggagcagctgcagagcttcccccagctgctgcagaacatccactgcctggagctgcccagccagatgggcagcgtgctgaacaacagcctgctgctgcactacatcaactgcgtgagagacgagcccgtgctgctgagattctactactggctgagccagaccctgcaggaggagtgcatctggtacaaggtgaacaactacgagcacggcaaggagttcaccaacttcctggacaccatcatcagagccgagtgcttcctgcaggagggcttctacagctgcgaggccttcctgtacaagagcctgcccctgtgggacggcctgtgctgcagaagccagttcctgcagctggtgagctggatccccttcagcagcttcagcgaggtgaagcccctgctgttcgaccacctggcccagctgttcttcaccagcaccatctacttcaagtgcagcgtgctgcagagcctgaaggagctgctgcagaactggctgctgtggctgagcatggacatccacatgaagcccgtgaccaacagccccctgtag

SEQ ID NO: 10852 - DNA, 2271 bp, synthetic construct
  source 1..2271: mol_type = other DNA; note = Synthetic coding sequence
atgagcccccagaagagagtgaagaacgtgcaggcccagaacagaaccagccagggcagcagcagcttccagaccaccctgagcgcctggaaggtgaagcaggaccccagcaacagcaagaacatcagcaagcacggccagaacaaccccgtgggcgactacgagcacgccgacgaccaggccgaggaggacgccctgcagatggccgtgggctacttcgagaagggccccatcaaggccagccagaacaaggacaagaccctggagaagcacctgaagaccgtggagaacgtggcctggaagaacggcctggccagcgaggagatcgacatcctgctgaacatcgccctgagcggcaagttcggcaacgccgtgaacaccagaatcctgaagtgcatgatccccgccaccgtgatcagcgaggacagcgtggtgaaggccgtgagctggctgtgcgtgggcaagtgcagcggcagcaccaaggtgctgttctacagatggctggtggccatgttcgacttcatcgacagaaaggagcagatcaacctgctgtacggcttcttcttcgccagcctgcaggacgacgccctgtgcccctacgtgtgccacctgctgtacctgctgaccaagaaggagaacgtgaagcccttcagagtgagaaagctgctggacctgcaggccaagatgggcatgcagccccacctgcaggccctgctgagcctgtacaagttcttcgcccccgccctgatcagcgtgagcctgcccgtgagaaagaagatctacttcaagaacagcgagaacctgtggaagaccgccctgctggccgtgaagcagagaaacagaggccccagccccgagcccctgaagctgatgctgggccccgccaacgtgagacccctgaagagaaagtggaacagcctgagcgtgatccccgtgctgaacagcagcagctacaccaaggagtgcggcaagaaggagatgagcctgagcgactgcctgaacagaagcggcagcttccccctggagcagctgcagagcttcccccagctgctgcagaacatccactgcctggagctgcccagccagatgggcagcgtgctgaacaacagcctgctgctgcactacatcaactgcgtgagagacgagcccgtgctgctgagattctactactggctgagccagaccctgcaggaggagtgcatctggtacaaggtgaacaactacgagcacggcaaggagttcaccaacttcctggacaccatcatcagagccgagtgcttcctgcaggagggcttctacagctgcgaggccttcctgtacaagagcctgcccctgtgggacggcctgtgctgcagaagccagttcctgcagctggtgagctggatccccttcagcagcttcagcgaggtgaagcccctgctgttcgaccacctggcccagctgttcttcaccagcaccatctacttcaagtgcagcgtgctgcagagcctgaaggagctgctgcagaactggctgctgtggctgagcatggacatccacatgaagcccgtgaccaacagccccctggagaccaccctgggcggcagcatgaacagcgtgagcaagctgatccactacgtgggctggctgagcaccaccgccatgagactggagagcaacaacaccttcctgctgcacttcatcctggacttctacgagaaggtgtgcgacatctacatcaactacaacctgcccctggtggtgctgttcccccccggcatcttctacagcgccctgctgagcctggacaccagcatcctgaaccagctgtgcttcatcatgcacagatacagaaagaacctgaccgccgccaagaagaacgagctggtgcagaagaccaagagcgagttcaacttcagcagcaagacctaccaggagttcaaccactacctgaccagcatggtgggctgcctgtggaccagcaagcccttcggcaagggcatctacatcgaccccgagatcctggagaagaccggcgtggccgagtacaagaacagcctgaacgtggtgcaccaccccagcttcctgagctacgccgtgagcttcctgctgcaggagagccccgaggagagaaccgtgaacgtgagcagcatcagaggcaagaagtggagctggtacctggactacctgttcagccagggcctgcagggcctgaagctgttcatcagaagcagcgtgcaccacagcagcatccccagagccgagggcatcaactgcaacaaccagtactag

SEQ ID NO: 10853 - DNA, 933 bp, synthetic construct
  source 1..933: mol_type = other DNA; note = Synthetic coding sequence
atggccgacgccgccgccaccgccggcgccggcggcagcggcaccagaagcggcagcaagcagagcaccaaccccgccgacaactaccacctggccagaagaagaaccctgcaggtggtggtgagcagcctgctgaccgaggccggcttcgagagcgccgagaaggccagcgtggagaccctgaccgagatgctgcagagctacatcagcgagatcggcagaagcgccaagagctactgcgagcacaccgccagaacccagcccaccctgagcgacatcgtggtgaccctggtggagatgggcttcaacgtggacaccctgcccgcctacgccaagagaagccagagaatggtgatcaccgccccccccgtgaccaaccagcccgtgacccccaaggccctgaccgccggccagaacagaccccaccccccccacatccccagccacttccccgagttccccgacccccacacctacatcaagacccccacctacagagagcccgtgagcgactaccaggtgctgagagagaaggccgccagccagagaagagacgtggagagagccctgaccagattcatggccaagaccggcgagacccagagcctgttcaaggacgacgtgagcaccttccccctgatcgccgccagacccttcaccatcccctacctgaccgccctgctgcccagcgagctggagatgcagcagatggaggagaccgacagcagcgagcaggacgagcagaccgacaccgagaacctggccctgcacatcagcatggaggacagcggcgccgagaaggagaacaccagcgtgctgcagcagaaccccagcctgagcggcagcagaaacggcgaggagaacatcatcgacaacccctacctgagacccgtgaagaagcccaagatcagaagaaagaagagcctgagctag

SEQ ID NO: 10854 - DNA, 1935 bp, synthetic construct
  source 1..1935: mol_type = other DNA; note = Synthetic coding sequence
atggaggagaccatgaagctggccaccatggaggacaccgtggagtactgcctgttcctgatccccgacgagagcagagacagcgacaagcacaaggagatcctgcagaagtacatcgagagaatcatcaccagattcgcccccatgctggtgccctacatctggcagaaccagcccttcaacctgaagtacaagcccggcaagggcggcgtgcccgcccacatgttcggcgtgaccaagttcggcgacaacatcgaggacgagtggttcatcgtgtacgtgatcaagcagatcaccaaggagttccccgagctggtggccagaatcgaggacaacgacggcgagttcctgctgatcgaggccgccgacttcctgcccaagtggctggaccccgagaacagcaccaacagagtgttcttctgccacggcgagctgtgcatcatccccgcccccagaaagagcggcgccgagagctggctgcccaccaccccccccaccatcccccaggccctgaacatcatcaccgcccacagcgagaagatcctggccagcgagagcatcagagccgccgtgaacagaagaatcagaggctaccccgagaagatccaggccagcctgcacagagcccactgcttcctgcccgccggcatcgtggccgtgctgaagcagagacccagactggtggccgccgccgtgcaggccttctacctgagagaccccatcgacctgagagcctgcagagtgttcaagaccttcctgcccgagaccagaatcatgaccagcgtgaccttcaccaagtgcctgtacgcccagctggtgcagcagagattcgtgcccgacagaagaagcggctacagactgcccccccccagcgacccccagtacagagcccacgagctgggcatgaagctggcccacggcttcgagatcctgtgcagcaagtgcagcccccacttcagcgactgcaagaagagcctggtgaccgccagccccctgtgggccagcttcctggagagcctgaagaagaacgactacttcaagggcctgatcgagggcagcgcccagtacagagagagactggagatggccgagaactacttccagctgagcgtggactggcccgagagcagcctggccatgagccccggcgaggagatcctgaccctgctgcagaccatccccttcgacatcgaggacctgaagaaggaggccgccaacctgccccccgaggacgacgaccagtggctggacctgagccccgaccagctggaccagctgctgcaggaggccgtgggcaagaaggagagcgagagcgtgagcaaggaggagaaggagcagaactacgacctgaccgaggtgagcgagagcatgaaggccttcatcagcaaggtgagcacccacaagggcgccgagctgcccagagagcccagcgaggcccccatcaccttcgacgccgacagcttcctgaactacttcgacaagatcctgggccccagacccaacgagagcgacagcgacgacctggacgacgaggacttcgagtgcctggacagcgacgacgacctggacttcgagacccacgagcccggcgaggaggccagcctgaagggcaccctggacaacctgaagagctacatggcccagatggaccaggagctggcccacacctgcatcagcaagagcttcaccaccagaaaccaggtggagcccgtgagccagaccaccgacaacaacagcgacgaggaggacagcggcaccggcgagagcgtgatggcccccgtggacgtggacctgaacctggtgagcaacatcctggagagctacagcagccaggccggcctggccggccccgccagcaacctgctgcagagcatgggcgtgcagctgcccgacaacaccgaccacagacccaccagcaagcccaccaagaactag

SEQ ID NO: 10855 - DNA, 2163 bp, synthetic construct
  source 1..2163: mol_type = other DNA; note = Synthetic coding sequence
atgagcgtgagcggcaagaaggagttcgacgtgaagcagatcctgagactgagatggagatggttcagccaccccttccagggcagcaccaacaccggcagctgcctgcagcaggagggctacgagcacagaggcacccccgtgcagggcagactgaagagccacagcagagacagaaacggcctgaagaagagcaacagccccgtgcaccacaacatcctggcccccgtgcccggccccgcccccgcccaccagagagccgtgcagaacctgcagcagcacaacctgatcgtgcacttccaggccaacgaggacacccccaagagcgtgcccgagaagaacctgttcaaggaggcctgcgagaagagagcccaggacctggagatgatggccgacgacaacatcgaggacagcaccgccagactggacacccagcacagcgaggacatgaacgccaccagaagcgaggagcagttccacgtgatcaaccacgccgagcagaccctgagaaagatggagaactacctgaaggagaagcagctgtgcgacgtgctgctgatcgccggccacctgagaatccccgcccacagactggtgctgagcgccgtgagcgactacttcgccgccatgttcaccaacgacgtgctggaggccaagcaggaggaggtgagaatggagggcgtggaccccaacgccctgaacagcctggtgcagtacgcctacaccggcgtgctgcagctgaaggaggacaccatcgagagcctgctggccgccgcctgcctgctgcagctgacccaggtgatcgacgtgtgcagcaacttcctgatcaagcagctgcaccccagcaactgcctgggcatcagaagcttcggcgacgcccagggctgcaccgagctgctgaacgtggcccacaagtacaccatggagcacttcatcgaggtgatcaagaaccaggagttcctgctgctgcccgccaacgagatcagcaagctgctgtgcagcgacgacatcaacgtgcccgacgaggagaccatcttccacgccctgatgcagtgggtgggccacgacgtgcagaacagacagggcgagctgggcatgctgctgagctacatcagactgcccctgctgcccccccagctgctggccgacctggagaccagcagcatgttcaccggcgacctggagtgccagaagctgctgatggaggccatgaagtaccacctgctgcccgagagaagaagcatgatgcagagccccagaaccaagcccagaaagagcaccgtgggcgccctgtacgccgtgggcggcatggacgccatgaagggcaccaccaccatcgagaagtacgacctgagaaccaacagctggctgcacatcggcaccatgaacggcagaagactgcagttcggcgtggccgtgatcgacaacaagctgtacgtggtgggcggcagagacggcctgaagaccctgaacaccgtggagtgcttcaaccccgtgggcaagatctggaccgtgatgccccccatgagcacccacagacacggcctgggcgtggccaccctggagggccccatgtacgccgtgggcggccacgacggctggagctacctgaacaccgtggagagatgggaccccgagggcagacagtggaactacgtggccagcatgagcacccccagaagcaccgtgggcgtggtggccctgaacaacaagctgtacgccatcggcggcagagacggcagcagctgcctgaagagcatggagtacttcgacccccacaccaacaagtggagcctgtgcgcccccatgagcaagagaagaggcggcgtgggcgtggccacctacaacggcttcctgtacgtggtgggcggccacgacgcccccgccagcaaccactgcagcagactgagcgactgcgtggagagatacgaccccaagggcgacagctggagcaccgtggcccccctgagcgtgcccagagacgccgtggccgtgtgccccctgggcgacaagctgtacgtggtgggcggctacgacggccacacctacctgaacaccgtggagagctacgacgcccagagaaacgagtggaaggagagcatgcaggagctgctgcagaacttctacaccacccagaagctgaaggagaccctgggccactag

SEQ ID NO: 10856 - DNA, 2157 bp, synthetic construct
  source 1..2157: mol_type = other DNA; note = Synthetic coding sequence
atgagcgtgagcggcaagaaggagttcgacgtgaagcagatcctgagactgagatggagatggttcagccaccccttccagggcagcaccaacaccggcagctgcctgcagcaggagggctacgagcacagaggcacccccgtgcagggcagactgaagagccacagcagagacagaaacggcctgaagaagagcaacagccccgtgcaccacaacatcctggcccccgtgcccggccccgcccccgcccaccagagagccgtgcagaacctgcagcagcacaacctgatcgtgcacttccaggccaacgaggacacccccaagagcgtgcccgagaagaacctgttcaaggaggcctgcgagaagagagcccaggacctggagatgatggccgacgacaacatcgaggacagcaccgccagactggacacccagcacagcgaggacatgaacgccaccagaagcgaggagcagttccacgtgatcaaccacgccgagcagaccctgagaaagatggagaactacctgaaggagaagcagctgtgcgacgtgctgctgatcgccggccacctgagaatccccgcccacagactggtgctgagcgccgtgagcgactacttcgccgccatgttcaccaacgacgtgctggaggccaagcaggaggaggtgagaatggagggcgtggaccccaacgccctgaacagcctggtgcagtacgcctacaccggcgtgctgcagctgaaggaggacaccatcgagagcctgctggccgccgcctgcctgctgcagctgacccaggtgatcgacgtgtgcagcaacttcctgatcaagcagctgcaccccagcaactgcctgggcatcagaagcttcggcgacgcccagggctgcaccgagctgctgaacgtggcccacaagtacaccatggagcacttcatcgaggtgatcaagaaccaggagttcctgctgctgcccgccaacgagatcagcaagctgctgtgcagcgacgacatcaacgtgcccgacgaggagaccatcttccacgccctgatgcagtgggtgggccacgacgtgcagaacagacagggcgagctgggcatgctgctgagctacatcagactgcccctgctgcccccccagctgctggccgacctggagaccagcagcatgttcaccggcgacctggagtgccagaagctgctgatggaggccatgaagtaccacctgctgcccgagagaagaagcatgatgcagagccccagaaccaagcccagaaagagcaccgtgggcgccctgtacgccgtgggcggcatggacgccatgaagggcaccaccaccatcgagaagtacgacctgagaaccaacagctggctgcacatcggcaccatgaacggcagaagactgcagttcggcgtggccgtgatcgacaacaagctgtacgtggtgggcggcagagacggcctgaagaccctgaacaccgtggagtgcttcaaccccgtgggcaagatctggaccgtgatgccccccatgagcacccacagacacggcctgggcgtggccaccctggagggccccatgtacgccgtgggcggccacgacggctggagctacctgaacaccgtggagagatgggaccccgagggcagacagtggaactacgtggccagcatgagcacccccagaagcaccgtgggcgtggtggccctgaacaacaagctgtacgccatcggcggcagagacggcagcagctgcctgaagagcatggagtacttcgacccccacaccaacaagtggagcctgtgcgcccccatgagcaagagaagaggcggcgtgggcgtggccacctacaacggcttcctgtacgtggtgggcggccacgacgcccccgccagcaaccactgcagcagactgagcgactgcgtggagagatacgaccccaagggcgacagctggagcaccgtggcccccctgagcgtgcccagagacgccgtggccgtgtgccccctgggcgacaagctgtacgtggtgggcggctacgacggccacacctacctgaacaccgtggagagctacgacgcccagagaaacgagtggaaggaggaggtgcccgtgaacatcggcagagccggcgcctgcgtggtggtggtgaagctgccctag

SEQ ID NO: 10857 - DNA, 1134 bp, synthetic construct
  source 1..1134: mol_type = other DNA; note = Synthetic coding sequence
atgaacggccccgtgagccccaagagcaaggccagacccagcagccccagcaccagctggcacagacccgccagcccctgccccagccccggccccggccacaccctgccccccaagccccccagccccagaggcaccaccgccagccccaagggcagagtgagaagaaaggaggaggccaaggagagccccagcgccgccggccccgaggacaagagccagagcaagagaagagccagcaacgagaaggagagcgccgcccccgccagccccgcccccagccccgcccccagccccacccccgcccccccccagaaggagcagccccccgccgagacccccaccgcccccgccccccccgtgacccccagcaagcccatggccggcaccaccgacagagaggaggccaccagactgctggccgagaagagaagacaggccagagagcagagagagagagaggagcaggagagaagactgcaggccgagagagacaagagaatgagagaggagcagctggccagagaggccgaggccagagccgagagagaggccgaggccagaagaagagaggagcaggaggccagagagaaggcccaggccgagcaggaggagcaggagagactgcagaagcagaaggaggaggccgaggccagaagcagagaggaggccgagagacagagactggagagagagaagcacttccagcagcaggagcaggagagacaggagagaagaaagagactggaggagatcatgaagagaaccagaaagagcgaggtgagcgagaccaagaagcaggacagcaaggaggccaacgccaacggcagcagccccgagcccgtgaaggccgtggaggccagaagccccggcctgcagaaggaggccgtgcagaaggaggagcccatcccccaggagccccagtggagcctgcccagcaaggagctgcccgccagcctggtgaacggcctgcagcccctgcccgcccaccaggagaacggcttcagcaccaacggccccagcggcgacaagagcctgagcagaacccccgagaccctgctgcccttcgccgaggccgaggccttcctgaagaaggccgtggtgcagagcccccaggtgaccgaggtgctgtag

SEQ ID NO: 10858 - DNA, 2427 bp, synthetic construct
  source 1..2427: mol_type = other DNA; note = Synthetic coding sequence
atggagagcggccccagagccgagctgggcgccggcgccccccccgccgtggtggccagaaccccccccgagcccagacccagccccgagggcgaccccagccccccccccccccccatgagcgccctggtgcccgacaccccccccgacaccccccccgccatgaagaacgccaccagcagcaagcagctgcccctggagcccgagagccccagcggccaggtgggccccagacccgcccccccccaggaggagagccccagcagcgaggccaagagcagaggccccaccccccccgccatgggccccagagacgccagaccccccagaagaagcagccagcccagccccaccgccgtgcccgccagcgacagcccccccaccaagcaggaggtgaagaaggccggcgagagacacaagctggccaaggagagaagagaggagagagccaagtacctggccgccaagaaggccgtgtggctggagaaggaggagaaggccaaggccctgagagagaagcagctgcaggagagaagaagaagactggaggagcagagactgaaggccgagcagagaagagccgccctggaggagagacagagacagaagctggagaagaacaaggagagatacgaggccgccatccagagaagcgtgaagaagacctgggccgagatcagacagcagagatggagctgggccggcgccctgcaccacagcagccccggccacaagaccagcggcagcagatgcagcgtgagcgccgtgaacctgcccaagcacgtggacagcatcatcaacaagagactgagcaagagcagcgccaccctgtggaacagccccagcagaaacagaagcctgcagctgagcgcctgggagagcagcatcgtggacagactgatgacccccaccctgagcttcctggccagaagcagaagcgccgtgaccctgcccagaaacggcagagaccaggccgtgcccgtgtgccccagaagcgccagcgccagccccctgaccccctgcagcgtgaccagaagcgtgcacagatgcgcccccgccggcgagagaggcgagagaagaaagcccaacgccggcggcagccccgcccccgtgagaagaagacccgaggccagccccgtgcagaagaaggagaagaaggacaaggagagagagaacgagaaggagaagagcgccctggccagagagagaagcctgaagaagagacagagcctgcccgccagccccagagccagactgagcgccagcaccgccagcgagctgagccccaagagcaaggccagacccagcagccccagcaccagctggcacagacccgccagcccctgccccagccccggccccggccacaccctgccccccaagccccccagccccagaggcaccaccgccagccccaagggcagagtgagaagaaaggaggaggccaaggagagccccagcgccgccggccccgaggacaagagccagagcaagagaagagccagcaacgagaaggagagcgccgcccccgccagccccgcccccagccccgcccccagccccacccccgcccccccccagaaggagcagccccccgccgagacccccaccgacgccgccgtgctgaccagcccccccgcccccgccccccccgtgacccccagcaagcccatggccggcaccaccgacagagaggaggccaccagactgctggccgagaagagaagacaggccagagagcagagagagagagaggagcaggagagaagactgcaggccgagagagacaagagaatgagagaggagcagctggccagagaggccgaggccagagccgagagagaggccgaggccagaagaagagaggagcaggaggccagagagaaggcccaggccgagcaggaggagcaggagagactgcagaagcagaaggaggaggccgaggccagaagcagagaggaggccgagagacagagactggagagagagaagcacttccagcagcaggagcaggagagacaggagagaagaaagagactggaggagatcatgaagagaaccagaaagagcgaggtgagcgagaccaagaagcaggacagcaaggaggccaacgccaacggcagcagccccgagcccgtgaaggccgtggaggccagaagccccggcctgcagaaggaggccgtgcagaaggaggagcccatcccccaggagccccagtggagcctgcccagcaaggagctgcccgccagcctggtgaacggcctgcagcccctgcccgcccaccaggagaacggcttcagcaccaacggccccagcggcgacaagagcctgagcagaacccccgagaccctgctgcccttcgccgaggccgaggccttcctgaagaaggccgtggtgcagagcccccaggtgaccgaggtgctgtag

SEQ ID NO: 10859 - DNA, 2526 bp, synthetic construct
  source 1..2526: mol_type = other DNA; note = Synthetic coding sequence
atggagagcggccccagagccgagctgggcgccggcgccccccccgccgtggtggccagaaccccccccgagcccagacccagccccgagggcgaccccagccccccccccccccccatgagcgccctggtgcccgacaccccccccgacaccccccccgccatgaagaacgccaccagcagcaagcagctgcccctggagcccgagagccccagcggccaggtgggccccagacccgcccccccccaggaggagagccccagcagcgaggccaagagcagaggccccaccccccccgccatgggccccagagacgccagaccccccagaagaagcagccagcccagccccaccgccgtgcccgccagcgacagcccccccaccaagcaggaggtgaagaaggccggcgagagacacaagctggccaaggagagaagagaggagagagccaagtacctggccgccaagaaggccgtgtggctggagaaggaggagaaggccaaggccctgagagagaagcagctgcaggagagaagaagaagactggaggagcagagactgaaggccgagcagagaagagccgccctggaggagagacagagacagaagctggagaagaacaaggagagatacgaggccgccatccagagaagcgtgaagaagacctgggccgagatcagacagcagagatggagctgggccggcgccctgcaccacagcagccccggccacaagaccagcggcagcagatgcagcgtgagcgccgtgaacctgcccaagcacgtggacagcatcatcaacaagagactgagcaagagcagcgccaccctgtggaacagccccagcagaaacagaagcctgcagctgagcgcctgggagagcagcatcgtggacagactgatgacccccaccctgagcttcctggccagaagcagaagcgccgtgaccctgcccagaaacggcagagaccagggcagaggctgcgaccccggcagaggccccacctggggcagagccggcgccagcctggccagaggcccccagcccgacagaacccaccccagcgccgccgtgcccgtgtgccccagaagcgccagcgccagccccctgaccccctgcagcgtgaccagaagcgtgcacagatgcgcccccgccggcgagagaggcgagagaagaaagcccaacgccggcggcagccccgcccccgtgagaagaagacccgaggccagccccgtgcagaagaaggagaagaaggacaaggagagagagaacgagaaggagaagagcgccctggccagagagagaagcctgaagaagagacagagcctgcccgccagccccagagccagactgagcgccagcaccgccagcgagctgagccccaagagcaaggccagacccagcagccccagcaccagctggcacagacccgccagcccctgccccagccccggccccggccacaccctgccccccaagccccccagccccagaggcaccaccgccagccccaagggcagagtgagaagaaaggaggaggccaaggagagccccagcgccgccggccccgaggacaagagccagagcaagagaagagccagcaacgagaaggagagcgccgcccccgccagccccgcccccagccccgcccccagccccacccccgcccccccccagaaggagcagccccccgccgagacccccaccgacgccgccgtgctgaccagcccccccgcccccgccccccccgtgacccccagcaagcccatggccggcaccaccgacagagaggaggccaccagactgctggccgagaagagaagacaggccagagagcagagagagagagaggagcaggagagaagactgcaggccgagagagacaagagaatgagagaggagcagctggccagagaggccgaggccagagccgagagagaggccgaggccagaagaagagaggagcaggaggccagagagaaggcccaggccgagcaggaggagcaggagagactgcagaagcagaaggaggaggccgaggccagaagcagagaggaggccgagagacagagactggagagagagaagcacttccagcagcaggagcaggagagacaggagagaagaaagagactggaggagatcatgaagagaaccagaaagagcgaggtgagcgagaccaagcagaagcaggacagcaaggaggccaacgccaacggcagcagccccgagcccgtgaaggccgtggaggccagaagccccggcctgcagaaggaggccgtgcagaaggaggagcccatcccccaggagccccagtggagcctgcccagcaaggagctgcccgccagcctggtgaacggcctgcagcccctgcccgcccaccaggagaacggcttcagcaccaacggccccagcggcgacaagagcctgagcagaacccccgagaccctgctgcccttcgccgaggccgaggccttcctgaagaaggccgtggtgcagagcccccaggtgaccgaggtgctgtag

SEQ ID NO: 10860 - DNA, 495 bp, synthetic construct
  source 1..495: mol_type = other DNA; note = Synthetic coding sequence
aacctgcccaagcacgtggacagcatcatcaacaagagacagagactggagagagagaagcacttccagcagcaggagcaggagagacaggagagaagaaagagactggaggagatcatgaagagaaccagaaagagcgaggtgagcgagaccaagaagcaggacagcaaggaggccaacgccaacggcagcagccccgagcccgtgaaggccgtggaggccagaagccccggcctgcagaaggaggccgtgcagaaggaggagcccatcccccaggagccccagtggagcctgcccagcaaggagctgcccgccagcctggtgaacggcctgcagcccctgcccgcccaccaggagaacggcttcagcaccaacggccccagcggcgacaagagcctgagcagaacccccgagaccctgctgcccttcgccgaggccgaggccttcctgaagaaggccgtggtgcagagcccccaggtgaccgaggtgctgtag

SEQ ID NO: 10861 - DNA, 345 bp, synthetic construct
  source 1..345: mol_type = other DNA; note = Synthetic coding sequence
atggtgatcagagtgtacatcgccagcagcagcggcagcaccgccatcaagaagaagcagcaggacgtgctgggcttcctggaggccaacaagatcggcttcgaggagaaggacatcgccgccaacgaggagaacagaaagtggatgagagagaacgtgcccgagaacagcagacccgccaccggctaccccctgcccccccagatcttcaacgagagccagtacagaggcgactacgacgccttcttcgaggccagagagaacaacgccgtgtacgccttcctgggcctgaccgccccccccggcagcaaggaggccgaggtgcaggccaagcagcaggcctag

SEQ ID NO: 10862 - DNA, 537 bp, synthetic construct
  source 1..537: mol_type = other DNA; note = Synthetic coding sequence
atgagcggcttcagcaccgaggagagagccgcccccttcagcctggagtacagagtgttcctgaagaacgagaagggccagtacatcagccccttccacgacatccccatctacgccgacaaggacgtgttccacatggtggtggaggtgcccagatggagcaacgccaagatggagatcgccaccaaggaccccctgaaccccatcaagcaggacgtgaagaagggcaagctgagatacgtggccaacctgttcccctacaagggctacatctggaactacggcgccatcccccagacctgggaggaccccggccacaacgacaagcacaccggctgctgcggcgacaacgaccccatcgacgtgtgcgagatcggcagcaaggtgtgcgccagaggcgagatcatcggcgtgaaggtgctgggcatcctggccatgatcgacgagggcgagaccgactggaaggtgatcgccatcaacgtggacgaccccgacgccgccaactacaacgtgtgcaacagcgtggtgatcctgtag

SEQ ID NO: 10863 - DNA, 870 bp, synthetic construct
  source 1..870: mol_type = other DNA; note = Synthetic coding sequence
atgagcggcttcagcaccgaggagagagccgcccccttcagcctggagtacagagtgttcctgaagaacgagaagggccagtacatcagccccttccacgacatccccatctacgccgacaaggacgtgttccacatggtggtggaggtgcccagatggagcaacgccaagatggagatcgccaccaaggaccccctgaaccccatcaagcaggacgtgaagaagggcaagctgagatacgtggccaacctgttcccctacaagggctacatctggaactacggcgccatcccccagacctgggaggaccccggccacaacgacaagcacaccggctgctgcggcgacaacgaccccatcgacgtgtgcgagatcggcagcaaggtgtgcgccagaggcgagatcatcggcgtgaaggtgctgggcatcctggccatgatcgacgagggcgagaccgactggaaggtgatcgccatcaacgtggacgaccccgacgccgccaactacaacgacatcaacgacgtgaagagactgaagcccggctacctggaggccaccgtggactggttcagaagatacaaggtgcccgacggcaagcccgagaacgagttcgccttcaacgccgagttcaaggacaaggacttcgccatcgacatcatcaagagcacccacgaccactggaaggccctggtgaccaagaagaccaacggcaagggcatcagctgcatgaacaccaccctgagcgagagccccttcaagtgcgaccccgacgccgccagagccatcgtggacgccctgccccccccctgcgagagcgcctgcaccgtgcccaccgacgtggacaagtggttccaccaccagaagaactag

SEQ ID NO: 10864 - DNA, 2103 bp, synthetic construct
  source 1..2103: mol_type = other DNA; note = Synthetic coding sequence
atgaccgagagatgcagcctgtggagcgccctgagcgccgccgcctgctgcttctacagaggcagcttcgtgcagttcagcaaggagaagtacatcctggacagcagccccgagaagctgcacaaggagctggaggaggagctgaagctgagcagcaccgacctgagaagccacgcctggtaccacggcagaatccccagagaggtgagcgagaccctggtgcagagaaacggcgacttcctgatcagagacagcctgaccagcctgggcgactacgtgctgacctgcagatggagaaaccaggccctgcacttcaagatcaacaaggtggtggtgaaggccggcgagagctacacccacatccagtacctgttcgagcaggagagcttcgaccacgtgcccgccctggtgagataccacgtgggcagcagaaaggccgtgagcgagcagagcggcgccatcatctactgccccgtgaacagaaccttccccctgagatacctggaggccagctacggcctgggccagggcagcagcaagcccgccagccccgtgagccccagcggccccaagggcagccacatgaagagaagaagcgtgaccatgaccgacggcctgaccgccgacaaggtgaccagaagcgacggctgccccaccagcaccagcctgcccagacccagagacagcatcagaagctgcgccctgagcatggaccagatccccgacctgcacagccccatgagccccatcagcgagagccccagcagccccgcctacagcaccgtgaccagagtgcacgccgcccccgccgcccccagcgccaccgccctgcccgccagccccgtggccagaagaagcagcgagccccagctgtgccccggcagcgcccccaagacccacggcgagagcgacaagggcccccacaccagccccagccacaccctgggcaaggccagccccagccccagcctgagcagctacagcgaccccgacagcggccactactgccagctgcagccccccgtgagaggcagcagagagtgggccgccaccgagaccagcagccagcaggccagaagctacggcgagagactgaaggagctgagcgagaacggcgcccccgagggcgactggggcaagaccttcaccgtgcccatcgtggaggtgaccagcagcttcaaccccgccaccttccagagcctgctgatccccagagacaacagacccctggaggtgggcctgctgagaaaggtgaaggagctgctggccgaggtggacgccagaaccctggccagacacgtgaccaaggtggactgcctggtggccagaatcctgggcgtgaccaaggagatgcagaccctgatgggcgtgagatggggcatggagctgctgaccctgccccacggcagacagctgagactggacctgctggagagattccacaccatgagcatcatgctggccgtggacatcctgggctgcaccggcagcgccgaggagagagccgccctgctgcacaagaccatccagctggccgccgagctgagaggcaccatgggcaacatgttcagcttcgccgccgtgatgggcgccctggacatggcccagatcagcagactggagcagacctgggtgaccctgagacagagacacaccgagggcgccatcctgtacgagaagaagctgaagcccttcctgaagagcctgaacgagggcaaggagggcccccccctgagcaacaccaccttcccccacgtgctgcccctgatcaccctgctggagtgcgacagcgccccccccgagggccccgagccctggggcagcaccgagcacggcgtggaggtggtgctggcccacctggaggccgccagaaccgtggcccaccacggcggcctgtaccacaccaacgccgaggtgaagctgcagggcttccaggccagacccgagctgctggaggtgttcagcaccgagttccagatgagactgctgtggggcagccagggcgccagcagcagccaggccagaagatacgagaagttcgacaaggtgctgaccgccctgagccacaagctggagcccgccgtgagaagcagcgagctgtag

SEQ ID NO: 10865 - DNA, 2379 bp, synthetic construct
  source 1..2379: mol_type = other DNA; note = Synthetic coding sequence
atggcccccgccctgcccagcccccacaaggccgtggccagacccgagctgctgctggacaccgccgcccacagcggcaagctgagagcccccgacggcggcgagggcgccgagtgcgccggccacaacggcggccccagctggggcgtgggccagggccagagccaggagcccagcagacagggcatcccccaggccccctggctggtgagctggcagagaagaggcttcccccccagcagcttctgccccggccccctgagaaccgagaagctgagagccggcagatgccccctgctgctgtgcggcggcgccgccggcgagcccgaggccggcagcgactacgtgaagttcagcaaggagaagtacatcctggacagcagccccgagaagctgcacaaggagctggaggaggagctgaagctgagcagcaccgacctgagaagccacgcctggtaccacggcagaatccccagagaggtgagcgagaccctggtgcagagaaacggcgacttcctgatcagagacagcctgaccagcctgggcgactacgtgctgacctgcagatggagaaaccaggccctgcacttcaagatcaacaaggtggtggtgaaggccggcgagagctacacccacatccagtacctgttcgagcaggagagcttcgaccacgtgcccgccctggtgagataccacgtgggcagcagaaaggccgtgagcgagcagagcggcgccatcatctactgccccgtgaacagaaccttccccctgagatacctggaggccagctacggcctgggccagggcagcagcaagcccgccagccccgtgagccccagcggccccaagggcagccacatgaagagaagaagcgtgaccatgaccgacggcctgaccgccgacaaggtgaccagaagcgacggctgccccaccagcaccagcctgcccagacccagagacagcatcagaagctgcgccctgagcatggaccagatccccgacctgcacagccccatgagccccatcagcgagagccccagcagccccgcctacagcaccgtgaccagagtgcacgccgcccccgccgcccccagcgccaccgccctgcccgccagccccgtggccagaagaagcagcgagccccagctgtgccccggcagcgcccccaagacccacggcgagagcgacaagggcccccacaccagccccagccacaccctgggcaaggccagccccagccccagcctgagcagctacagcgaccccgacagcggccactactgccagctgcagccccccgtgagaggcagcagagagtgggccgccaccgagaccagcagccagcaggccagaagctacggcgagagactgaaggagctgagcgagaacggcgcccccgagggcgactggggcaagaccttcaccgtgcccatcgtggaggtgaccagcagcttcaaccccgccaccttccagagcctgctgatccccagagacaacagacccctggaggtgggcctgctgagaaaggtgaaggagctgctggccgaggtggacgccagaaccctggccagacacgtgaccaaggtggactgcctggtggccagaatcctgggcgtgaccaaggagatgcagaccctgatgggcgtgagatggggcatggagctgctgaccctgccccacggcagacagctgagactggacctgctggagagattccacaccatgagcatcatgctggccgtggacatcctgggctgcaccggcagcgccgaggagagagccgccctgctgcacaagaccatccagctggccgccgagctgagaggcaccatgggcaacatgttcagcttcgccgccgtgatgggcgccctggacatggcccagatcagcagactggagcagacctgggtgaccctgagacagagacacaccgagggcgccatcctgtacgagaagaagctgaagcccttcctgaagagcctgaacgagggcaaggagggcccccccctgagcaacaccaccttcccccacgtgctgcccctgatcaccctgctggagtgcgacagcgccccccccgagggccccgagccctggggcagcaccgagcacggcgtggaggtggtgctggcccacctggaggccgccagaaccgtggcccaccacggcggcctgtaccacaccaacgccgaggtgaagctgcagggcttccaggccagacccgagctgctggaggtgttcagcaccgagttccagatgagactgctgtggggcagccagggcgccagcagcagccaggccagaagatacgagaagttcgacaaggtgctgaccgccctgagccacaagctggagcccgccgtgagaagcagcgagctgtag

SEQ ID NO: 10866 - DNA, 2112 bp, synthetic construct
  source 1..2112: mol_type = other DNA; note = Synthetic coding sequence
atgaccgccgtgggcagaagatgccccgccctgggcagcagaggcgccgccggcgagcccgaggccggcagcgactacgtgaagttcagcaaggagaagtacatcctggacagcagccccgagaagctgcacaaggagctggaggaggagctgaagctgagcagcaccgacctgagaagccacgcctggtaccacggcagaatccccagagaggtgagcgagaccctggtgcagagaaacggcgacttcctgatcagagacagcctgaccagcctgggcgactacgtgctgacctgcagatggagaaaccaggccctgcacttcaagatcaacaaggtggtggtgaaggccggcgagagctacacccacatccagtacctgttcgagcaggagagcttcgaccacgtgcccgccctggtgagataccacgtgggcagcagaaaggccgtgagcgagcagagcggcgccatcatctactgccccgtgaacagaaccttccccctgagatacctggaggccagctacggcctgggccagggcagcagcaagcccgccagccccgtgagccccagcggccccaagggcagccacatgaagagaagaagcgtgaccatgaccgacggcctgaccgccgacaaggtgaccagaagcgacggctgccccaccagcaccagcctgcccagacccagagacagcatcagaagctgcgccctgagcatggaccagatccccgacctgcacagccccatgagccccatcagcgagagccccagcagccccgcctacagcaccgtgaccagagtgcacgccgcccccgccgcccccagcgccaccgccctgcccgccagccccgtggccagaagaagcagcgagccccagctgtgccccggcagcgcccccaagacccacggcgagagcgacaagggcccccacaccagccccagccacaccctgggcaaggccagccccagccccagcctgagcagctacagcgaccccgacagcggccactactgccagctgcagccccccgtgagaggcagcagagagtgggccgccaccgagaccagcagccagcaggccagaagctacggcgagagactgaaggagctgagcgagaacggcgcccccgagggcgactggggcaagaccttcaccgtgcccatcgtggaggtgaccagcagcttcaaccccgccaccttccagagcctgctgatccccagagacaacagacccctggaggtgggcctgctgagaaaggtgaaggagctgctggccgaggtggacgccagaaccctggccagacacgtgaccaaggtggactgcctggtggccagaatcctgggcgtgaccaaggagatgcagaccctgatgggcgtgagatggggcatggagctgctgaccctgccccacggcagacagctgagactggacctgctggagagattccacaccatgagcatcatgctggccgtggacatcctgggctgcaccggcagcgccgaggagagagccgccctgctgcacaagaccatccagctggccgccgagctgagaggcaccatgggcaacatgttcagcttcgccgccgtgatgggcgccctggacatggcccagatcagcagactggagcagacctgggtgaccctgagacagagacacaccgagggcgccatcctgtacgagaagaagctgaagcccttcctgaagagcctgaacgagggcaaggagggcccccccctgagcaacaccaccttcccccacgtgctgcccctgatcaccctgctggagtgcgacagcgccccccccgagggccccgagccctggggcagcaccgagcacggcgtggaggtggtgctggcccacctggaggccgccagaaccgtggcccaccacggcggcctgtaccacaccaacgccgaggtgaagctgcagggcttccaggccagacccgagctgctggaggtgttcagcaccgagttccagatgagactgctgtggggcagccagggcgccagcagcagccaggccagaagatacgagaagttcgacaaggtgctgaccgccctgagccacaagctggagcccgccgtgagaagcagcgagctgtag

SEQ ID NO: 10867 - DNA, 1869 bp, synthetic construct
  source 1..1869: mol_type = other DNA; note = Synthetic coding sequence
atggaccagctgccccagaagaacctgctgagactgcaccccgccggcagcgccggctgcagcaccggcgtggagagcagcagcatggacggcttctggatggaggtggagcagatccagcagagagacgagctgagagaggaggacagcggcggcaacgagggccagctgcccgaggagggcgaggccgagagccagtggctgcaggacaccggcctgagcggcctgctgggcggcctgggcctggacggcgaccaccaggagctgctgagcaccctgacccagacccaggtggccgccgtgtgcagaagactggacatctacgccagaagcgtgagaagacagcacaagacccccgtgagagacgtgagagacgtgttcggcgtgttcaacagcggcaagatgagcagcgagaacggcgacagcggcatgaagggcgcccagctgagcagcggcgccagcaagttcccccccgccgccgagcccggcggcctgcaggagcaggccggcagagaggaggccttcaacatggacagcgcctacagcgagcaggccgccgtgctgctgcagagaagcagacccagcagaggcggcaccagcgcctggggcaagtgcagcctgcccaagttcaccgtgcccaagggcagactgggcgtgaccagaatcggcgacctgagcctgcaggacatgagaaaggtgcccagcctggccctgatcgagctgaccgccctgtgcgacatcctgggcctggacctgaagagaagcaaggccggcaagtggaaggccgccgagaccagactgttcggcgtgcccctggacagcctgctggaggccgaccacaaggtgctgcccagcacccaggtgcccctggtgctgcaggccctgctgagctgcctggagaagagaggcctggacatggagggcatcctgagagtgcccggcagccaggccagagtgaagggcctggagcagaagctggagagagacttctacgccggcctgttcagctgggacgaggtgcaccacaacgacgccagcgacctgctgaagagattcatcagaaagctgcccacccccctgctgaccgccgagtacctgcccgccttcgccgtggtgcccaacatccccaacctgaagcagagactgcaggtgctgcacctgctgatcctgatcctgcccgagcccaacagaaacgccctgaaggccctgctggagttcctgagaaaggtggtggccagagagcagcacaacaagatgaccctgagaaacgtgagcaccgtgatggcccccaacctgttcctgcaccagggcagaccccccaagctgcccaagggcaaggagaagcagctggccgagggcgccgccgaggtggtgcagatcatggtgcactaccaggacctgctgtggaccgtggccagcttcctggtggcccaggtgagaaagctgaacgacagcagcagcagaagaccccagctgtgcgacgccggcctgaagacctggctgagaagaatgcacgccgacagagacaaggccggcgacggcctggaggccacccccaaggtggccaagatccaggtggtgtggcccatcaaggaccccctgaaggtgcccctgacccccagcaccaaggtggcccacgtgctgagacagttcaccgagcacctgagccccggcagcaagggccaggaggacagcgaggacatggacagcctgctgctgcaccacagaagcatggagagcgccaacatcctgctgtacgaggtgggcggcaacatcaacgagcacagactggaccccgacgcctacctgctggacctgtacagagccaacccccacggcgagtgggtgctgaagcagaaccccacctag

SEQ ID NO: 10868 - DNA, 846 bp, synthetic construct
  source 1..846: mol_type = other DNA; note = Synthetic coding sequence
atggccaccgagctgcagtgccccgacagcatgccctgccacaaccagcaggtgaacagcgccagcacccccagccccgagcagctgagacccggcgacctgatcctggaccacgccggcggcaacagagccagcagagccaaggtgatcctgctgaccggctacgcccacagcagcctgcccgccgagctggacagcggcgcctgcggcggcagcagcctgaacagcgagggcaacagcggcagcggcgacagcagcagctacgacgcccccgccggcaacagcttcctggaggactgcgagctgagcagacagatcggcgcccagctgaagctgctgcccatgaacgaccagatcagagagctgcagaccatcatcagagacaagaccgccagcagaggcgacttcatgttcagcgccgacagactgatcagactggtggtggaggagggcctgaaccagctgccctacaaggagtgcatggtgaccacccccaccggctacaagtacgagggcgtgaagttcgagaagggcaactgcggcgtgagcatcatgagaagcggcgaggccatggagcagggcctgagagactgctgcagaagcatcagaatcggcaagatcctgatccagagcgacgaggagacccagagagccaaggtgtactacgccaagttcccccccgacatctacagaagaaaggtgctgctgatgtaccccatcctgagcaccggcaacaccgtgatcgaggccgtgaaggtgctgatcgagcacggcgtgcagcccagcgtgatcatcctgctgagcctgttcagcaccccccacggcgagttcagcatgagacagtag

SEQ ID NO: 10869 - DNA, 930 bp, synthetic construct
  source 1..930: mol_type = other DNA; note = Synthetic coding sequence
atggccaccgagctgcagtgccccgacagcatgccctgccacaaccagcaggtgaacagcgccagcacccccagccccgagcagctgagacccggcgacctgatcctggaccacgccggcggcaacagagccagcagagccaaggtgatcctgctgaccggctacgcccacagcagcctgcccgccgagctggacagcggcgcctgcggcggcagcagcctgaacagcgagggcaacagcggcagcggcgacagcagcagctacgacgcccccgccggcaacagcttcctggaggactgcgagctgagcagacagatcggcgcccagctgaagctgctgcccatgaacgaccagatcagagagctgcagaccatcatcagagacaagaccgccagcagaggcgacttcatgttcagcgccgacagactgatcagactggtggtggaggagggcctgaaccagctgccctacaaggagtgcatggtgaccacccccaccggctacaagtacgagggcgtgaagttcgagaagggcaactgcggcgtgagcatcatgagaagcggcgaggccatggagcagggcctgagagactgctgcagaagcatcagaatcggcaagatcctgatccagagcgacgaggagacccagagagccaaggtgtactacgccaagttcccccccgacatctacagaagaaaggtgctgctgatgtaccccatcctgagcaccggcaacaccgtgatcgaggccgtgaaggtgctgatcgagcacggcgtgcagcccagcgtgatcatcctgctgagcctgttcagcaccccccacggcgccaagagcatcatccaggagttccccgagatcaccatcctgaccaccgaggtgcaccccgtggcccccacccacttcggccagaagtacttcggcaccgactag

SEQ ID NO: 10870 - DNA, 633 bp, synthetic construct
  source 1..633: mol_type = other DNA; note = Synthetic coding sequence
atggtgagcggcagcgagcagaagttcctgatcggcctgggcaagagccagatctacacctgggacggcagacagagcgacagatggatcaagctggacctgaagaccgagctgcccagagacaccctgctgagcgtggagatcgtgcacgagctgaagggcgagggcaaggcccagagaaagatcagcgccatccacatcctggacgtgctggtgctgaacggcaccgacgtgagagagcagcacttcaaccagagaatccagctggccgagaagttcgtgaaggccgtgagcaagcccagcagacccgacatgaaccccatcagagtgaaggaggtgtacagactggaggagatggagaagatcttcgtgagactggagatgaagatcatcaagggcagcagcggcacccccaagctgagctacaccggcagagacgacagacacttcgtgcccatgggcctgtacatcgtgagaaccgtgaacgagccctggaccatgggcttcagcaagagcttcaagaagaagttcttctacaacaagaagaccaaggacagcaccttcgacctgcccgccgacagcatcgcccccttccacctgcccagcctggcctgcctgagcaagatggactag

SEQ ID NO: 10871 - DNA, 1119 bp, synthetic construct
  source 1..1119: mol_type = other DNA; note = Synthetic coding sequence
atgaagagaagaaccgaccccgagtgcaccgcccccatcaagaagcagaagaagagagtggccgagctggccctgagcctgagcagcaccagcgacgacgagccccccagcagcgtgagccacggcgccaaggccagcaccaccagcctgagcggcagcgacagcgagaccgagggcaagcagcacagcagcgacagcttcgacgacgccttcaaggccgacagcctggtggagggcaccagcagcagatacagcatgtacaacagcgtgagccagaagctgatggccaagatgggcttcagagagggcgagggcctgggcaagtacagccagggcagaaaggacatcgtggaggccagcagccagaagggcagaagaggcctgggcctgaccctgagaggcttcgaccaggagctgaacgtggactggagagacgagcccgagcccagcgcctgcgagcaggtgagctggttccccgagtgcaccaccgagatccccgacacccaggagatgagcgactggatggtggtgggcaagagaaagatgatcatcgaggacgagaccgagttctgcggcgaggagctgctgcacagcgtgctgcagtgcaagaagcccctggtgaaggacagagaggccgagctgctgtacttcgccgacgtgtgcgccggccccggcggcttcagcgagtacgtgctgtggagaaagaagtggcacgccaagggcttcggcatgaccctgaagggccccaacgacttcaagctggaggacttctacagcgccagcagcgagctgttcgagccctactacggcgagggcggcatcgacggcgacggcgacatcaccagacccgagaacatcagcgccttcagaaacttcgtgctggacaacaccgacagaaagggcgtgcacttcctgatggccgacggcggcttcagcgtggagggccaggagaacctgcaggagatcctgagcaagcagctgctgctgtgccagttcctgatggccctgagcatcgtgagaaccggcggccacttcatctgcaagaccttcgacctgttcacccccttcagcgtgggcctggtgtacctgctgtactgctgcttcgagagagtgtgctag

SEQ ID NO: 10872 - DNA, 615 bp, synthetic construct; identical to SEQ ID NO: 10477
  source 1..615: mol_type = other DNA; note = Synthetic coding sequence

SEQ ID NO: 10873 - DNA, 1443 bp, synthetic construct
  source 1..1443: mol_type = other DNA; note = Synthetic coding sequence
atggccggctacctgagcgagagcgacttcgtgatggtggaggagggcttcagcaccagagacctgctgaaggagctgaccctgggcgccagccaggccaccaccgacgaggtggccgccttcttcgtggccgacctgggcgccatcgtgagaaagcacttctgcttcctgaagtgcctgcccagagtgagacccttctacgccgtgaagtgcaacagcagccccggcgtgctgaaggtgctggcccagctgggcctgggcttcagctgcgccaacaaggccgagatggagctggtgcagcacatcggcatccccgccagcaagatcatctgcgccaacccctgcaagcagatcgcccagatcaagtacgccgccaagcacggcatccagctgctgagcttcgacaacgagatggagctggccaaggtggtgaagagccaccccagcgccaagatggtgctgtgcatcgccaccgacgacagccacagcctgagctgcctgagcctgaagttcggcgtgagcctgaagagctgcagacacctgctggagaacgccaagaagcaccacgtggaggtggtgggcgtgagcttccacatcggcagcggctgccccgacccccaggcctacgcccagagcatcgccgacgccagactggtgttcgagatgggcaccgagctgggccacaagatgcacgtgctggacctgggcggcggcttccccggcaccgagggcgccaaggtgagattcgaggagatcgccagcgtgatcaacagcgccctggacctgtacttccccgagggctgcggcgtggacatcttcgccgagctgggcagatactacgtgaccagcgccttcaccgtggccgtgagcatcatcgccaagaaggaggtgctgctggaccagcccggcagagaggcccccctgccccccccccacatcgccacctgcgccgccagcgagcccagcccccccgccgaggagaacggcagcaccagcaagaccatcgtgtaccacctggacgagggcgtgtacggcatcttcaacagcgtgctgttcgacaacatctgccccacccccatcctgcagaagaagcccagcaccgagcagcccctgtacagcagcagcctgtggggccccgccgtggacggctgcgactgcgtggccgagggcctgtggctgccccagctgcacgtgggcgactggctggtgttcgacaacatgggcgcctacaccgtgggcatgggcagccccttctggggcacccaggcctgccacatcacctacgccatgagcagagtggcctgggaggccctgagaagacagctgatggccgccgagcaggaggacgacgtggagggcgtgtgcaagcccctgagctgcggctgggagatcaccgacaccctgtgcgtgggccccgtgttcacccccgccagcatcatgtag

SEQ ID NO: 10874 - DNA, 1383 bp, synthetic construct; identical to SEQ ID NO: 9655
  source 1..1383: mol_type = other DNA; note = Synthetic coding sequence

SEQ ID NO: 10875 - DNA, 2508 bp, synthetic construct
  source 1..2508: mol_type = other DNA; note = Synthetic coding sequence
atgaagagaagaaccgaccccgagtgcaccgcccccatcaagaagcagaagaagagagtggccgagctggccctgagcctgagcagcaccagcgacgacgagccccccagcagcgtgagccacggcgccaaggccagcaccaccagcctgagcggcagcgacagcgagaccgagggcaagcagcacagcagcgacagcttcgacgacgccttcaaggccgacagcctggtggagggcaccagcagcagatacagcatgtacaacagcgtgagccagaagctgatggccaagatgggcttcagagagggcgagggcctgggcaagtacagccagggcagaaaggacatcgtggaggccagcagccagaagggcagaagaggcctgggcctgaccctgagaggcttcgaccaggagctgaacgtggactggagagacgagcccgagcccagcgcctgcgagcaggtgagctggttccccgagtgcaccaccgagatccccgacacccaggagatgagcgactggatggtggtgggcaagagaaagatgatcatcgaggacgagaccgagttctgcggcgaggagctgctgcacagcgtgctgcagtgcaagagcgtgttcgacgtgctggacggcgaggagatgagaagagccagaaccagagccaacccctacgagatgatcagaggcgtgttcttcctgaacagagccgccatgaagatggccaacatggacttcgtgttcgacagaatgttcaccaaccccagagacagctacggcaagcccctggtgaaggacagagaggccgagctgctgtacttcgccgacgtgtgcgccggccccggcggcttcagcgagtacgtgctgtggagaaagaagtggcacgccaagggcttcggcatgaccctgaagggccccaacgacttcaagctggaggacttctacagcgccagcagcgagctgttcgagccctactacggcgagggcggcatcgacggcgacggcgacatcaccagacccgagaacatcagcgccttcagaaacttcgtgctggacaacaccgacagaaagggcgtgcacttcctgatggccgacggcggcttcagcgtggagggccaggagaacctgcaggagatcctgagcaagcagctgctgctgtgccagttcctgatggccctgagcatcgtgagaaccggcggccacttcatctgcaagaccttcgacctgttcacccccttcagcgtgggcctggtgtacctgctgtactgctgcttcgagagagtgtgcctgttcaagcccatcaccagcagacccgccaacagcgagagatacgtggtgtgcaagggcctgaaggtgggcatcgacgacgtgagagactacctgttcgccgtgaacatcaagctgaaccagctgagaaacaccgacagcgacgtgaacctggtggtgcccctggaggtgatcaagggcgaccacgagttcaccgactacatgatcagaagcaacgagagccactgcagcctgcagatcaaggccctggccaagatccacgccttcgtgcaggacaccaccctgagcgagcccagacaggccgagatcagaaaggagtgcctgagactgtggggcatccccgaccaggccagagtggcccccagcagcagcgaccccaagagcaagttcttcgagctgatccagggcaccgagatcgacatcttcagctacaagcccaccctgctgaccagcaagaccctggagaagatcagacccgtgttcgactacagatgcatggtgagcggcagcgagcagaagttcctgatcggcctgggcaagagccagatctacacctgggacggcagacagagcgacagatggatcaagctggacctgaagaccgagctgcccagagacaccctgctgagcgtggagatcgtgcacgagctgaagggcgagggcaaggcccagagaaagatcagcgccatccacatcctggacgtgctggtgctgaacggcaccgacgtgagagagcagcacttcaaccagagaatccagctggccgagaagttcgtgaaggccgtgagcaagcccagcagacccgacatgaaccccatcagagtgaaggaggtgtacagactggaggagatggagaagatcttcgtgagactggagatgaagatcatcaagggcagcagcggcacccccaagctgagctacaccggcagagacgacagacacttcgtgcccatgggcctgtacatcgtgagaaccgtgaacgagccctggaccatgggcttcagcaagagcttcaagaagaagttcttctacaacaagaagaccaaggacagcaccttcgacctgcccgccgacagcatcgcccccttccacatctgctactacggcagactgttctgggagtggggcgacggcatcagagtgcacgacagccagaagccccaggaccaggacaagctgagcaaggaggacgtgctgagcttcatccagatgcacagagcctag

SEQ ID NO: 10876 - DNA, 252 bp, synthetic construct
  source 1..252: mol_type = other DNA; note = Synthetic coding sequence
tgacaggagctgctgaaggagaagaccctggccgagcagaacctggaggacaccagacagcagctgctggccgccagaagcagccaggccaaggccatcaacaccctggagaccagagtgagagagctggagcagaccctgcaggccagcgaggagcagctgcagcagagcaagggcatcgtggccgcccaggagacccagatccaggagctggtgagcgcctactggagctgctgcatccccggcccctag

SEQ ID NO: 10877 - DNA, 2304 bp, synthetic construct
  source 1..2304: mol_type = other DNA; note = Synthetic coding sequence
atgttcgccaagctgaagaagaagatcgccgaggagaccgccgtggcccagagacccggcggcgccaccagaatccccagaagcgtgagcaaggagagcgtggccagcatgggcgccgacagcggcgacgacttcgccagcgacggcagcagcagcagagaggacctgagcagccagctgctgagaagaaacgagcagatcagaaagctggaggccagactgagcgactacgccgagcaggtgagaaacctgcagaagatcaaggagaagctggagatcgccctggagaagcaccaggacagcagcatgagaaagttccaggagcagaacgagaccttccaggccaacagagccaagatggccgagggcctggccctggccctggccagaaaggaccaggagtggagcgagaagatggaccagctggagaaggagaagaacatcctgaccgcccagctgcaggagatgaagaaccagagcatgaacctgttccagagaagagacgagatggacgagctggagggcttccagcagcaggagctgagcaagatcaagcacatgctgctgaagaaggaggagagcctgggcaagatggagcaggagctggaggccagaaccagagagctgagcagaacccaggaggagctgatgaacagcaaccagatgagcagcgacctgagccagaagctggaggagctgcagagacactacagcaccctggaggagcagagagaccacgtgatcgccagcaagaccggcgccgagagcaagatcaccgccctggagcagaaggagcaggagctgcaggccctgatccagcagctgagcatcgacctgcagaaggtgaccgccgagacccaggagaaggaggacgtgatcacccacctgcaggagaaggtggccagcctggagaagagactggagcagaacctgagcggcgaggagcacctgcaggagctgctgaaggagaagaccctggccgagcagaacctggaggacaccagacagcagctgctggccgccagaagcagccaggccaaggccatcaacaccctggagaccagagtgagagagctggagcagaccctgcaggccagcgaggagcagctgcagcagagcaagggcatcgtggccgcccaggagacccagatccaggagctggccgccgccaaccaggagagcagccacgtgcagcagcaggccctggccctggagcagcagttcctggagagaacccaggccctggaggcccagatcgtggccctggagagaaccagagccgccgaccagaccaccgccgagcagggcatgagacagctggagcaggagaacgccgccctgaaggagtgcagaaacgagtacgagagaagcctgcagaaccaccagttcgagctgaagaagctgaaggaggagtggagccagagagagatcgtgagcgtggccatggcccaggccctggaggaggtgagaaagcagagagaggagttccagcagcaggccgccaacctgaccgccatcatcgacgagaaggagcagaacctgagagagaagaccgaggtgctgctgcagaaggagcaggagatcctgcagctggagagaggccacaacagcgccctgctgcagatccaccagctgcaggccgagctggaggccctgagaaccctgaaggccgaggaggccgccgtggtggccgagcaggaggacctgctgagactgagaggccccctgcaggccgaggccctgagcgtgaacgagagccacgtgaccagcagagccatgcaggaccccgtgttccagctgcccaccgccggcagaacccccaacggcgaggtgggcgccatggacctgacccagctgcagaaggagaagcaggacctggagcagcagctgctggagaagaacaagaccatcaagcagatgcagcagagaatgctggagctgagaaagaccctgcagaaggagctgaagatcagacccgacaacgagctgttcgaggtgagagagaagcccggccccgagatggccaacatggcccccagcgtgaccaacaacaccgacctgaccgacgccagagagatcaacttcgagtacctgaagcacgtggtgctgaagttcatgagctgcagagagagcgaggccttccacctgatcaaggccgtgagcgtgctgctgaacttcagccaggaggaggagaacatgctgaaggagaccctggagtacaagatgagctggttcggcagcaagcccgcccccaagggcagcatcagacccagcatcagcaaccccagaatcccctggagctag

SEQ ID NO: 10878 - DNA, 291 bp, synthetic construct
  source 1..291: mol_type = other DNA; note = Synthetic coding sequence
tgagccaagatcaaggccagagacctgagaggcaagaagaaggaggagctgctgaagcagctggacgacctgaaggtggagctgagccagctgagagtggccaaggtgaccggcggcgccgccagcaagctgagcaagatcagagtggtgagaaagagcatcgccagagtgctgaccgtgatcaaccagacccagaaggagaacctgagaaagttctacaaggccgccgccggcggcccctgcatccagatggacagagtgctgccccagccccccgcctgcagctgctag

SEQ ID NO: 10879 - DNA, 1035 bp, synthetic construct
  source 1..1035: mol_type = other DNA; note = Synthetic coding sequence
atgagaagaagaagagaggaggagggcatccagctgagaaagcagaagagagagcagcagctgttcaagagaagaaacgtggagctgatcaacgaggaggccgccatgttcgacagcctgctgatggacagctacgtgagcagcaccaccggcgagagcgtgatcaccagagagatggtggagatgctgttcagcgacgacagcgacctgcagctggccaccacccagaagttcagaaagctgctgagcaaggagcccagcccccccatcgacgaggtgatcaacacccccagagtggtggacagattcgtggagttcctgaagagaaacgagaactgcaccctgcaggccgtgtgggccctgggcaacatcgccggcgacagcagcgtgtgcagagactacgtgctgaactgcagcatcctgaaccccctgctgaccctgctgaccaagagcaccagactgaccatgaccagaaacgccgtgtgggccctgagcaacctgtgcagaggcaagaaccccccccccgagttcgccaaggtgagcccctgcctgcccgtgctgagcagactgctgttcagcagcgacagcgacctgctggccgacgcctgctgggccctgagctacctgagcgacggccccaacgagaagatccaggccgtgatcgacagcggcgtgtgcagaagactggtggagctgctgatgcacaacgactacaaggtggccagccccgccctgagagccgtgggcaacatcgtgaccggcgacgacatccagacccaggtgatcctgaactgcagcgccctgccctgcctgctgcacctgctgagcagccccaaggagagcatcagaaaggaggcctgctggaccatcagcaacatcaccgccggcaacagagcccagatccaggccgtgatcgacgccaacatcttccccgtgctgatcgagatcctgcagaaggccgagttcagaaccagaaaggaggccgcctgggccatcaccaacgccaccagcggcggcacccccgagcagatctag

SEQ ID NO: 10880 - DNA, 582 bp, synthetic construct; identical to SEQ ID NO: 9313
  source 1..582: mol_type = other DNA; note = Synthetic coding sequence

SEQ ID NO: 10881 - DNA, 1611 bp, synthetic construct
  source 1..1611: mol_type = other DNA; note = Synthetic coding sequence
atggagaccatggccagccccggcaaggacaactacagaatgaagagctacaagaacaacgccctgaaccccgaggagatgagaagaagaagagaggaggagggcatccagctgagaaagcagaagagagagcagcagctgttcaagagaagaaacgtggagctgatcaacgaggaggccgccatgttcgacagcctgctgatggacagctacgtgagcagcaccaccggcgagagcgtgatcaccagagagatggtggagatgctgttcagcgacgacagcgacctgcagctggccaccacccagaagttcagaaagctgctgagcaaggagcccagcccccccatcgacgaggtgatcaacacccccagagtggtggacagattcgtggagttcctgaagagaaacgagaactgcaccctgcagttcgaggccgcctgggccctgaccaacatcgccagcggcaccagccagcagaccaagatcgtgatcgaggccggcgccgtgcccatcttcatcgagctgctgaacagcgacttcgaggacgtgcaggagcaggccgtgtgggccctgggcaacatcgccggcgacagcagcgtgtgcagagactacgtgctgaactgcagcatcctgaaccccctgctgaccctgctgaccaagagcaccagactgaccatgaccagaaacgccgtgtgggccctgagcaacctgtgcagaggcaagaaccccccccccgagttcgccaaggtgagcccctgcctgcccgtgctgagcagactgctgttcagcagcgacagcgacctgctggccgacgcctgctgggccctgagctacctgagcgacggccccaacgagaagatccaggccgtgatcgacagcggcgtgtgcagaagactggtggagctgctgatgcacaacgactacaaggtggccagccccgccctgagagccgtgggcaacatcgtgaccggcgacgacatccagacccaggtgatcctgaactgcagcgccctgccctgcctgctgcacctgctgagcagccccaaggagagcatcagaaaggaggcctgctggaccatcagcaacatcaccgccggcaacagagcccagatccaggccgtgatcgacgccaacatcttccccgtgctgatcgagatcctgcagaaggccgagttcagaaccagaaaggaggccgcctgggccatcaccaacgccaccagcggcggcacccccgagcagatcagatacctggtgagcctgggctgcatcaagcccctgtgcgacctgctgaccgtgatggacagcaagatcgtgcaggtggccctgaacggcctggagaacatcctgagactgggcgagcaggagggcaagagaagcggcagcggcgtgaacccctactgcggcctgatcgaggaggcctacggcctggacaagatcgagttcctgcagagccacgagaaccaggagatctaccagaaggccttcgacctgatcgagcactacttcggcgtggaggacgacgacagcagcctggccccccaggtggacgagacccagcagcagttcatcttccagcagcccgaggcccccatggagggcttccagctgtag

SEQ ID NO: 10882 - DNA, 2769 bp, synthetic construct
  source 1..2769: mol_type = other DNA; note = Synthetic coding sequence
atgatcaccagcgccgccggcatcatcagcctgctggacgaggacgagccccagctgaaggagttcgccctgcacaagctgaacgccgtggtgaacgacttctgggccgagatcagcgagagcgtggacaagatcgaggtgctgtacgaggacgagggcttcagaagcagacagttcgccgccctggtggccagcaaggtgttctaccacctgggcgccttcgaggagagcctgaactacgccctgggcgccggcgacctgttcaacgtgaacgacaacagcgagtacgtggagaccatcatcgccaagtgcatcgaccactacaccaagcagtgcgtggagaacgccgacctgcccgagggcgagaagaagcccatcgaccagagactggagggcatcgtgaacaagatgttccagagatgcctggacgaccacaagtacaagcaggccatcggcatcgccctggagaccagaagactggacgtgttcgagaagaccatcctggagagcaacgacgtgcccggcatgctggcctacagcctgaagctgtgcatgagcctgatgcagaacaagcagttcagaaacaaggtgctgagagtgctggtgaagatctacatgaacctggagaagcccgacttcatcaacgtgtgccagtgcctgatcttcctggacgacccccaggccgtgagcgacatcctggagaagctggtgaaggaggacaacctgctgatggcctaccagatctgcttcgacctgtacgagagcgccagccagcagttcctgagcagcgtgatccagaacctgagaaccgtgggcacccccatcgccagcgtgcccggcagcaccaacaccggcaccgtgcccggcagcgagaaggacagcgacagcatggagaccgaggagaagaccagcagcgccttcgtgggcaagacccccgaggccagccccgagcccaaggaccagaccctgaagatgatcaagatcctgagcggcgagatggccatcgagctgcacctgcagttcctgatcagaaacaacaacaccgacctgatgatcctgaagaacaccaaggacgccgtgagaaacagcgtgtgccacaccgccaccgtgatcgccaacagcttcatgcactgcggcaccaccagcgaccagttcctgagagacaacctggagtggctggccagagccaccaactgggccaagttcaccgccaccgccagcctgggcgtgatccacaagggccacgagaaggaggccctgcagctgatggccacctacctgcccaaggacaccagccccggcagcgcctaccaggagggcggcggcctgtacgccctgggcctgatccacgccaaccacggcggcgacatcatcgactacctgctgaaccagctgaagaacgccagcaacgacatcgtgagacacggcggcagcctgggcctgggcctggccgccatgggcaccgccagacaggacgtgtacgacctgctgaagaccaacctgtaccaggacgacgccgtgaccggcgaggccgccggcctggccctgggcctggtgatgctgggcagcaagaacgcccaggccatcgaggacatggtgggctacgcccaggagacccagcacgagaagatcctgagaggcctggccgtgggcatcgccctggtgatgtacggcagaatggaggaggccgacgccctgatcgagagcctgtgcagagacaaggaccccatcctgagaagaagcggcatgtacaccgtggccatggcctactgcggcagcggcaacaacaaggccatcagaagactgctgcacgtggccgtgagcgacgtgaacgacgacgtgagaagagccgccgtggagagcctgggcttcatcctgttcagaacccccgagcagtgccccagcgtggtgagcctgctgagcgagagctacaacccccacgtgagatacggcgccgccatggccctgggcatctgctgcgccggcaccggcaacaaggaggccatcaacctgctggagcccatgaccaacgaccccgtgaactacgtgagacagggcgccctgatcgccagcgccctgatcatgatccagcagaccgagatcacctgccccaaggtgaaccagttcagacagctgtacagcaaggtgatcaacgacaagcacgacgacgtgatggccaagttcggcgccatcctggcccagggcatcctggacgccggcggccacaacgtgaccatcagcctgcagagcagaaccggccacacccacatgcccagcgtggtgggcgtgctggtgttcacccagttctggttctggttccccctgagccacttcctgagcctggcctacacccccacctgcgtgatcggcctgaacaaggacctgaaggtgagcaccgccgtgctgagcatcaccgccaaggccaagaagaaggagaaggagaaggagaagaaggaggaggagaagatggaggtggacgaggccgagaagaaggaggagaaggagaagaagaaggagcccgagcccaacttccagctgctggacaaccccgccagagtgatgcccgcccagctgaaggtgctgaccatgcccgagacctgcagataccagcccttcaagcccctgagcatcggcggcatcatcatcctgaaggacaccagcgaggacatcgaggagctggtggagcccgtggccgcccacggccccaagatcgaggaggaggagcaggagcccgagccccccgagcccttcgagtacatcgacgactag

SEQ ID NO: 10883 - DNA, 1227 bp, synthetic construct
  source 1..1227: mol_type = other DNA; note = Synthetic coding sequence
atgcccgaggagcaggccttcagcgtgctggtgaagatcatgttcgactacggcctgagagagctgttcaagcagaacttcgaggacctgcactgcaagttctaccagctggagagactgatgcaggagtacatccccgacctgtacaaccacttcctggacatcagcctggaggcccacatgtacgccagccagtggttcctgaccctgttcaccgccaagttccccctgtacatggtgttccacatcatcgacctgctgctgtgcgagggcatcagcgtgatcttcaacgtggccctgggcctgctgaagaccagcaaggacgacctgctgctgaccgacttcgagggcgccctgaagttcttcagagtgcagctgcccaagagatacagaagcgaggagaacgccaagaagctgatggagctggcctgcaacatgaagatcagccagaagaagctgaagaagtacgagaaggagtaccacaccatgagagagcagcaggcccagcaggaggaccccatcgagagattcgagagagagaacagaagactgcaggaggccaacatgagactggagcaggagaacgacgacctggcccacgagctggtgaccagcaagatcgccctgagaaaggacctggacaacgccgaggagaaggccgacgccctgaacaaggagctgctgatgaccaagcagaagctgatcgacgccgaggaggagaagagaagactggaggaggagagcgcccagctgaaggagatgtgcagaagagagctggacaaggccgagagcgagatcaagaagaacagcagcatcatcggcgactacaagcagatctgcagccagctgagcgagagactggagaagcagcagaccgccaacaaggtggagatcgagaagatcagacagaaggtggacgactgcgagagatgcagagagttcttcaacaaggagggcagagtgaagggcatcagcagcaccaaggaggtgctggacgaggacaccgacgaggagaaggagaccctgaagaaccagctgagagagatggagctggagctggcccagaccaagctgcagctggtggaggccgagtgcaagatccaggacctggagcaccacctgggcctggccctgaacgaggtgcaggccgccaagaagacctggttcaacagaaccctgagcagcatcaagaccgccaccggcgtgcagggcaaggagacctgctag

SEQ ID NO: 10884 - DNA, 3210 bp, synthetic construct
  source 1..3210: mol_type = other DNA; note = Synthetic coding sequence
atggacgacaaggccagcgtgggcaagatcagcgtgagcagcgacagcgtgagcaccctgaacagcgaggacttcgtgctggtgagcagacagggcgacgagacccccagcaccaacaacggcagcgacgacgagaagaccggcctgaagatcgtgggcaacggcagcgagcagcagctgcagaaggagctggccgacgtgctgatggacccccccatggacgaccagcccggcgagaaggagctggtgaagagaagccagctggacggcgagggcgacggccccctgagcaaccagctgagcgccagcagcaccatcaaccccgtgcccctggtgggcctgcagaagcccgagatgagcctgcccgtgaagcccggccagggcgacagcgaggccagcagccccttcacccccgtggccgacgaggacagcgtggtgttcagcaagctgacctacctgggctgcgccagcgtgaacgcccccagaagcgaggtggaggccctgagaatgatgagcatcctgagaagccagtgccagatcagcctggacgtgaccctgagcgtgcccaacgtgagcgagggcatcgtgagactgctggacccccagaccaacaccgagatcgccaactaccccatctacaagatcctgttctgcgtgagaggccacgacggcacccccgagagcgactgcttcgccttcaccgagagccactacaacgccgagctgttcagaatccacgtgttcagatgcgagatccaggaggccgtgagcagaatcctgtacagcttcgccaccgccttcagaagaagcgccaagcagacccccctgagcgccaccgccgccccccagacccccgacagcgacatcttcaccttcagcgtgagcctggagatcaaggaggacgacggcaagggctacttcagcgccgtgcccaaggacaaggacagacagtgcttcaagctgagacagggcatcgacaagaagatcgtgatctacgtgcagcagaccaccaacaaggagctggccatcgagagatgcttcggcctgctgctgagccccggcaaggacgtgagaaacagcgacatgcacctgctggacctggagagcatgggcaagagcagcgacggcaagagctacgtgatcaccggcagctggaaccccaagagcccccacttccaggtggtgaacgaggagacccccaaggacaaggtgctgttcatgaccaccgccgtggacctggtgatcaccgaggtgcaggagcccgtgagattcctgctggagaccaaggtgagagtgtgcagccccaacgagagactgttctggcccttcagcaagagaagcaccaccgagaacttcttcctgaagctgaagcagatcaagcagagagagagaaagaacaacaccgacaccctgtacgaggtggtgtgcctggagagcgagagcgagagagagagaagaaagaccaccgccagccccagcgtgagactgccccagagcggcagccagagcagcgtgatccccagcccccccgaggacgacgaggaggaggacaacgacgagcccctgctgagcggcagcggcgacgtgagcaaggagtgcgccgagaagatcctggagacctggggcgagctgctgagcaagtggcacctgaacctgaacgtgagacccaagcagctgagcagcctggtgagaaacggcgtgcccgaggccctgagaggcgaggtgtggcagctgctggccggctgccacaacaacgaccacctggtggagaagtacagaatcctgatcaccaaggagagcccccaggacagcgccatcaccagagacatcaacagaaccttccccgcccacgactacttcaaggacaccggcggcgacggccaggacagcctgtacaagatctgcaaggcctacagcgtgtacgacgaggagatcggctactgccagggccagagcttcctggccgccgtgctgctgctgcacatgcccgaggagcaggccttcagcgtgctggtgaagatcatgttcgactacggcctgagagagctgttcaagcagaacttcgaggacctgcactgcaagttctaccagctggagagactgatgcaggagtacatccccgacctgtacaaccacttcctggacatcagcctggaggcccacatgtacgccagccagtggttcctgaccctgttcaccgccaagttccccctgtacatggtgttccacatcatcgacctgctgctgtgcgagggcatcagcgtgatcttcaacgtggccctgggcctgctgaagaccagcaaggacgacctgctgctgaccgacttcgagggcgccctgaagttcttcagagtgcagctgcccaagagatacagaagcgaggagaacgccaagaagctgatggagctggcctgcaacatgaagatcagccagaagaagctgaagaagtacgagaaggagtaccacaccatgagagagcagcaggcccagcaggaggaccccatcgagagattcgagagagagaacagaagactgcaggaggccaacatgagactggagcaggagaacgacgacctggcccacgagctggtgaccagcaagatcgccctgagaaaggacctggacaacgccgaggagaaggccgacgccctgaacaaggagctgctgatgaccaagcagaagctgatcgacgccgaggaggagaagagaagactggaggaggagagcgcccagctgaaggagatgtgcagaagagagctggacaaggccgagagcgagatcaagaagaacagcagcatcatcggcgactacaagcagatctgcagccagctgagcgagagactggagaagcagcagaccgccaacaaggtggagatcgagaagatcagacagaaggtggacgactgcgagagatgcagagagttcttcaacaaggagggcagagtgaagggcatcagcagcaccaaggaggtgctggacgaggacaccgacgaggagaaggagaccctgaagaaccagctgagagagatggagctggagctggcccagaccaagctgcagctggtggaggccgagtgcaagatccaggacctggagcaccacctgggcctggccctgaacgaggtgcaggccgccaagaagacctggttcaacagaaccctgagcagcatcaagaccgccaccggcgtgcagggcaaggagacctgctag

SEQ ID NO: 10885 - DNA, 2808 bp, synthetic construct
  source 1..2808: mol_type = other DNA; note = Synthetic coding sequence
atgcagagaaagctggtgaccctggtgaactgccagctggtggaggaggagggcagagtgagagccatgagagccgccagaagcctgggcgagagaaccgtgaccgagctgatcctgcagcaccagaacccccagcagctgagcgccaacctgtgggccgccgtgagagccagaggctgccagttcctgggccccgccatgcaggaggaggccctgaagctggtgctgctggccctggaggacggcagcgccctgagcagaaaggtgctggtgctgttcgtggtgcagagactggagcccagattcccccaggccagcaagaccagcatcggccacgtggtgcagctgctgtacagagccagctgcttcaaggtgaccaagagagacgaggacagcagcctgatgcagctgaaggaggagttcagaagctacgaggccctgagaagagagcacgacgcccagatcgtgcacatcgccatggaggccggcctgagaatcagccccgagcagtggagcagcctgctgtacggcgacctggcccacaagagccacatgcagagcatcatcgacaagctgcagagccccgagagcttcgccaagagcgtgcaggagctgaccatcgtgctgcagagaaccggcgaccccgccaacctgaacagactgagaccccacctggagctgctggccaacatcgaccccaaccccgacgccgtgagccccacctgggagcagctggagaacgccatggtggccgtgaagaccgtggtgcacggcctggtggacttcatccagaactacagcagaaagggccacgagaccccccagccccagcccaacagcaagtacaagaccagcatgtgcagagacctgagacagcagggcggctgccccagaggcaccaactgcaccttcgcccacagccaggaggagctggagaagtacagactgagaaacaagaagatcaacgccaccgtgagaaccttccccctgctgaacaaggtgggcgtgaacaacaccgtgaccaccaccgccggcaacgtgatcagcgtgatcggcagcaccgagaccaccggcaagatcgtgcccagcaccaacggcatcagcaacgccgagaacagcgtgagccagctgatcagcagaagcaccgacagcaccctgagagccctggagaccgtgaagaaggtgggcaaggtgggcgccaacggccagaacgccgccggccccagcgccgacagcgtgaccgagaacaagatcggcagcccccccaagacccccgtgagcaacgtggccgccaccagcgccggccccagcaacgtgggcaccgagctgaacagcgtgccccagaagagcagccccttcctgaccagagtgcccgtgtaccccccccacagcgagaacatccagtacttccaggaccccagaacccagatccccttcgaggtgccccagtacccccagaccggctactacccccccccccccaccgtgcccgccggcgtggccccctgcgtgcccagattcgtgagaagcaacaacgtgcccgagagcagcctgccccccgccagcatgccctacgccgaccactacagcaccttcagccccagagacagaatgaacagcagcccctaccagcccccccccccccagccctacggccccgtgccccccgtgcccagcggcatgtacgcccccgtgtacgacagcagaagaatctggagaccccccatgtaccagagagacgacatcatcagaagcaacagcctgccccccatggacgtgatgcacagcagcgtgtaccagaccagcctgagagagagatacaacagcctggacggctactacagcgtggcctgccagccccccagcgagcccagaaccaccgtgcccctgcccagagagccctgcggccacctgaagaccagctgcgaggagcagatcagaagaaagcccgaccagtgggcccagtaccacacccagaaggcccccctggtgagcagcaccctgcccgtggccacccagagccccaccccccccagccccctgttcagcgtggacttcagagccgacttcagcgagagcgtgagcggcaccaagttcgaggaggaccacctgagccactacagcccctggagctgcggcaccatcggcagctgcatcaacgccatcgacagcgagcccaaggacgtgatcgccaacagcaacgccgtgctgatggacctggacagcggcgacgtgaagagaagagtgcacctgttcgagacccagagaagaaccaaggaggaggaccccatcatccccttcagcgacggccccatcatcagcaagtggggcgccatcagcagaagcagcagaaccggctaccacaccaccgaccccgtgcaggccaccgccagccagggcagcgccaccaagcccatcagcgtgagcgactacgtgccctacgtgaacgccgtggacagcagatggagcagctacggcaacgaggccaccagcagcgcccactacgtggagagagacagattcatcgtgaccgacctgagcggccacagaaagcacagcagcaccggcgacctgctgagcctggagctgcagcaggccaagagcaacagcctgctgctgcagagagaggccaacgccctggccatgcagcagaagtggaacagcctggacgagggcagacacctgaccctgaacctgctgagcaaggagatcgagctgagaaacggcgaggtgaagaagctgaacctgagcgccagctgcctgatgtacctgttcagcgccgccgccagctggctgtaccactactag

SEQ ID NO: 10886 - DNA, 1437 bp, synthetic construct
  source 1..1437: mol_type = other DNA; note = Synthetic coding sequence
atgcccgtgcaggccgcccagtggaccgagttcctgagctgccccatctgctacaacgagttcgacgagaacgtgcacaagcccatcagcctgggctgcagccacaccgtgtgcaagacctgcctgaacaagctgcacagaaaggcctgccccttcgaccagaccgccatcaacaccgacatcgacgtgctgcccgtgaacttcgccctgctgcagctggtgggcgcccaggtgcccgaccaccagagcatcaagctgagcaacctgggcgagaacaagcactacgaggtggccaagaagtgcgtggaggacctggccctgtacctgaagcccctgagcggcggcaagggcgtggccagcctgaaccagagcgccctgagcagacccatgcagagaaagctggtgaccctggtgaactgccagctggtggaggaggagggcagagtgagagccatgagagccgccagaagcctgggcgagagaaccgtgaccgagctgatcctgcagcaccagaacccccagcagctgagcgccaacctgtgggccgccgtgagagccagaggctgccagttcctgggccccgccatgcaggaggaggccctgaagctggtgctgctggccctggaggacggcagcgccctgagcagaaaggtgctggtgctgttcgtggtgcagagactggagcccagattcccccaggccagcaagaccagcatcggccacgtggtgcagctgctgtacagagccagctgcttcaaggtgaccaagagagacgaggacagcagcctgatgcagctgaaggaggagttcagaagctacgaggccctgagaagagagcacgacgcccagatcgtgcacatcgccatggaggccggcctgagaatcagccccgagcagtggagcagcctgctgtacggcgacctggcccacaagagccacatgcagagcatcatcgacaagctgcagagccccgagagcttcgccaagagcgtgcaggagctgaccatcgtgctgcagagaaccggcgaccccgccaacctgaacagactgagaccccacctggagctgctggccaacatcgaccccaaccccgacgccgtgagccccacctgggagcagctggagaacgccatggtggccgtgaagaccgtggtgcacggcctggtggacttcatccagaactacagcagaaagggccacgagaccccccagccccagcccaacagcaagtacaagaccagcatgtgcagagacctgagacagcagggcggctgccccagaggcaccaactgcaccttcgcccacagccaggaggagctggagaagtacagactgagaaacaagaagatcaacgccaccgaggtgctgaagcagcagggcaagctgttccaggtgcagaccgagttccagatgcagaagaccgtgttccccagctag

SEQ ID NO: 10887 - DNA, 3576 bp, synthetic construct; identical to SEQ ID NO: 10440
  source 1..3576: mol_type = other DNA; note = Synthetic coding sequence

SEQ ID NO: 10888 - DNA, 1569 bp, synthetic construct
  source 1..1569: mol_type = other DNA; note = Synthetic coding sequence
atggccgccagcgccaagagaaagcaggaggagaagcacctgaagatgctgagagacatgaccggcctgccccacaacagaaagtgcttcgactgcgaccagagaggccccacctacgtgaacatgaccgtgggcagcttcgtgtgcaccagctgcagcggcagcctgagaggcctgaaccccccccacagagtgaagagcatcagcatgaccaccttcacccagcaggagatcgagttcctgcagaagcacggcaacgaggtgtgcaagcagatctggctgggcctgttcgacgacagaagcagcgccatccccgacttcagagacccccagaaggtgaaggagttcctgcaggagaagtacgagaagaagagatggtacgtgccccccgagcaggccaaggtggtggccagcgtgcacgccagcatcagcggcagcagcgccagcagcaccagcagcacccccgaggtgaagcccctgaagagcctgctgggcgacagcgcccccaccctgcacctgaacaagggcacccccagccagagccccgtggtgggcagaagccagggccagcagcaggagaagaagcagttcgacctgctgagcgacctgggcagcgacatcttcgccgcccccgccccccagagcaccgccaccgccaacttcgccaacttcgcccacttcaacagccacgccggcggcagcgccgccagcgtgaacgccaacttcgcccacttcgacaacttccccaagagcagcagcgccgacttcggcaccttcaacaccagccagagccaccagaccgccagcgccgtgagcaaggtgagcaccaacaaggccggcctgcagaccgccgacaagtacgccgccctggccaacctggacaacatcttcagcgccggccagggcggcgaccagggcagcggcttcggcaccaccggcaaggcccccgtgggcagcgtggtgagcgtgcccagccagagcagcgccagcagcgacaagtacgccgccctggccgagctggacagcgtgttcagcagcgccgccaccagcagcaacgcctacaccagcaccagcaacgccagcagcaacgtgttcggcaccgtgcccgtggtggccagcgcccagacccagcccgccagcagcagcgtgcccgcccccttcggcgccacccccagcaccaaccccttcgtggccgccgccggccccagcgtggccagcagcaccaaccccttccagaccaacgccagaggcgccaccgccgccaccttcggcaccgccagcatgagcatgcccaccggcttcggcacccccgccccctacagcctgcccaccagcttcagcggcagcttccagcagcccgccttccccgcccaggccgccttcccccagcagaccgccttcagccagcagcccaacggcgccggcttcgccgccttcggccagaccaagcccgtggtgacccccttcggccaggtggccgccgccggcgtgagcagcaaccccttcatgaccggcgcccccaccggccagttccccaccggcagcagcagcaccaaccccttcctgtag

SEQ ID NO: 10889 - DNA, 1524 bp, synthetic construct
  source 1..1524: mol_type = other DNA; note = Synthetic coding sequence
atgcaggacgacagcatcgaggccagcaccagcatcagccagctgctgagagagagctacctggccgagaccagacacagaggcaacaacgagagaagcagagccgagcccagcagcaacccctgccacttcggcagccccagcggcgccgccgagggcggcggcggccaggacgacctgcccgacctgagcgccttcctgagccaggaggagctggacgagagcgtgaacctggccagactggccatcaactacgaccccctggagaaggccgacgagacccaggccagaaagagactgagccccgaccagatgaagcacagccccaacctgagcttcgagcccaacttctgccaggacaaccccagaagccccaccagcagcaaggagagcccccaggaggccaagagaccccagtactgcagcgagacccagagcaagaaggtgttcctgaacaaggccgccgacttcatcgaggagctgagcagcctgttcaagagccacagcagcaagagaatcagacccagagcctgcaagaaccacaagagcaagctggagagccagaacaaggtgatgcaggagaacagcagcagcttcagcgacctgagcgagagaagagagagaagcagcgtgcccatccccatccccgccgacaccagagacaacgaggtgaaccacgccctggagcagcaggaggccaagagaagagaggccgagcaggccgccagcgaggccgccggcggcgacaccacccccggcagcagccccagcagcctgtactacgaggagcccctgggccagccccccagattcacccagaagctgagaagcagagaggtgcccgagggcaccagagtgcagctggactgcatcgtggtgggcatcccccccccccaggtgagatggtactgcgagggcaaggagctggagaacagccccgacatccacatcgtgcaggccggcaacctgcacagcctgaccatcgccgaggccttcgaggaggacaccggcagatacagctgcttcgccagcaacatctacggcaccgacagcaccagcgccgagatctacatcgagggcgtgagcagcagcgacagcgagggcgaccccaacaaggaggagatgaacagaatccagaagcccaacgaggtgagcagcccccccaccaccagcgccgtgatcccccccgccgtgccccaggcccagcacctggtggcccagcccagagtggccaccatccagcagtgccagagccccaccaactacctgcagggcctggacggcaagcccatcatcgccgcccccgtgttcaccaagatgctgcagaacctgagcgccagcgagggccagctggtggtgttcgagtgcagagtgaagggcgcccccagccccaaggtggagtggtacagagagggcaccctgatcgaggacagccccgacttcagaatcctgcagaagaagcccagaagcatggccgagcccggcaaggacgacttcaacttcaacctgctggtgtacgagtag

SEQ ID NO: 10890 - DNA, 3150 bp, synthetic construct
  source 1..3150: mol_type = other DNA; note = Synthetic coding sequence
atgctgtgctggggcaacgccagcttcggccagctgggcctgggcggcatcgacgaggagatcgtgctggagcccagaaagagcgacttcttcatcaacaagagagtgagagacgtgggctgcggcctgagacacaccgtgttcgtgctggacgacggcaccgtgtacacctgcggctgcaacgacctgggccagctgggccacgagaagagcagaaagaagcccgagcaggtggtggccctggacgcccagaacatcgtggccgtgagctgcggcgaggcccacaccctggccctgaacgacaagggccaggtgtacgcctggggcctggacagcgacggccagctgggcctggtgggcagcgaggagtgcatcagagtgcccagaaacatcaagagcctgagcgacatccagatcgtgcaggtggcctgcggctactaccacagcctggccctgagcaaggccagcgaggtgttctgctggggccagaacaagtacggccagctgggcctgggcaccgactgcaagaagcagaccagcccccagctgctgaagagcctgctgggcatccccttcatgcaggtggccgccggcggcgcccacagcttcgtgctgaccctgagcggcgccatcttcggctggggcagaaacaagttcggccagctgggcctgaacgacgagaacgacagatacgtgcccaacctgctgaagagcctgagaagccagaagatcgtgtacatctgctgcggcgaggaccacaccgccgccctgaccaaggagggcggcgtgttcaccttcggcgccggcggctacggccagctgggccacaacagcaccagccacgagatcaaccccagaaaggtgttcgagctgatgggcagcatcgtgaccgagatcgcctgcggcagacagcacaccagcgccttcgtgcccagcagcggcagaatctacagcttcggcctgggcggcaacggccagctgggcaccggcagcaccagcaacagaaagagccccttcaccgtgaagggcaactggtacccctacaacggccagtgcctgcccgacatcgacagcgaggagtacttctgcgtgaagagaatcttcagcggcggcgaccagagcttcagccactacagcagcccccagaactgcggcccccccgacgacttcagatgccccaaccccaccaagcagatctggaccgtgaacgaggccctgatccagaagtggctgagctaccccagcggcagattccccgtggagatcgccaacgagatcgacggcaccttcagcagcagcggctgcctgaacggcagcttcctggccgtgagcaacgacgaccactacagaaccggcaccagattcagcggcgtggacatgaacgccgccagactgctgttccacaagctgatccagcccgaccacccccagatcagccagcaggtggccgccagcctggagaagaacctgatccccaagctgaccagcagcctgcccgacgtggaggccctgagattctacctgaccctgcccgagtgccccctgatgagcgacagcaacaacttcaccaccatcgccatccccttcggcaccgccctggtgaacctggagaaggcccccctgaaggtgctggagaactggtggagcgtgctggagccccccctgttcctgaagatcgtggagctgttcaaggaggtggtggtgcacctgctgaagctgtacaagatcggcatcccccccagcgagagaagaatcttcaacagcttcctgcacaccgccctgaaggtgctggagatcctgcacagagtgaacgagaagatgggccagatcatccagtacgacaagttctacatccacgaggtgcaggagctgatcgacatcagaaacgactacatcaactgggtgcagcagcaggcctacggcatgctggccgacatccccgtgaccatctgcacctaccccttcgtgttcgacgcccaggccaagaccaccctgctgcagaccgacgccgtgctgcagatgcagatggccatcgaccaggcccacagacagaacgtgagcagcctgttcctgcccgtgatcgagagcgtgaacccctgcctgatcctggtggtgagaagagagaacatcgtgggcgacgccatggaggtgctgagaaagaccaagaacatcgactacaagaagcccctgaaggtgatcttcgtgggcgaggacgccgtggacgccggcggcgtgagaaaggagttcttcctgctgatcatgagagagctgctggaccccaagtacggcatgttcagatactacgaggacagcagactgatctggttcagcgacaagaccttcgaggacagcgacctgttccacctgatcggcgtgatctgcggcctggccatctacaactgcaccatcgtggacctgcacttccccctggccctgtacaagaagctgctgaagaagaagcccagcctggacgacctgaaggagctgatgcccgacgtgggcagaagcatgcagcagctgctggactaccccgaggacgacatcgaggagaccttctgcctgaacttcaccatcaccgtggagaacttcggcgccaccgaggtgaaggagctggtgctgaacggcgccgacaccgccgtgaacaagcagaacagacaggagttcgtggacgcctacgtggactacatcttcaacaagagcgtggccagcctgttcgacgccttccacgccggcttccacaaggtgtgcggcggcaaggtgctgctgctgttccagcccaacgagctgcaggccatggtgatcggcaacaccaactacgactggaaggagctggagaagaacaccgagtacaagggcgagtactgggccgagcaccccaccatcaagatcttctgggaggtgttccacgagctgcccctggagaagaagaagcagttcctgctgttcctgaccggcagcgacagaatccccatcctgggcatgaagagcctgaagctggtgatccagagcaccggcggcggcgaggagtacctgcccgtgagccacacctgcttcaacctgctggacctgcccaagtacaccgagaaggagaccctgagaagcaagctgatccaggccatcgaccacaacgagggcttcagcctgatctag

SEQ ID NO: 10891 - DNA, 726 bp, synthetic construct; identical to SEQ ID NO: 10281
  source 1..726: mol_type = other DNA; note = Synthetic coding sequence

SEQ ID NO: 10892 - DNA, 870 bp, synthetic construct
  source 1..870: mol_type = other DNA; note = Synthetic coding sequence
atgatcatcaactggaaccaggtgagcgtgctgtggaagtgcctgctgaagcagagcgccagctaccaggacagaagacagagctggagaagagccagcatgaaggagaccaacagaagaaagagcctgcaccccatccaccagggcatcaccgagctgagcagaagcatcagcgtggacctggccgagagcaagagactgggctgcctgctgctgagcagcttccagttcagcatccagaagctggagcccttcctgagagacaccaagggcttcagcctggagagcttcagagccaaggccagcagcctgagcgaggagctgaagcacttcgccgacggcctggagaccgacggcaccctgcagaagtgcttcgaggacagcaacggcaaggccagcgacttcagcctggaggccagcgtggccgagatgaaggagtacatcaccaagttcagcctggagagacagacctgggaccagctgctgctgcactaccagcaggaggccaaggagatcctgagcagaggcagcaccgaggccaagatcaccgaggtgaaggtggagcccatgacctacctgggcagcagccagaacgaggtgctgaacaccaagcccgactaccagaagatcctgcagaaccagagcaaggtgttcgactgcatggagctggtgatggacgagctgcagggcagcgtgaagcagctgcaggccttcatggacgagagcacccagtgcttccagaaggtgagcgtgcagctgggcaagagaagcatgcagcagctggaccccagccccgccagaaagctgctgaagctgcagctgcagaacccccccgccatccacggcagcggcagcggcagctgccagtag

SEQ ID NO: 10893 - DNA, 750 bp, synthetic construct
  source 1..750: mol_type = other DNA; note = Synthetic coding sequence
atgaccagcgtgaccagaagcgagatcatcgacgagctgagcagaagcatcagcgtggacctggccgagagcaagagactgggctgcctgctgctgagcagcttccagttcagcatccagaagctggagcccttcctgagagacaccaagggcttcagcctggagagcttcagagccaaggccagcagcctgagcgaggagctgaagcacttcgccgacggcctggagaccgacggcaccctgcagaagtgcttcgaggacagcaacggcaaggccagcgacttcagcctggaggccagcgtggccgagatgaaggagtacatcaccaagttcagcctggagagacagacctgggaccagctgctgctgcactaccagcaggaggccaaggagatcctgagcagaggcagcaccgaggccaagatcaccgaggtgaaggtggagcccatgacctacctgggcagcagccagaacgaggtgctgaacaccaagcccgactaccagaagatcctgcagaaccagagcaaggtgttcgactgcatggagctggtgatggacgagctgcagggcagcgtgaagcagctgcaggccttcatggacgagagcacccagtgcttccagaaggtgagcgtgcagctgggcaagagaagcatgcagcagctggaccccagccccgccagaaagctgctgaagctgcagctgcagaacccccccgccatccacggcagcggcagcggcagctgccagtag

SEQ ID NO: 10894 - DNA, 855 bp, synthetic construct
  source 1..855: mol_type = other DNA; note = Synthetic coding sequence
atgaccagcgtgaccagaagcgagatcatcgacgagcagagcgccagctaccaggacagaagacagagctggagaagagccagcatgaaggagaccaacagaagaaagagcctgcaccccatccaccagggcatcaccgagctgagcagaagcatcagcgtggacctggccgagagcaagagactgggctgcctgctgctgagcagcttccagttcagcatccagaagctggagcccttcctgagagacaccaagggcttcagcctggagagcttcagagccaaggccagcagcctgagcgaggagctgaagcacttcgccgacggcctggagaccgacggcaccctgcagaagtgcttcgaggacagcaacggcaaggccagcgacttcagcctggaggccagcgtggccgagatgaaggagtacatcaccaagttcagcctggagagacagacctgggaccagctgctgctgcactaccagcaggaggccaaggagatcctgagcagaggcagcaccgaggccaagatcaccgaggtgaaggtggagcccatgacctacctgggcagcagccagaacgaggtgctgaacaccaagcccgactaccagaagatcctgcagaaccagagcaaggtgttcgactgcatggagctggtgatggacgagctgcagggcagcgtgaagcagctgcaggccttcatggacgagagcacccagtgcttccagaaggtgagcgtgcagctgggcaagagaagcatgcagcagctggaccccagccccgccagaaagctgctgaagctgcagctgcagaacccccccgccatccacggcagcggcagcggcagctgccagtag

SEQ ID NO: 10895 - DNA, 1071 bp, synthetic construct
  source 1..1071: mol_type = other DNA; note = Synthetic coding sequence
atgaccagcgtgaccagaagcgagatcatcgacgagaagggccccgtgatgagcaagacccacgaccaccagctggagagcagcctgagccccgtggaggtgttcgccaagaccagcgccagcctggagatgaaccagggcgtgagcgaggagagaatccacctgggcagcagccccaagaagggcggcaactgcgacctgagccaccaggagagactgcagagcaagagcctgcacctgagcccccaggagcagagcgccagctaccaggacagaagacagagctggagaagagccagcatgaaggagaccaacagaagaaagagcctgcaccccatccaccagggcatcaccgagctgagcagaagcatcagcgtggacctggccgagagcaagagactgggctgcctgctgctgagcagcttccagttcagcatccagaagctggagcccttcctgagagacaccaagggcttcagcctggagagcttcagagccaaggccagcagcctgagcgaggagctgaagcacttcgccgacggcctggagaccgacggcaccctgcagaagtgcttcgaggacagcaacggcaaggccagcgacttcagcctggaggccagcgtggccgagatgaaggagtacatcaccaagttcagcctggagagacagacctgggaccagctgctgctgcactaccagcaggaggccaaggagatcctgagcagaggcagcaccgaggccaagatcaccgaggtgaaggtggagcccatgacctacctgggcagcagccagaacgaggtgctgaacaccaagcccgactaccagaagatcctgcagaaccagagcaaggtgttcgactgcatggagctggtgatggacgagctgcagggcagcgtgaagcagctgcaggccttcatggacgagagcacccagtgcttccagaaggtgagcgtgcagctgggcaagagaagcatgcagcagctggaccccagccccgccagaaagctgctgaagctgcagctgcagaacccccccgccatccacggcagcggcagcggcagctgccagtag

SEQ ID NO: 10896 - DNA, 1071 bp, synthetic construct; identical to SEQ ID NO: 10895
  source 1..1071: mol_type = other DNA; note = Synthetic coding sequence

SEQ ID NO: 10897 - DNA, 1617 bp, synthetic construct
  source 1..1617: mol_type = other DNA; note = Synthetic coding sequence
atggccgccgccgccagcgtgaccggcagagtgacctgggccgccagccccatgagaagcctgggcctgggcagaagactgagcctgcccggccccagactggacgccgtgaccgccgccgtgaaccccagcctgagcgaccacggcaacggcctgggcagaggcaccagaggcagcggctgcagcggcggcagcctggtggccgactggggcggcggcgccgccgccgccgccgccgtggccctggccctggcccccgccctgagcaccatgagaagaggcagcagcgagagcgagctggccgccagatgggaggccgaggccgtggccgccgccaaggccgccgccaaggccgaggccgaggccaccgccgagaccgtggccgagcaggtgagagtggacgccggcgccgccggcgagcccgagtgcaaggccggcgaggagcagcccaaggtgctggcccccgcccccgcccagcccagcgccgccgaggagggcaacacccaggtgctgcagagacccccccccaccctgccccccagcaagcccaagcccgtgcagggcctgtgcccccacggcaagcccagagacaagggcagaagctgcaagagaagcagcggccacggcagcggcgagaacggcagccagagacccgtgaccgtggacagcagcaaggccagaaccagcctggacgccctgaagatcagcatcagacagctgaagtggaaggagttccccttcggcagaagactgccctgcgacatctactggcacggcgtgagcttccacgacaacgacatcttcagcggccaggtgaacaagttccccggcatgaccgagatggtgagaaagatcaccctgagcagagccgtgagaaccatgcagaacctgttccccgaggagtacaacttctaccccagaagctggatcctgcccgacgagttccagctgttcgtggcccaggtgcagatggtgaaggacgacgaccccagctggaagcccaccttcatcgtgaagcccgacggcggctgccagggcgacggcatctacctgatcaaggaccccagcgacatcagactggccggcaccctgcagagcagacccgccgtggtgcaggagtacatctgcaagcccctgctgatcgacaagctgaagttcgacatcagactgtacgtgctgctgaagagcctggaccccctggagatctacatcgccaaggacggcctgagcagattctgcaccgagccctaccaggagcccacccccaagaacctgcacagaatcttcatgcacctgaccaactacagcctgaacatccacagcggcaacttcatccacagcgacagcgccagcaccggcagcaagagaaccttcagcagcatcctgtgcagactgagcagcaagggcgtggacatcaagaaggtgtggagcgacatcatcagcgtggtgatcaagaccgtgatcgccctgacccccgagctgaaggtgttctaccagagcgacatccccaccggcagacccggccccacctgcttccaggtgaccatcgccagcagccagcccgccttccccgccctgaccggcctgaagagagccctgtggctgagagtgggctag

SEQ ID NO: 10898 - DNA, 1356 bp, synthetic construct
  source 1..1356: mol_type = other DNA; note = Synthetic coding sequence
atgaccgagatggtgagaaagatcaccctgagcagagccgtgagaaccatgcagaacctgttccccgaggagtacatctgcaagcccctgctgatcgacaagctgaagttcgacatcagactgtacgtgctgctgaagagcctggaccccctggagatctacatcgccaaggacggcctgagcagattctgcaccgagccctaccaggagcccacccccaagaacctgcacagaatcttcatgcacctgaccaactacagcctgaacatccacagcggcaacttcatccacagcgacagcgccagcaccggcagcaagagaaccttcagcagcatcctgtgcagactgagcagcaagggcgtggacatcaagaaggtgtggagcgacatcatcagcgtggtgatcaagaccgtgatcgccctgacccccgagctgaaggtgttctaccagagcgacatccccaccggcagacccggccccacctgcttccagatcctgggcttcgacatcctgctgatgaagaacctgaagcccatcctgctggaggtgaacgccaaccccagcatgagaatcgagcacgagcacgagctgagccccggcgtgttcgagaacgtgcccagcctggtggacgaggaggtgaaggtggccgtgatcagagacaccctgagactgatggaccccctgaagaagaagagagagaaccagagccagcagctggagaagcccttcgccggcaaggaggacgccctggacggcgagctgaccagcgcccccgactgcaacgccaaccccgaggcccacctgcccagcatctgcctgaagcaggtgttccccaagtacgccaagcagttcaactacctgagactggtggacagaatggccaacctgttcatcagattcctgggcatcaagggcaccatgaagctgggccccaccggcttcagaaccttcatcagaagctgcaagctgagcagcagcagcctgagcatggccgccgtggacatcctgtacatcgacatcaccagaagatggaacagcatgaccctggaccagagagacagcggcatgtgcctgcaggccttcgtggaggccttcttcttcctggcccagagaaagttcaagatgctgcccctgcacgagcaggtggccagcctgatcgacctgtgcgagtaccacctgagcctgctggacgagaagagactggtgtgcggcagaggcgtgcccagcggcggcagacccccccacagaggccccccccaggagcccagccccagcgcccagcccgccggcgacaaccccccccccagaaccagctgcgccaacaagctgagccaccccagacacaccctgagctag

SEQ ID NO: 10899 - DNA, 1644 bp, synthetic construct
  source 1..1644: mol_type = other DNA; note = Synthetic coding sequence
atgaaggtggtgaagagcgccgagcactacaccgagaccgccctggacgagatcagactgctgaagagcgtgagaaacagcgaccccaacgaccccaacagagagatggtggtgcagctgctggacgacttcaagatcagcggcgtgaacggcacccacatctgcatggtgttcgaggtgctgggccaccacctgctgaagtggatcatcaagagcaactaccagggcctgcccctgccctgcgtgaagaagatcatccagcaggtgctgcagggcctggactacctgcacaccaagtgcagaatcatccacaccgacatcaagcccgagaacatcctgctgagcgtgaacgagcagtacatcagaagactggccgccgaggccaccgagtggcagagaagcggcgcccccccccccagcggcagcgccgtgagcaccgccccccagcccaagcccgccgacaagatgagcaagaacaagaagaagaagctgaagaagaagcagaagagacaggccgagctgctggagaagagaatgcaggagatcgaggagatggagaaggagagcggccccggccagaagagacccaacaagcaggaggagagcgagagccccgtggagagacccctgaaggagaacccccccaacaagatgacccaggagaagctggaggagagcagcaccatcggccaggaccagaccctgatggagagagacaccgagggcggcgccgccgagatcaactgcaacggcgtgatcgaggtgatcaactacacccagaacagcaacaacgagaccctgagacacaaggaggacctgcacaacgccaacgactgcgacgtgcagaacctgaaccaggagagcagcttcctgagcagccagaacggcgacagcagcaccagccaggagaccgacagctgcacccccatcaccagcgaggtgagcgacaccatggtgtgccagagcagcagcaccgtgggccagagcttcagcgagcagcacatcagccagctgcaggagagcatcagagccgagatcccctgcgaggacgagcaggagcaggagcacaacggccccctggacaacaagggcaagagcaccgccggcaacttcctggtgaaccccctggagcccaagaacgccgagaagctgaaggtgaagatcgccgacctgggcaacgcctgctggcacaagcacttcaccgaggacatccagaccagacagtacagaagcctggaggtgctgatcggcagcggctacaacacccccgccgacatctggagcaccgcctgcatggccttcgagctggccaccggcgactacctgttcgagccccacagcggcgaggagtacaccagagacgaggaccacatcgtgcacatcatcgagctgatcggcagaatccccagaagattcagcctgagcggcaagtacagccaggacttcttcagccacagaggcgacctgaagcacatcaccaagctgaagccctggggcctgttcgaggtgctggtggagaagtacgagtggagccaggaggaggccgccggcttcaccgacttcctgctgcccatgctggagctgatccccgagaagagagccaccgccgccgagtgcctgagacacccctggctgaacagctag

SEQ ID NO: 10900 - DNA, 1968 bp, synthetic construct
  source 1..1968: mol_type = other DNA; note = Synthetic coding sequence
atggagagaaaggtgctggccctgcaggccagaaagaagagaaccaaggccaagaaggacaaggcccagagaaagagcgagacccagcacagaggcagcgccccccacagcgagagcgacctgcccgagcaggaggaggagatcctgggcagcgacgacgacgagcaggaggaccccaacgactactgcaagggcggctaccacctggtgaagatcggcgacctgttcaacggcagataccacgtgatcagaaagctgggctggggccacttcagcaccgtgtggctgagctgggacatccagggcaagaagttcgtggccatgaaggtggtgaagagcgccgagcactacaccgagaccgccctggacgagatcagactgctgaagagcgtgagaaacagcgaccccaacgaccccaacagagagatggtggtgcagctgctggacgacttcaagatcagcggcgtgaacggcacccacatctgcatggtgttcgaggtgctgggccaccacctgctgaagtggatcatcaagagcaactaccagggcctgcccctgccctgcgtgaagaagatcatccagcaggtgctgcagggcctggactacctgcacaccaagtgcagaatcatccacaccgacatcaagcccgagaacatcctgctgagcgtgaacgagcagtacatcagaagactggccgccgaggccaccgagtggcagagaagcggcgcccccccccccagcggcagcgccgtgagcaccgccccccagcccaagcccgccgacaagatgagcaagaacaagaagaagaagctgaagaagaagcagaagagacaggccgagctgctggagaagagaatgcaggagatcgaggagatggagaaggagagcggccccggccagaagagacccaacaagcaggaggagagcgagagccccgtggagagacccctgaaggagaacccccccaacaagatgacccaggagaagctggaggagagcagcaccatcggccaggaccagaccctgatggagagagacaccgagggcggcgccgccgagatcaactgcaacggcgtgatcgaggtgatcaactacacccagaacagcaacaacgagaccctgagacacaaggaggacctgcacaacgccaacgactgcgacgtgcagaacctgaaccaggagagcagcttcctgagcagccagaacggcgacagcagcaccagccaggagaccgacagctgcacccccatcaccagcgaggtgagcgacaccatggtgtgccagagcagcagcaccgtgggccagagcttcagcgagcagcacatcagccagctgcaggagagcatcagagccgagatcccctgcgaggacgagcaggagcaggagcacaacggccccctggacaacaagggcaagagcaccgccggcaacttcctggtgaaccccctggagcccaagaacgccgagaagctgaaggtgaagatcgccgacctgggcaacgcctgctgggtgcacaagcacttcaccgaggacatccagaccagacagtacagaagcctggaggtgctgatcggcagcggctacaacacccccgccgacatctggagcaccgcctgcatggccttcgagctggccaccggcgactacctgttcgagccccacagcggcgaggagtacaccagagacgaggaccacatcgccctgatcatcgagctgctgggcaaggtgcccagaaagctgatcgtggccggcaagtacagcaaggagttcttcaccaagaagggcgacctgaagcacatcaccaagctgaagccctggggcctgttcgaggtgctggtggagaagtacgagtggagccaggaggaggccgccggcttcaccgacttcctgctgcccatgctggagctgatccccgagaagagagccaccgccgccgagtgcctgagacacccctggctgaacagctag

SEQ ID NO: 10901 - DNA, 864 bp, synthetic construct
  source 1..864: mol_type = other DNA; note = Synthetic coding sequence
atggccgccagcctgtggatgggcgacctggagccctacatggacgagaacttcatcagcagagccttcgccaccatgggcgagaccgtgatgagcgtgaagatcatcagaaacagactgaccggcatccccgccggctactgcttcgtggagttcgccgacctggccaccgccgagaagtgcctgcacaagatcaacggcaagcccctgcccggcgccacccccgccaagagattcaagctgaactacgccacctacggcaagcagcccgacaacagccccgagtacagcctgttcgtgggcgacctgacccccgacgtggacgacggcatgctgtacgagttcttcgtgaaggtgtaccccagctgcagaggcggcaaggtggtgctggaccagaccggcgtgagcaagggctacggcttcgtgaagttcaccgacgagctggagcagaagagagccctgaccgagtgccagggcgccgtgggcctgggcagcaagcccgtgagactgagcgtggccatccccaaggccagcagagtgaagcccgtggagtacagccagatgtacagctacagctacaaccagtactaccagcagtaccagaactactacgcccagtggggctacgaccagaacaccggcagctacagctacagctacccccagtacggctacacccagagcaccatgcagacctacgaggaggtgggcgacgacgccctggaggaccccatgccccagctggacgtgaccgaggccaacaaggagttcatggagcagagcgaggagctgtacgacgccctgatggactgccactggcagcccctggacaccgtgagcagcgagatccccgccatgatgtag

SEQ ID NO: 10902 - DNA, 438 bp, synthetic construct
  source 1..438: mol_type = other DNA; note = Synthetic coding sequence
atggccgagagaaacgaggaccaccacctgcaggtgctgaaggagagcgaggtgctgctgcaggccaagagagccgagctggagaagctgaagagccaggtgaccagccagcagcaggagatggccgtgctggacagacagctgggccacaagaaggaggagctgcacctgctgcagggcagcatggtgcaggccaaggccgacctgcaggaggccctgagactgggcgagaccgaggtgaccgagaagtgcaaccacatcagagaggtgaagagcctgctggaggagctgagcttccagaagggcgagctgaacgtgcagatcagcgagagaaagacccagctgaccctgatcaagcaggagatcgagaaggaggaggagaacctgcaggtggtgctgagacagatgagcaagcacaagaccgccttcctgcagtag

SEQ ID NO: 10903 - DNA, 3024 bp, synthetic construct
  source 1..3024: mol_type = other DNA; note = Synthetic coding sequence
atgcagcacctgaagagcaagaagagagaggagagatggatgagagccagcaagagacagagcgagaaggagatggaggagctgcaccacaacatcgacgacctgctgcaggagaagaagagcctggagtgcgaggtggaggagctgcacagaaccgtgcagaagagacagcagcagaaggacttcatcgacggcaacgtggagagcctgatgaccgagctggagatcgagaagagcctgaagcaccacgaggacatcgtggacgagatcgagtgcatcgagaagaccctgctgaagagaagaagcgagctgagagaggccgacagactgctggccgaggccgagagcgagctgagctgcaccaaggagaaggtgtgcctgctggtggtgtggggcgtgagcagcgtgtggaccaagaacgccgtggagaagttcaccgacgccaagagaagcctgctgcagaccgagagcgacgccgaggagctggagagaagagcccaggagaccgccgtgaacctggtgaaggccgaccagcagctgagaagcctgcaggccgacgccaaggacctggagcagcacaagatcaagcaggaggagatcctgaaggagatcaacaagatcgtggccgccaaggacagcgacttccagtgcctgagcaagaagaaggagaagctgaccgaggagctgcagaagctgcagaaggacatcgagatggccgagagaaacgaggaccaccacctgcaggtgctgaaggagagcgaggtgctgctgcaggccaagagagccgagctggagaagctgaagagccaggtgaccagccagcagcaggagatggccgtgctggacagacagctgggccacaagaaggaggagctgcacctgctgcagggcagcatggtgcaggccaaggccgacctgcaggaggccctgagactgggcgagaccgaggtgaccgagaagtgcaaccacatcagagaggtgaagagcctgctggaggagctgagcttccagaagggcgagctgaacgtgcagatcagcgagagaaagacccagctgaccctgatcaagcaggagatcgagaaggaggaggagaacctgcaggtggtgctgagacagatgagcaagcacaagaccgagctgaagaacatcctggacatgctgcagctggagaaccacgagctgcagggcctgaagctgcagcacgaccagagagtgagcgagctggagaagacccaggtggccgtgctggaggagaagctggagctggagaacctgcagcagatcagccagcagcagaagggcgagatcgagtggcagaagcagctgctggagagagacaagagagagatcgagagaatgaccgccgagagcagagccctgcagagctgcgtggagtgcctgagcaaggagaaggaggacctgcaggagaagtgcgacatctgggagaagaagctggcccagaccaagagagtgctggccgccgccgaggagaacagcaagatggagcagagcaacctggagaagctggagctgaacgtgagaaagctgcagcaggagctggaccagctgaacagagacaagctgagcctgcacaacgacatcagcgccatgcagcagcagctgcaggagaagagagaggccgtgaacagcctgcaggaggagctggccaacgtgcaggaccacctgaacctggccaagcaggacctgctgcacaccaccaagcaccaggacgtgctgctgagcgagcagaccagactgcagaaggacatcagcgagtgggccaacagattcgaggactgccagaaggaggaggagaccaagcagcagcagctgcaggtgctgcagaacgagatcgaggagaacaagctgaagctggtgcagcaggagatgatgttccagagactgcagaaggagagagagagcgaggagagcaagctggagaccagcaaggtgaccctgaaggagcagcagcaccagctggagaaggagctgaccgaccagaagagcaagctggaccaggtgctgagcaaggtgctggccgccgaggagagagtgagaaccctgcaggaggaggagagatggtgcgagagcctggagaagaccctgagccagaccaagagacagctgagcgagagagagcagcagctggtggagaagagcggcgagctgctggccctgcagaaggaggccgacagcatgagagccgacttcagcctgctgagaaaccagttcctgaccgagagaaagaaggccgagaagcaggtggccagcctgaaggaggccctgaagatccagagaagccagctggagaagaacctgctggagcagaagcaggagaacagctgcatccagaaggagatggccaccatcgagctggtggcccaggacaaccacgagagagccagaagactgatgaaggagctgaaccagatgcagtacgagtacaccgagctgaagaagcagatggccaaccagaaggacctggagagaagacagatggagatcagcgacgccatgagaaccctgaagagcgaggtgaaggacgagatcagaaccagcctgaagaacctgaaccagttcctgcccgagctgcccgccgacctggaggccatcctggagagaaacgagaacctggagggcgagctggagagcctgaaggagaacctgcccttcaccatgaacgagggccccttcgaggagaagctgaacttcagccaggtgcacatcatggacgagcactggagaggcgaggccctgagagagaagctgagacacagagaggacagactgaaggcccagctgagacactgcatgagcaagcaggccgaggtgctgatcaagggcaagagacagaccgagggcaccctgcacagcctgagaagacaggtggacgccctgggcgagctggtgaccagcaccagcgccgacagcgccagcagccccagcctgagccagctggagagcagcctgaccgaggacagccagctgggccagaaccaggagaagaacgccagcgccagatag

SEQ ID NO: 10904 - DNA, 2985 bp, synthetic construct
  source 1..2985: mol_type = other DNA; note = Synthetic coding sequence
atgaaggcccagaagagcggcaaggagcagcagctggacatcatgaacaagcagtaccagcagctggagagcagactggacgagatcctgagcagaatcgccaaggagaccgaggagatcaaggacctggaggagcagctgaccgagggccagatcgccgccaacgaggccctgaagaaggacctggagggcgtgatcagcggcctgcaggagtacctgggcaccatcaagggccaggccacccaggcccagaacgagtgcagaaagctgagagacgagaaggagaccctgctgcagagactgaccgaggtggagcaggagagagaccagctggagatcgtggccatggacgccgagaacatgagaaaggagctggccgagctggagagcgccctgcaggagcagcacgaggtgaacgccagcctgcagcagacccagggcgacctgagcgcctacgaggccgagctggaggccagactgaacctgagagacgccgaggccaaccagctgaaggaggagctggagaaggtgaccagactgacccagctggagcagagcgccctgcaggccgagctggagaaggagagacaggccctgaagaacgccctgggcaaggcccagttcagcgaggagaaggagcaggagaacagcgagctgcacgccaagctgaagcacctgcaggacgacaacaacctgctgaagcagcagctgaaggacttccagaaccacctgaaccacgtggtggacggcctggtgagacccgaggaggtggccgccagagtggacgagctgagaagaaagctgaagctgggcaccggcgagatgaacatccacagccccagcgacgtgctgggcaagagcctggccgacctgcagaagcagttcagcgagatcctggccagaagcaagtgggagagagacgaggcccaggtgagagagagaaagctgcaggaggagatggccctgcagcaggagaagctggccaccggccaggaggagttcagacaggcctgcgagagagccctggaggccagaatgaacttcgacaagagacagcacgaggccagaatccagcagatggagaacgagatccactacctgcaggagaacctgaagagcatggaggagatccagggcctgaccgacctgcagctgcaggaggccgacgaggagaaggagagaatcctggcccagctgagagagctggagaagaagaagaagctggaggacgccaagagccaggagcaggtgttcggcctggacaaggagctgaagaagctgaagaaggccgtggccaccagcgacaagctggccaccgccgagctgaccatcgccaaggaccagctgaagagcctgcacggcaccgtgatgaagatcaaccaggagagagccgaggagctgcaggaggccgagagattcagcagaaaggccgcccaggccgccagagacctgaccagagccgaggccgagatcgagctgctgcagaacctgctgagacagaagggcgagcagttcagactggagatggagaagaccggcgtgggcaccggcgccaacagccaggtgctggagatcgagaagctgaacgagaccatggagagacagagaaccgagatcgccagactgcagaacgtgctggacctgaccggcagcgacaacaagggcggcttcgagaacgtgctggaggagatcgccgagctgagaagagaggtgagctaccagaacgactacatcagcagcatggccgaccccttcaagagaagaggctactggtacttcatgccccccccccccagcagcaaggtgagcagccacagcagccaggccaccaaggacagcggcgtgggcctgaagtacagcgccagcacccccgtgagaaagcccagacccggccagcaggacggcaaggagggcagccagcccccccccgccagcggctactgggtgtacagccccatcagaagcggcctgcacaagctgttccccagcagagacgccgacagcggcggcgacagccaggaggagagcgagctggacgaccaggaggagccccccttcgtgcccccccccggctacatgatgtacaccgtgctgcccgacggcagccccgtgccccagggcatggccctgtacgccccccccccccccctgcccaacaacagcagacccctgacccccggcaccgtggtgtacggccccccccccgccggcgcccccatggtgtacggcccccccccccccaacttcagcatccccttcatccccatgggcgtgctgcactgcaacgtgcccgagcaccacaacctggagaacgaggtgagcagactggaggacatcatgcagcacctgaagagcaagaagagagaggagagatggatgagagccagcaagagacagagcgagaaggagatggaggagctgcaccacaacatcgacgacctgctgcaggagaagaagagcctggagtgcgaggtggaggagctgcacagaaccgtgcagaagagacagcagcagaaggacttcatcgacggcaacgtggagagcctgatgaccgagctggagatcgagaagagcctgaagcaccacgaggacatcgtggacgagatcgagtgcatcgagaagaccctgctgaagagaagaagcgagctgagagaggccgacagactgctggccgaggccgagagcgagctgagctgcaccaaggagaagaccaagaacgccgtggagaagttcaccgacgccaagagaagcctgctgcagaccgagagcgacgccgaggagctggagagaagagcccaggagaccgccgtgaacctggtgaaggccgaccagcagctgagaagcctgcaggccgacgccaaggacctggagcagcacaagatcaagcaggaggagatcctgaaggagatcaacaagatcgtggccgccaaggacagcgacttccagtgcctgagcaagaagaaggagaagctgaccgaggagtag

SEQ ID NO: 10905 - DNA, 5322 bp, synthetic construct
  source 1..5322: mol_type = other DNA; note = Synthetic coding sequence
atgaaggcccagaagagcggcaaggagcagcagctggacatcatgaacaagcagtaccagcagctggagagcagactggacgagatcctgagcagaatcgccaaggagaccgaggagatcaaggacctggaggagcagctgaccgagggccagatcgccgccaacgaggccctgaagaaggacctggagggcgtgatcagcggcctgcaggagtacctgggcaccatcaagggccaggccacccaggcccagaacgagtgcagaaagctgagagacgagaaggagaccctgctgcagagactgaccgaggtggagcaggagagagaccagctggagatcgtggccatggacgccgagaacatgagaaaggagctggccgagctggagagcgccctgcaggagcagcacgaggtgaacgccagcctgcagcagacccagggcgacctgagcgcctacgaggccgagctggaggccagactgaacctgagagacgccgaggccaaccagctgaaggaggagctggagaaggtgaccagactgacccagctggagcagagcgccctgcaggccgagctggagaaggagagacaggccctgaagaacgccctgggcaaggcccagttcagcgaggagaaggagcaggagaacagcgagctgcacgccaagctgaagcacctgcaggacgacaacaacctgctgaagcagcagctgaaggacttccagaaccacctgaaccacgtggtggacggcctggtgagacccgaggaggtggccgccagagtggacgagctgagaagaaagctgaagctgggcaccggcgagatgaacatccacagccccagcgacgtgctgggcaagagcctggccgacctgcagaagcagttcagcgagatcctggccagaagcaagtgggagagagacgaggcccaggtgagagagagaaagctgcaggaggagatggccctgcagcaggagaagctggccaccggccaggaggagttcagacaggcctgcgagagagccctggaggccagaatgaacttcgacaagagacagcacgaggccagaatccagcagatggagaacgagatccactacctgcaggagaacctgaagagcatggaggagatccagggcctgaccgacctgcagctgcaggaggccgacgaggagaaggagagaatcctggcccagctgagagagctggagaagaagaagaagctggaggacgccaagagccaggagcaggtgttcggcctggacaaggagctgaagaagctgaagaaggccgtggccaccagcgacaagctggccaccgccgagctgaccatcgccaaggaccagctgaagagcctgcacggcaccgtgatgaagatcaaccaggagagagccgaggagctgcaggaggccgagagattcagcagaaaggccgcccaggccgccagagacctgaccagagccgaggccgagatcgagctgctgcagaacctgctgagacagaagggcgagcagttcagactggagatggagaagaccggcgtgggcaccggcgccaacagccaggtgctggagatcgagaagctgaacgagaccatggagagacagagaaccgagatcgccagactgcagaacgtgctggacctgaccggcagcgacaacaagggcggcttcgagaacgtgctggaggagatcgccgagctgagaagagaggtgagctaccagaacgactacatcagcagcatggccgaccccttcaagagaagaggctactggtacttcatgccccccccccccagcagcaaggtgagcagccacagcagccaggccaccaaggacagcggcgtgggcctgaagtacagcgccagcacccccgtgagaaagcccagacccggccagcaggacggcaaggagggcagccagcccccccccgccagcggctactgggtgtacagccccatcagaagcggcctgcacaagctgttccccagcagagacgccgacagcggcggcgacagccaggaggagagcgagctggacgaccaggaggagccccccttcgtgcccccccccggctacatgatgtacaccgtgctgcccgacggcagccccgtgccccagggcatggccctgtacgccccccccccccccctgcccaacaacagcagacccctgacccccggcaccgtggtgtacggccccccccccgccggcgcccccatggtgtacggcccccccccccccaacttcagcatccccttcatccccatgggcgtgctgcactgcaacgtgcccgagcaccacaacctggagaacgaggtgagcagactggaggacatcatgcagcacctgaagagcaagaagagagaggagagatggatgagagccagcaagagacagagcgagaaggagatggaggagctgcaccacaacatcgacgacctgctgcaggagaagaagagcctggagtgcgaggtggaggagctgcacagaaccgtgcagaagagacagcagcagaaggacttcatcgacggcaacgtggagagcctgatgaccgagctggagatcgagaagagcctgaagcaccacgaggacatcgtggacgagatcgagtgcatcgagaagaccctgctgaagagaagaagcgagctgagagaggccgacagactgctggccgaggccgagagcgagctgagctgcaccaaggagaagaccaagaacgccgtggagaagttcaccgacgccaagagaagcctgctgcagaccgagagcgacgccgaggagctggagagaagagcccaggagaccgccgtgaacctggtgaaggccgaccagcagctgagaagcctgcaggccgacgccaaggacctggagcagcacaagatcaagcaggaggagatcctgaaggagatcaacaagatcgtggccgccaaggacagcgacttccagtgcctgagcaagaagaaggagaagctgaccgaggagctgcagaagctgcagaaggacatcgagatggccgagagaaacgaggaccaccacctgcaggtgctgaaggagagcgaggtgctgctgcaggccaagagagccgagctggagaagctgaagagccaggtgaccagccagcagcaggagatggccgtgctggacagacagctgggccacaagaaggaggagctgcacctgctgcagggcagcatggtgcaggccaaggccgacctgcaggaggccctgagactgggcgagaccgaggtgaccgagaagtgcaaccacatcagagaggtgaagagcctgctggaggagctgagcttccagaagggcgagctgaacgtgcagatcagcgagagaaagacccagctgaccctgatcaagcaggagatcgagaaggaggaggagaacctgcaggtggtgctgagacagatgagcaagcacaagaccgagctgaagaacatcctggacatgctgcagctggagaaccacgagctgcagggcctgaagctgcagcacgaccagagagtgagcgagctggagaagacccaggtggccgtgctggaggagaagctggagctggagaacctgcagcagatcagccagcagcagaagggcgagatcgagtggcagaagcagctgctggagagagacaagagagagatcgagagaatgaccgccgagagcagagccctgcagagctgcgtggagtgcctgagcaaggagaaggaggacctgcaggagaagtgcgacatctgggagaagaagctggcccagaccaagagagtgctggccgccgccgaggagaacagcaagatggagcagagcaacctggagaagctggagctgaacgtgagaaagctgcagcaggagctggaccagctgaacagagacaagctgagcctgcacaacgacatcagcgccatgcagcagcagctgcaggagaagagagaggccgtgaacagcctgcaggaggagctggccaacgtgcaggaccacctgaacctggccaagcaggacctgctgcacaccaccaagcaccaggacgtgctgctgagcgagcagaccagactgcagaaggacatcagcgagtgggccaacagattcgaggactgccagaaggaggaggagaccaagcagcagcagctgcaggtgctgcagaacgagatcgaggagaacaagctgaagctggtgcagcaggagatgatgttccagagactgcagaaggagagagagagcgaggagagcaagctggagaccagcaaggtgaccctgaaggagcagcagcaccagctggagaaggagctgaccgaccagaagagcaagctggaccaggtgctgagcaaggtgctggccgccgaggagagagtgagaaccctgcaggaggaggagagatggtgcgagagcctggagaagaccctgagccagaccaagagacagctgagcgagagagagcagcagctggtggagaagagcggcgagctgctggccctgcagaaggaggccgacagcatgagagccgacttcagcctgctgagaaaccagttcctgaccgagagaaagaaggccgagaagcaggtggccagcctgaaggaggccctgaagatccagagaagccagctggagaagaacctgctggagcagaagcaggagaacagctgcatccagaaggagatggccaccatcgagctggtggcccaggacaaccacgagagagccagaagactgatgaaggagctgaaccagatgcagtacgagtacaccgagctgaagaagcagatggccaaccagaaggacctggagagaagacagatggagatcagcgacgccatgagaaccctgaagagcgaggtgaaggacgagatcagaaccagcctgaagaacctgaaccagttcctgcccgagctgcccgccgacctggaggccatcctggagagaaacgagaacctggagggcgagctggagagcctgaaggagaacctgcccttcaccatgaacgagggccccttcgaggagaagctgaacttcagccaggtgcacatcatggacgagcactggagaggcgaggccctgagagagaagctgagacacagagaggacagactgaaggcccagctgagacactgcatgagcaagcaggccgaggtgctgatcaagggcaagagacagaccgagggcaccctgcacagcctgagaagacaggtggacgccctgggcgagctggtgaccagcaccagcgccgacagcgccagcagccccagcctgagccagctggagagcagcctgaccgaggacagccagctgggccagaaccaggagaagaacgccagcgccagatag

SEQ ID NO: 10906 - DNA, 2487 bp, synthetic construct
  source 1..2487: mol_type = other DNA; note = Synthetic coding sequence
atggagaagcagaagcaggagatcgccggcaagcagaaggagatcaaggacctgcagatcgccatcgacagcctggacagcaaggaccccaagcacagccacatgaaggcccagaagagcggcaaggagcagcagctggacatcatgaacaagcagtaccagcagctggagagcagactggacgagatcctgagcagaatcgccaaggagaccgaggagatcaaggacctggaggagcagctgaccgagggccagatcgccgccaacgaggccctgaagaaggacctggagggcgtgatcagcggcctgcaggagtacctgggcaccatcaagggccaggccacccaggcccagaacgagtgcagaaagctgagagacgagaaggagaccctgctgcagagactgaccgaggtggagcaggagagagaccagctggagatcgtggccatggacgccgagaacatgagaaaggagctggccgagctggagagcgccctgcaggagcagcacgaggtgaacgccagcctgcagcagacccagggcgacctgagcgcctacgaggccgagctggaggccagactgaacctgagagacgccgaggccaaccagctgaaggaggagctggagaaggtgaccagactgacccagctggagcagagcgccctgcaggccgagctggagaaggagagacaggccctgaagaacgccctgggcaaggcccagttcagcgaggagaaggagcaggagaacagcgagctgcacgccaagctgaagcacctgcaggacgacaacaacctgctgaagcagcagctgaaggacttccagaaccacctgaaccacgtggtggacggcctggtgagacccgaggaggtggccgccagagtggacgagctgagaagaaagctgaagctgggcaccggcgagatgaacatccacagccccagcgacgtgctgggcaagagcctggccgacctgcagaagcagttcagcgagatcctggccagaagcaagtgggagagagacgaggcccaggtgagagagagaaagctgcaggaggagatggccctgcagcaggagaagctggccaccggccaggaggagttcagacaggcctgcgagagagccctggaggccagaatgaacttcgacaagagacagcacgaggccagaatccagcagatggagaacgagatccactacctgcaggagaacctgaagagcatggaggagatccagggcctgaccgacctgcagctgcaggaggccgacgaggagaaggagagaatcctggcccagctgagagagctggagaagaagaagaagctggaggacgccaagagccaggagcaggtgttcggcctggacaaggagctgaagaagctgaagaaggccgtggccaccagcgacaagctggccaccgccgagctgaccatcgccaaggaccagctgaagagcctgcacggcaccgtgatgaagatcaaccaggagagagccgaggagctgcaggaggccgagagattcagcagaaaggccgcccaggccgccagagacctgaccagagccgaggccgagatcgagctgctgcagaacctgctgagacagaagggcgagcagttcagactggagatggagaagaccggcgtgggcaccggcgccaacagccaggtgctggagatcgagaagctgaacgagaccatggagagacagagaaccgagatcgccagactgcagaacgtgctggacctgaccggcagcgacaacaagggcggcttcgagaacgtgctggaggagatcgccgagctgagaagagaggtgagctaccagaacgactacatcagcagcatggccgaccccttcaagagaagaggctactggtacttcatgccccccccccccagcagcaaggtgagcagccacagcagccaggccaccaaggacagcggcgtgggcctgaagtacagcgccagcacccccgtgagaaagcccagacccggccagcaggacggcaaggagggcagccagcccccccccgccagcggctactgggtgtacagccccatcagaagcggcctgcacaagctgttccccagcagagacgccgacagcggcggcgacagccaggaggagagcgagctggacgaccaggaggagccccccttcgtgcccccccccggctacatgatgtacaccgtgctgcccgacggcagccccgtgccccagggcatggccctgtacgccccccccccccccctgcccaacaacagcagacccctgacccccggcaccgtggtgtacggccccccccccgccggcgcccccatggtgtacggcccccccccccccaacttcagcatccccttcatccccatgggcgtgctgcactgcaacgtgcccgagcaccacaacctggtgagcggcaagacctacaacagcctgagcaccctgctgccctgggtgaccgacaaggtgatctacctgatgagctag

SEQ ID NO: 10907 - DNA, 6978 bp, synthetic construct; identical to SEQ ID NO: 9286
  source 1..6978: mol_type = other DNA; note = Synthetic coding sequence

SEQ ID NO: 10908 - DNA, 1359 bp, synthetic construct
  source 1..1359: mol_type = other DNA; note = Synthetic coding sequence
atgaagaagggcagccagcagaagatcttcagcaaggccaagatccccagcagcagccacagccccatccccagcagcatgagcaacatgagaagcagaagcctgagccccctgatcggcagcgagaccctgcccttccacagcggcggccagtggtgcgagcaggtggagatcgccgacgagaacaacatgctgctggactaccaggaccacaagggcgccgacagccacgccggcgtgagatacatcaccgaggccctgatcaagaagctgaccaagcaggacaacctggccctgatcaagagcctgaacctgagcctgagcaaggacggcggcaagaagttcaagtacatcgagaacctggagaagtgcgtgaagctggaggtgctgaacctgagctacaacctgatcggcaagatcgagaagctggacaagctgctgaagctgagagagctgaacctgagctacaacaagatcagcaagatcgagggcatcgagaacatgtgcaacctgcagaagctgaacctggccggcaacgagatcgagcacatccccgtgtggctgggcaagaagctgaagagcctgagagtgctgaacctgaagggcaacaagatcagcagcctgcaggacatcagcaagctgaagcccctgcaggacctgatcagcctgatcctggtggagaaccccgtggtgaccctgccccactacctgcagttcaccatcttccacctgagaagcctggagagcctggagggccagcccgtgaccacccaggacagacaggaggccttcgagagattcagcctggaggaggtggagagactggagagagacctggagaagaagatgatcgagaccgaggagctgaagagcaagcagaccagattcctggaggagatcaagaaccaggacaagctgaacaagagcctgaaggaggaggccatgctgcagaagcagagctgcgaggagctgaagagcgacctgaacaccaagaacgagctgctgaagcagaagaccatcgagctgaccagagcctgccagaagcagtacgagctggagcaggagctggccttctacaagatcgacgccaagttcgagcccctgaactactaccccagcgagtacgccgagatcgacaaggcccccgacgagagcccctacatcggcaagagcagatacaagagaaacatgttcgccaccgagagctacatcatcgacagcgcccaggccgtgcagatcaagaagatggagcccgacgagcagctgagaaacgaccacatgaacctgagaggccacacccccctggacacccagctggaggaccacaagctggactaccagaactgcatgatgaagtag

SEQ ID NO: 10909 - DNA, 1053 bp, synthetic construct
  source 1..1053: mol_type = other DNA; note = Synthetic coding sequence
atgtgctgcgacagcgacttcgtggccagaaacaagagccaggacagcggcatcgccgagatggaggagctgcccgtgccccacaacatcaagatcagcaacatcacctgcgacagcttcaagatcagctgggagatggacagcaagagcaaggacagaatcacccactacttcatcgacctgaacaagaaggagaacaagaacagcaacaagttcaagcacaaggacgtgcccaccaagctggtggccaaggccgtgcccctgcccatgaccgtgagaggccactggttcctgagccccagaaccgagtacaccgtggccgtgcagaccgccagcaagcaggtggacggcgactacgtggtgagcgagtggagcgagatcatcgagttctgcaccgccgactacagcaaggtgcacctgacccagctgctggagaaggccgaggtgatcgccggcagaatgctgaagttcagcgtgttctacagaaaccagcacaaggagtacttcgactacgtgagagagcaccacggcaacgccatgcagcccagcgtgaaggacaacagcggcagccacggcagccccatcagcggcaagctggagggcatcttcttcagctgcagcaccgagttcaacaccggcaagcccccccaggacagcccctacggcagatacagattcgagatcgccgccgagaagctgttcaaccccaacaccaacctgtacttcggcgacttctactgcatgtacaccgcctaccactacgtgatcctggtgatcgcccccgtgggcagccccggcgacgagttctgcaagcagagactgccccagctgaacagcaaggacaacaagttcctgacctgcaccgaggaggacggcgtgctggtgtaccaccacgcccaggacgtgatcctggaggtgatctacaccgaccccgtggacctgagcgtgggcaccgtggccgagatcaccggccaccagctgatgagcctgagcaccgccaacgccaagaaggaccccagctgcaagacctgcaacatcagcgtgggcagatag

SEQ ID NO: 10910 - DNA, 1131 bp, synthetic construct
  source 1..1131: mol_type = other DNA; note = Synthetic coding sequence
atggaggtgcccagactggaccacgccctgaacagccccaccagcccctgcgaggaggtgatcaagaacctgagcctggaggccatccagctgtgcgacagagacggcaacaagagccaggacagcggcatcgccgagatggaggagctgcccgtgccccacaacatcaagatcagcaacatcacctgcgacagcttcaagatcagctgggagatggacagcaagagcaaggacagaatcacccactacttcatcgacctgaacaagaaggagaacaagaacagcaacaagttcaagcacaaggacgtgcccaccaagctggtggccaaggccgtgcccctgcccatgaccgtgagaggccactggttcctgagccccagaaccgagtacaccgtggccgtgcagaccgccagcaagcaggtggacggcgactacgtggtgagcgagtggagcgagatcatcgagttctgcaccgccgactacagcaaggtgcacctgacccagctgctggagaaggccgaggtgatcgccggcagaatgctgaagttcagcgtgttctacagaaaccagcacaaggagtacttcgactacgtgagagagcaccacggcaacgccatgcagcccagcgtgaaggacaacagcggcagccacggcagccccatcagcggcaagctggagggcatcttcttcagctgcagcaccgagttcaacaccggcaagcccccccaggacagcccctacggcagatacagattcgagatcgccgccgagaagctgttcaaccccaacaccaacctgtacttcggcgacttctactgcatgtacaccgcctaccactacgtgatcctggtgatcgcccccgtgggcagccccggcgacgagttctgcaagcagagactgccccagctgaacagcaaggacaacaagttcctgacctgcaccgaggaggacggcgtgctggtgtaccaccacgcccaggacgtgatcctggaggtgatctacaccgaccccgtggacctgagcgtgggcaccgtggccgagatcaccggccaccagctgatgagcctgagcaccgccaacgccaagaaggaccccagctgcaagacctgcaacatcagcgtgggcagatag

SEQ ID NO: 10911 - DNA, 1263 bp, synthetic construct; identical to SEQ ID NO: 9866
  source 1..1263: mol_type = other DNA; note = Synthetic coding sequence

SEQ ID NO: 10912 - DNA, 411 bp, synthetic construct
  source 1..411: mol_type = other DNA; note = Synthetic coding sequence
gaccccctgagctggctgagcggcccctggggccaggtgcccgccggcatctgcccccccagacacagaggctggtaccacttcagagaccagatcctggccggcagccccgaggccttcttcgtgctgaacgccgacgtgtgcagcgacttccccctgagcgccatgctggaggcccacagaagacagagacaccccttcctgctgctgggcaccaccgccaacagaacccagagcctgaactacggctgcatcgtggagaacccccagacccacgaggtgctgcactacgtggagaagcccagcaccttcatcagcgacatcatcaactgcggcatctacctgttcagccccgaggccctgaagcccctgagagacgtgttccagagaaaccagcaggacggccagtag

SEQ ID NO: 10913 - DNA, 1365 bp, synthetic construct
  source 1..1365: mol_type = other DNA; note = Synthetic coding sequence
atggagagaaaggacttcgagacctggctggacaacatcagcgtgaccttcctgagcctgaccgacctgcagaagaacgagaccctggaccacctgatcagcctgagcggcgccgtgcagctgagacacctgagcaacaacctggagaccctgctgaagagagacttcctgaagctgctgcccctggagctgagcttctacctgctgaagtggctggacccccagaccctgctgacctgctgcctggtgagcaagcagtggaacaaggtgatcagcgcctgcaccgaggtgtggcagaccgcctgcaagaacctgggctggcagatcgacgacagcgtgcaggacgccctgcactggaagaaggtgtacctgaaggccatcctgagaatgaagcagctggaggaccacgaggccttcgagaccagcagcctgatcggccacagcgccagagtgtacgccctgtactacaaggacggcctgctgtgcaccggcagcgacgacctgagcgccaagctgtgggacgtgagcaccggccagtgcgtgtacggcatccagacccacacctgcgccgccgtgaagttcgacgagcagaagctggtgaccggcagcttcgacaacaccgtggcctgctgggagtggagcagcggcgccagaacccagcacttcagaggccacaccggcgccgtgttcagcgtggactacaacgacgagctggacatcctggtgagcggcagcgccgacttcaccgtgaaggtgtgggccctgagcgccggcacctgcctgaacaccctgaccggccacaccgagtgggtgaccaaggtggtgctgcagaagtgcaaggtgaagagcctgctgcacagccccggcgactacatcctgctgagcgccgacaagtacgagatcaagatctggcccatcggcagagagatcaactgcaagtgcctgaagaccctgagcgtgagcgaggacagaagcatctgcctgcagcccagactgcacttcgacggcaagtacatcgtgtgcagcagcgccctgggcctgtaccagtgggacttcgccagctacgacatcctgagagtgatcaagacccccgagatcgccaacctggccctgctgggcttcggcgacatcttcgccctgctgttcgacaacagatacctgtacatcatggacctgagaaccgagagcctgatcagcagatggcccctgcccgagtacagaaagagcaagagaggcagcagcttcctggccggcgaggccagctggctgaacggcctggacggccacaacgacaccggcctggtgttcgccaccagcatgcccgaccacagcatccacctggtgctgtggaaggagcacggctag

SEQ ID NO: 10914 - DNA, 372 bp, synthetic construct
  source 1..372: mol_type = other DNA; note = Synthetic coding sequence
atggaggccgccgagaccgaggccgaggccgccgccctggaggtgctggccgaggtggccggcatcctggagcccgtgggcctgcaggaggaggccgagctgcccgccaagatcctggtggagttcgtggtggacagccagaagaaggacaagctgctgtgcagccagctgcaggtggccgacttcctgcagaacatcctggcccaggagagaccctggtgcgtgctgcagggctgctggagcaccacctgctggagatgcaagttcgccatgaccagctggagaaccgccgcctggagaaagatcctggagaaggccagcgacttcccccacctgcccaccatcatcaccggcaagaccgtgaacagctag

SEQ ID NO: 10915 - DNA, 834 bp, synthetic construct
  source 1..834: mol_type = other DNA; note = Synthetic coding sequence
atggaggccgccgagaccgaggccgaggccgccgccctggaggtgctggccgaggtggccggcatcctggagcccgtgggcctgcaggaggaggccgagctgcccgccaagatcctggtggagttcgtggtggacagccagaagaaggacaagctgctgtgcagccagctgcaggtggccgacttcctgcagaacatcctggcccaggaggacaccgccaagggcctggaccccctggccagcgaggacaccagcagacagaaggccatcgccgccaaggagcagtggaaggagctgaaggccacctacagagagcacgtggaggccatcaagatcggcctgaccaaggccctgacccagatggaggaggcccagagaaagagaacccagctgagagaggccttcgagcagctgcaggccaagaagcagatggccatggagaagagaagagccgtgcagaaccagtggcagctgcagcaggagaagcacctgcagcacctggccgaggtgagcgccgaggtgagagagagaaagaccggcacccagcaggagctggacagagtgttccagaagctgggcaacctgaagcagcaggccgagcaggagagagacaagctgcagagataccagaccttcctgcagctgctgtacaccctgcagggcaagctgctgttccccgaggccgaggccgaggccgagaacctgcccgacgacaagccccagcagcccaccagaccccaggagcagagcaccggcgacaccatgggcagagaccccggcgtgagcttcaaggccgtgggcctgcagcccgccggcgacgtgaacctgccctag

SEQ ID NO: 10916 - DNA, 1713 bp, synthetic construct
  source 1..1713: mol_type = other DNA; note = Synthetic coding sequence
atgagcagcatcggcgagggcatcgacttcagccaggagagacagaagatcagcggcctgagaaccctggagcagagcgtgggcgagtggctggagagcatcggcctgcagcagtacgagagcaagctgctgctgaacggcttcgacgacgtgcacttcctgggcagcaacgtgatggaggagcaggacctgagagacatcggcatcagcgacccccagcacagaagaaagctgctgcaggccgccagaagcctgcccaaggtgaaggccctgggctacgacggcaacagcccccccagcgtgcccagctggctggacagcctgggcctgcaggactacgtgcacagcttcctgagcagcggctacagcagcatcgacaccgtgaagaacctgtgggagctggagctggtgaacgtgctgaaggtgcagctgctgggccacagaaagagaatcatcgccagcctggccgacagaccctacgaggagcccccccagaagccccccagattcagccagctgagatgccaggacctgctgagccagaccagcagccccctgagccagaacgacagctgcaccggcagaagcgccgacctgctgctgccccccggcgacaccggcagaagaagacacgacagcctgcacgaccccgccgcccccagcagagccgagagattcagaatccaggaggagcacagagaggccaagctgaccctgagaccccccagcctggccgccccctacgcccccgtgcagagctggcagcaccagcccgagaagctgatcttcgagagctgcggctacgaggccaactacctgggcagcatgctgatcaaggacctgagaggcaccgagagcacccaggacgcctgcgccaagatgagaaagagcaccgagcacatgaagaagatccccaccatcatcctgagcatcacctacaagggcgtgaagttcatcgacgccagcaacaagaacgtgatcgccgagcacgagatcagaaacatcagctgcgccgcccaggaccccgaggacctgtgcaccttcgcctacatcaccaaggacctgcagaccagccaccactactgccacgtgttcagcaccgtggacgtgaacctgacctacgagatcatcctgaccctgggccaggccttcgaggtggcctaccagctggccctgcaggcccagaagagcagagccaccggcgccagcgccgccgagatgatcgagaccaagagcagcaagcccgtgcccaagcccagagtgggcgtgagaaagagcgccgtgcccctgccccccgacagcagatgctgctactgccacacctgcaccacccacagacccagctacctgcccctgcccagcgtgagccccggcgtgaagctggagccccccgacatggaccaggacgcccagagccacgccagcgtgagctgggtggtggaccccaagcccgacagcaagagaagcctgagcaccaaccacaccagactggagctggtgtgctgcagccagcccgagaacgagctggtgagcaccatcagcggcgacaagcccaagagcttcctggagcccctgctgttcgtgatgcccaccaccgcctacaaccacaactgccccgagtggagaagccagaaggacggcggctgcagcaccagcgagtgcccccaccacctgtgcctggagaagcccggcgtgctgagcctggagatgtag

SEQ ID NO: 10917 - DNA, 1785 bp, synthetic construct; identical to SEQ ID NO: 9584
  source 1..1785: mol_type = other DNA; note = Synthetic coding sequence

SEQ ID NO: 10918 - DNA, 1785 bp, synthetic construct
  source 1..1785: mol_type = other DNA; note = Synthetic coding sequence
atggaggccgtgtgcctgggcacctgccccgagcccgaggccagcatgagcaccgccatccccggcctgaagaagggcaacaacgccctgcagagcatcatcctgcagaccctgctggagaaggagaacggccagagaaagtacggcggccccccccccggctgggacgccgccccccccgagagaggctgcgagatcttcatcggcaagctgcccagagacctgttcgaggacgagctgatccccctgtgcgagaagatcggcaagatctacgagatgagaatgatgatggacttcaacggcaacaacagaggctacgccttcgtgaccttcagcaacaaggtggaggccaagaacgccatcaagcagctgaacaactacgagatcagaaacggcagactgctgggcgtgtgcgccagcgtggacaactgcagactgttcgtgggcggcatccccaagaccaagaagagagaggagatcctgagcgagatgaagaaggtgaccgagggcgtggtggacgtgatcgtgtaccccagcgccgccgacaagaccaagaacagaggcttcgccttcgtggagtacgagagccacagagccgccgccatggccagaagaaagctgctgcccggcagaatccagctgtggggccacggcatcgccgtggactgggccgagcccgaggtggaggtggacgaggacaccatgagcagcgtgaagatcctgtacgtgagaaacctgatgctgagcaccagcgaggagatgatcgagaaggagttcaacaacatcaagcccggcgccgtggagagagtgaagaagatcagagactacgccttcgtgcacttcagcaacagagaggacgccgtggaggccatgaaggccctgaacggcaaggtgctggacggcagccccatcgaggtgaccctggccaagcccgtggacaaggacagctacgtgagatacaccagaggcaccggcggcagaggcaccatgctgcagggcgagtacacctacagcctgggccaggtgtacgaccccaccaccacctacctgggcgcccccgtgttctacgccccccagacctacgccgccatccccagcctgcacttccccgccaccaagggccacctgagcaacagagccatcatcagagcccccagcgtgagaggcgccgccggcgtgagaggcctgggcggcagaggctacctggcctacaccggcctgggcagaggctaccaggtgaagggcgacaagagagaggacaagctgtacgacatcctgcccggcatggagctgacccccatgaaccccgtgaccctgaagccccagggcatcaagctggccccccagatcctggaggagatctgccagaagaacaactggggccagcccgtgtaccagctgcacagcgccatcggccaggaccagagacagctgttcctgtacaagatcaccatccccgccctggccagccagaaccccgccatccaccccttcaccccccccaagctgagcgccttcgtggacgaggccaagacctacgccgccgagtacaccctgcagaccctgggcatccccaccgacggcggcgacggcaccatggccaccgccgccgccgccgccaccgccttccccggctacgccgtgcccaacgccaccgcccccgtgagcgccgcccagctgaagcaggccgtgaccctgggccaggacctggccgcctacaccacctacgaggtgtaccccaccttcgccgtgaccgccagaggcgacggctacggcaccttctag

SEQ ID NO: 10919 - DNA, 1761 bp, synthetic construct
  source 1..1761: mol_type = other DNA; note = Synthetic coding sequence
atggagagcaaccacaagagcggcgacggcctgagcggcacccagaaggaggccgccctgagagccctggtgcagagaaccggctacagcctggtgcaggagaacggccagagaaagtacggcggccccccccccggctgggacgccgccccccccgagagaggctgcgagatcttcatcggcaagctgcccagagacctgttcgaggacgagctgatccccctgtgcgagaagatcggcaagatctacgagatgagaatgatgatggacttcaacggcaacaacagaggctacgccttcgtgaccttcagcaacaaggtggaggccaagaacgccatcaagcagctgaacaactacgagatcagaaacggcagactgctgggcgtgtgcgccagcgtggacaactgcagactgttcgtgggcggcatccccaagaccaagaagagagaggagatcctgagcgagatgaagaaggtgaccgagggcgtggtggacgtgatcgtgtaccccagcgccgccgacaagaccaagaacagaggcttcgccttcgtggagtacgagagccacagagccgccgccatggccagaagaaagctgctgcccggcagaatccagctgtggggccacggcatcgccgtggactgggccgagcccgaggtggaggtggacgaggacaccatgagcagcgtgaagatcctgtacgtgagaaacctgatgctgagcaccagcgaggagatgatcgagaaggagttcaacaacatcaagcccggcgccgtggagagagtgaagaagatcagagactacgccttcgtgcacttcagcaacagagaggacgccgtggaggccatgaaggccctgaacggcaaggtgctggacggcagccccatcgaggtgaccctggccaagcccgtggacaaggacagctacgtgagatacaccagaggcaccggcggcagaggcaccatgctgcagggcgagtacacctacagcctgggccaggtgtacgaccccaccaccacctacctgggcgcccccgtgttctacgccccccagacctacgccgccatccccagcctgcacttccccgccaccaagggccacctgagcaacagagccatcatcagagcccccagcgtgagaggcgccgccggcgtgagaggcctgggcggcagaggctacctggcctacaccggcctgggcagaggctaccaggtgaagggcgacaagagagaggacaagctgtacgacatcctgcccggcatggagctgacccccatgaaccccgtgaccctgaagccccagggcatcaagctggccccccagatcctggaggagatctgccagaagaacaactggggccagcccgtgtaccagctgcacagcgccatcggccaggaccagagacagctgttcctgtacaagatcaccatccccgccctggccagccagaaccccgccatccaccccttcaccccccccaagctgagcgccttcgtggacgaggccaagacctacgccgccgagtacaccctgcagaccctgggcatccccaccgacggcggcgacggcaccatggccaccgccgccgccgccgccaccgccttccccggctacgccgtgcccaacgccaccgcccccgtgagcgccgcccagctgaagcaggccgtgaccctgggccaggacctggccgcctacaccacctacgaggtgtaccccaccttcgccgtgaccgccagaggcgacggctacggcaccttctag

SEQ ID NO: 10920 - DNA, 1761 bp, synthetic construct; identical to SEQ ID NO: 10919
  source 1..1761: mol_type = other DNA; note = Synthetic coding sequence

SEQ ID NO: 10921 - DNA, 1542 bp, synthetic construct
  source 1..1542: mol_type = other DNA; note = Synthetic coding sequence
atgcagagaaccttcgcctggctgctggacagagtgcagcacctgggcgcccccgtgaccctgagagccagctacctggagatctacaacgagcaggtgagagacctgctgagcctgggcagccccagacccctgcccgtgagatggaacaagaccagaggcttctacgtggagcagctgagagtggtggagttcggcagcctggaggccctgatggagctgctgcagaccggcctgagcagaagaagaaacagcgcccacaccctgaaccaggccagcagcagaagccacgccctgctgaccctgtacatcagcagacagaccgcccagcagatgcccagcgtggaccccggcgagccccccgtgggcggcaagctgtgcttcgtggacctggccggcagcgagaaggtggccgccaccggcagcagaggcgagctgatgctggaggccaacagcatcaacagaagcctgctggccctgggccactgcatcagcctgctgctggacccccagagaaagcagagccacatccccttcagagacagcaagctgaccaagctgctggccgacagcctgggcggcagaggcgtgaccctgatggtggcctgcgtgagccccagcgcccagtgcctgcccgagaccctgagcaccctgagatacgccagcagagcccagagagtgaccaccagaccccaggcccccaagagccccgtggccaagcagccccagagactggagaccgagatgctgcagctgcaggaggagaacagaagactgcagttccagctggaccagatggactgcaaggccagcggcctgagcggcgccagagtggcctgggcccagagaaacctgtacggcatgctgcaggagttcatgctggagaacgagagactgagaaaggagaagagccagctgcagaacagcagagacctggcccagaacgagcagagaatcctggcccagcaggtgcacgccctggagagaagactgctgagcgcctgctaccaccaccagcagggccccggcctgacccccccctgcccctgcctgatggcccccgcccccccctgccacgccctgccccccctgtacagctgcccctgctgccacatctgccccctgtgcagagtgcccctggcccactgggcctgcctgcccggcgagcaccacctgccccaggtgctggaccccgaggccagcggcggcagaccccccagcgccagaccccccccctgggcccccccctgcagccccggcagcgccaagtgccccagagagagaagccacagcgactggacccagaccagagtgctggccgagatgctgaccgaggaggaggtggtgcccagcgccccccccctgcccgtgagaccccccaagaccagccccggcctgagaggcggcgccggcgtgcccaacctggcccagagactggaggccctgagagaccagatcggcagcagcctgagaagaggcagaagccagcccccctgcagcgagggcgccagaagccccggccaggtgctgcccccccactag

SEQ ID NO: 10922 - DNA, 786 bp, synthetic construct
  source 1..786: mol_type = other DNA; note = Synthetic coding sequence
atggtgaagggcgagaagggccccaagggcaagaagatcaccctgaaggtggccagaaactgcatcaagatcaccttcgacggcaagaagagactggacctgagcaagatgggcatcaccaccttccccaagtgcatcctgagactgagcgacatggacgagctggacctgagcagaaacctgatcagaaagatccccgacagcatcagcaagttccagaacctgagatggctggacctgcacagcaactacatcgacaagctgcccgagagcatcggccagatgaccagcctgctgtacctgaacgtgagcaacaacagactgaccagcaacggcctgcccgtggagctgaagcagctgaagaacatcagagccgtgaacctgggcctgaaccacctggacagcgtgcccaccaccctgggcgccctgaaggagctgcacgaggtgggcctgcacgacaacctgctgaacaacatccccgtgagcatcagcaagctgcccaagctgaagaagctgaacatcaagagaaaccccttccccaagcccggcgagagcgagatcttcatcgacagcatcagaagactggagaacctgtacgtggtggaggagaaggacctgtgcgccgcctgcctgagaaagtgccagaacgccagagacaacctgaacagaatcaagaacatggccaccaccacccccagaaagaccatcttccccaacctgatcagccccaacagcatggccaaggacagctgggaggactggagaatcagactgaccagcagctag

SEQ ID NO: 10923 - DNA, 1770 bp, synthetic construct
  source 1..1770: mol_type = other DNA; note = Synthetic coding sequence
atggccagcagccagagagacatggaggactgggtgcaggccatcagaagagtgatctgggcccccctgggcggcggcaccgccagaagaagccacgcccaccccctggagcccctgccccccggcatcttcggccagagactggaggagaccgtgcaccacgagagaaagtacggccccagactggcccccctgctggtggagcagtgcgtggacttcatcagagagagaggcctgaccgaggagggcctgttcagaatgcccggccaggccaacctggtgagagacctgcaggacagcttcgactgcggcgagaagcccctgttcgacagcaccaccgacgtgcacaccgtggccagcctgctgaagctgtacctgagagagctgcccgagcccgtggtgcccttcgccagatacgaggacttcctgagctgcgcccagctgctgaccaaggacgagggcgagggcaccctggagctggccaagcaggtgagcaacctgccccaggccaactacaacctgctgagatacatctgcaagttcctggacgaggtgcaggcctacagcaacgtgaacaagatgagcgtgcagaacctggccaccgtgttcggccccaacatcctgagaccccaggtggaggaccccgtgaccatcatggagggcaccagcctggtgcagcacctgatgaccgtgctgatcagaaagcacagccagctgttcaccgcccccgtgcccgagggccccaccagccccagaggcggcctgcagtgcgccgtgggctggggcagcgaggaggtgaccagagacagccagggcgagcccggcggccccggcctgcccgcccacagaaccagcagcctggacggcgccgccgtggccgtgctgagcagaaccgcccccaccggccccggcagcagatgcagccccggcaagaaggtgcagaccctgcccagctggaagagcagcttcagacagcccagaagcctgagcggcagccccaagggcggcggcagcagcctggaggtgcccatcatcagcagcggcggcaactggctgatgaacggcctgagcagcctgagaggccacagaagagccagcagcggcgacagactgaaggacagcggcagcgtgcagagactgagcacctacgacaacgtgcccgcccccggcctggtgcccggcatccccagcgtggccagcatggcctggagcggcgccagcagcagcgagagcagcgtgggcggcagcctgagcagctgcaccgcctgcagagccagcgacagcagcgccagaagcagcctgcacaccgactgggccctggagcccagccccctgcccagcagcagcgaggaccccaagagcctggacctggaccacagcatggacgaggccggcgccggcgccagcaacagcgagcccagcgagcccgacagccccaccagagagcacgccagaagaagcgaggccctgcagggcctggtgaccgagctgagagccgagctgtgcagacagagaaccgagtacgagagaagcgtgaagagaatcgaggagggcagcgccgacctgagaaagagaatgagcagactggaggaggagctggaccaggagaagaagaagtacatcatgctggagatcaagctgagaaacagcgagagagccagagaggacgccgagagaagaaaccagctgctgcagagagagatggaggagttcttcagcaccctgggcagcctgaccgtgggcgccaagggcgccagagcccccaagtag

SEQ ID NO: 10924 - DNA, 1209 bp, synthetic construct
  source 1..1209: mol_type = other DNA; note = Synthetic coding sequence
atgagcgccgagggcgccgagcccggccccggcagcggcagcggccccggccccggccccctgtgccccgagcacggccaggccctgagctggttctgcggcagcgagagaagacccgtgtgcgccgcctgcgccggcctgggcggcagatgcagaggccacagaatcagaagagccgaggagagagccgaggagctgagaaacaagatcgtggaccagtgcgagagactgcagctgcagagcgccgccatcaccaagtacgtggccgacgtgctgcccggcaagaaccagagagccgtgagcatggccagcgccgccagagagctggtgatccagagactgagcctggtgagaagcctgtgcgagagcgaggagcagagactgctggagcaggtgcacggcgaggaggagagagcccaccagagcatcctgacccagagagtgcactgggccgaggccctgcagaagctggacaccatcagaaccggcctggtgggcatgctgacccacctggacgacctgcagctgatccagaaggagcaggagatcttcgagagaaccgaggaggccgagggcatcctggacccccaggagagcgagatgctgaacttcaacgagaagtgcaccagaagccccctgctgacccagctgtgggccaccgccgtgctgggcagcctgagcggcaccgaggacatcagaatcgacgagagaaccgtgagccccttcctgcagctgagcgacgacagaaagaccctgaccttcagcaccaagaagagcaaggcctgcgccgacggccccgagagattcgaccactggcccaacgccctggccgccaccagcttccagaacggcctgcacgcctggatggtgaacgtgcagaacagctgcgcctacaaggtgggcgtggccagcggccacctgcccagaaagggcagcggcagcgactgcagactgggccacaacgccttcagctgggtgttcagcagatacgaccaggagttcagattcagccacaacggccagcacgagcccctgggcctgctgagaggccccgcccagctgggcgtggtgctggacctgcaggtgcaggagctgctgttctacgagcccgccagcggcaccgtgctgtgcgcccaccacgtgagcttccccggccccctgttccccgtgttcgccgtggccgaccagaccatcagcatcgtgagatag

SEQ ID NO: 10925 - DNA, 258 bp, synthetic construct
  source 1..258: mol_type = other DNA; note = Synthetic coding sequence
atgctgagaagaaagcccaccagactggagctgaagctggacgacatcgaggagttcgagaacatcagaaaggacctggagaccagaaagaagcagaaggaggacgtggaggtggtgggcggcagcgacggcgagggcgccatcggcctgagcagcgaccccaagagcagagagcagatgatcaacgacagaatcggctacaagccccagcccaagcccaacaacagaagcagccagttcggcagcctggagttctag

SEQ ID NO: 10926 - DNA, 744 bp, synthetic construct
  source 1..744: mol_type = other DNA; note = Synthetic coding sequence
atgctgagcgacggctgcggcagcgaggagaagatcagcgtgcccagctgctacggcggcatcggcgcccccgtgagcagacaggtgcccgccagccacgacagcgagctgatggccttcatgaccagaaagctgtgggacctggagcagcaggtgaaggcccagaccgacgagatcctgagcaaggaccagaagatcgccgccctggaggacctggtgcagaccctgagaccccaccccgccgaggccaccctgcagagacaggaggagctggagaccatgtgcgtgcagctgcagagacaggtgagagagatggagagattcctgagcgactacggcctgcagtgggtgggcgagcccatggaccaggaggacagcgagagcaagaccgtgagcgagcacggcgagagagactggatgaccgccaagaagttctggaagcccggcgacagcctggccccccccgaggtggacttcgacagactgctggccagcctgcaggacctgagcgagctggtggtggagggcgacacccaggtgacccccgtgcccggcggcgccagactgagaaccctggagcccatccccctgaagctgtacagaaacggcatcatgatgttcgacggccccttccagcccttctacgaccccagcacccagagatgcctgagagacatcctggacggcttcttccccagcgagctgcagagactgtaccccaacggcgtgcccttcaaggtgtag

SEQ ID NO: 10927 - DNA, 1464 bp, synthetic construct; identical to SEQ ID NO: 10432
  source 1..1464: mol_type = other DNA; note = Synthetic coding sequence

SEQ ID NO: 10928 - DNA, 1020 bp, synthetic construct; identical to SEQ ID NO: 10066
  source 1..1020: mol_type = other DNA; note = Synthetic coding sequence

SEQ ID NO: 10929 - DNA, 1563 bp, synthetic construct
  source 1..1563: mol_type = other DNA; note = Synthetic coding sequence
atgagcagccccctggccagcctgagcaagaccagaaaggtgcccctgcccagcgagcccatgaaccccggcagaagaggcatcagaatctacggcgacgaggacgaggtggacatgctgagcgacggctgcggcagcgaggagaagatcagcgtgcccagctgctacggcggcatcggcgcccccgtgagcagacaggtgcccgccagccacgacagcgagctgatggccttcatgaccagaaagctgtgggacctggagcagcaggtgaaggcccagaccgacgagatcctgagcaaggaccagaagatcgccgccctggaggacctggtgcagaccctgagaccccaccccgccgaggccaccctgcagagacaggaggagctggagaccatgtgcgtgcagctgcagagacaggtgagagagatggagagattcctgagcgactacggcctgcagtgggtgggcgagcccatggaccaggaggacagcgagagcaagaccgtgagcgagcacggcgagagagactggatgaccgccaagaagttctggaagcccggcgacagcctggccccccccgaggtggacttcgacagactgctggccagcctgcaggacctgagcgagctggtggtggagggcgacacccaggtgacccccgtgcccggcggcgccagactgagaaccctggagcccatccccctgaagctgtacagaaacggcatcatgatgttcgacggccccttccagcccttctacgaccccagcacccagagatgcctgagagacatcctggacggcttcttccccagcgagctgcagagactgtaccccaacggcgtgcccttcaaggtgagcgacctgagaaaccaggtgtacctggaggacggcctggaccccttccccggcgagggcagagtggtgggcagacagctgatgcacaaggccctggacagagtggaggagcaccccggcagcagaatgaccgccgagaagttcctgaacagactgcccaagttcgtgatcagacagggcgaggtgatcgacatcagaggccccatcagagacaccctgcagaactgctgccccctgcccgccagaatccaggagatcgtggtggagacccccaccctggccgccgagagagagagaagccaggagagccccaacacccccgccccccccctgagcatgctgagaatcaagagcgagaacggcgagcaggccttcctgctgatgatgcagcccgacaacaccatcggcgacgtgagagccctgctggcccaggccagagtgatggacgccagcgccttcgagatcttcagcaccttcccccccaccctgtaccaggacgacaccctgaccctgcaggccgccggcctggtgcccaaggccgccctgctgctgagagccagaagagcccccaagagcagcctgaagttcagccccggcccctgccccggccccggccccggccccagccccggccccggccccggccccagccccggccccggccccggccccagcccctgccccggccccagccccagcccccagtag

SEQ ID NO: 10930 - DNA, 1563 bp, synthetic construct; identical to SEQ ID NO: 10929
  source 1..1563: mol_type = other DNA; note = Synthetic coding sequence

SEQ ID NO: 10931 - DNA, 834 bp, synthetic construct
  source 1..834: mol_type = other DNA; note = Synthetic coding sequence
atgttcgacggccccttccagcccttctacgaccccagcacccagagatgcctgagagacatcctggacggcttcttccccagcgagctgcagagactgtaccccaacggcgtgcccttcaaggtgagcgacctgagaaaccaggtgtacctggaggacggcctggaccccttccccggcgagggcagagtggtgggcagacagctgatgcacaaggccctggacagagtggaggagcaccccggcagcagaatgaccgccgagaagttcctgaacagactgcccaagttcgtgatcagacagggcgaggtgatcgacatcagaggccccatcagagacaccctgcagaactgctgccccctgcccgccagaatccaggagatcgtggtggagacccccaccctggccgccgagagagagagaagccaggagagccccaacacccccgccccccccctgagcatgctgagaatcaagagcgagaacggcgagcaggccttcctgctgatgatgcagcccgacaacaccatcggcgacgtgagagccctgctggcccaggccagagtgatggacgccagcgccttcgagatcttcagcaccttcccccccaccctgtaccaggacgacaccctgaccctgcaggccgccggcctggtgcccaaggccgccctgctgctgagagccagaagagcccccaagagcagcctgaagttcagccccggcccctgccccggccccggccccggccccagccccggccccggccccggccccagccccggccccggccccggccccagcccctgccccggccccagccccagcccccagtag

SEQ ID NO: 10932 - DNA, 1314 bp, synthetic construct
  source 1..1314: mol_type = other DNA; note = Synthetic coding sequence
atggccggcggcccccccaaggccctgcccagcaccggcccccacagcctgagagacatgccccaccccctggccggcagcagcagcgaggaggccgtgggcggcgacagcacccccagccccgacctgctgatggccagaagcttcggcgacaaggacctgatcctgcccaacggcggcacccccgccggcaccagcagccccgccagcagcagcagcctgctgaacagactgcagctggacgacgacatcgacggcgagaccagagacctgttcgtgatcgtggacgaccccaagaagcacgtgtgcaccatggagacctacatcacctacagaatcaccaccaagagcaccagagtggagttcgacctgcccgagtacagcgtgagaagaagataccaggacttcgactggctgagaagcaagctggaggagagccagcccacccacctgatcccccccctgcccgagaagttcgtggtgaagggcgtggtggacagattcagcgaggagttcgtggagaccagaagaaaggccctggacaagttcctgaagagaatcaccgaccaccccgtgctgagcttcaacgagcacttcaacatcttcctgaccgccaaggacctgaacgcctacaagaagcagggcatcgccctgctgaccagaatgggcgagagcgtgaagcacgtgaccggcggctacaagctgagaaccagacccctggagttcgccgccatcggcgactacctggacaccttcgccctgaagctgggcaccatcgacagaatcgcccagagaatcatcaaggaggagatcgagtacctggtggagctgagagagtacggccccgtgtacagcacctggagcgccctggagggcgagctggccgagcccctggagggcgtgagcgcctgcatcggcaactgcagcaccgccctggaggagctgaccgacgacatgaccgaggacttcctgcccgtgctgagagagtacatcctgtacagcgacagcatgaagagcgtgctgaagaagagagaccaggtgcaggccgagtacgaggccaagctggaggccgtggccctgagaaaggaggacagacccaaggtgcccgccgacgtggagaagtgccaggacagaatggagtgcttcaacgccgacctgaaggccgacatggagagatggcagaacaacaagagacaggacttcagacagctgctgatgggcatggccgacaagaacatccagtactacgagaagtgcctgatggcctgggagagcatcatccccctgctgcaggagaagcaggaggccaagtag

SEQ ID NO: 10933 - DNA, 1263 bp, synthetic construct
  source 1..1263: mol_type = other DNA; note = Synthetic coding sequence
atgagcagccccagagacttcagagccgagcccgtgaacgactacgagggcaacgacagcgaggccgaggacctgaacttcagagagaccctgcccagcagcagccaggagaacacccccagaagcaaggtgttcgagaacaaggtgaacagcgagaaggtgaagctgagcctgagaaacttcccccacaacgactacgaggacgtgttcgaggagcccagcgagagcggcagcgaccccagcatgtggaccgccagaggccccttcagaagagacagatggagcagcgaggacgaggaggccgccggccccagccaggccctgagccccctgctgagcgacaccagaaagatcgtgagcgagggcgagctggaccagctggcccagatcagacccctgatcttcaacttccacgagcagaccgccatcaaggactgcctgaagatcctggaggagaagaccgccgcctacgacatcatgcaggagttcatggccctggagctgaagaacctgcccggcgagttcaacagcggcaaccagcccagcaacagagagaagaacagatacagagacatcctgccctacgacagcaccagagtgcccctgggcaagagcaaggactacatcaacgccagctacatcagaatcgtgaactgcggcgaggagtacttctacatcgccacccagggccccctgctgagcaccatcgacgacttctggcagatggtgctggagaacaacagcaacgtgatcgccatgatcaccagagagatcgagggcggcatcatcaagtgctaccactactggcccatcagcctgaagaagcccctggagctgaagcacttcagagtgttcctggagaactaccagatcctgcagtacttcatcatcagaatgttccaggtggtggagaagagcaccggcaccagccacagcgtgaagcagctgcagttcaccaagtggcccgaccacggcacccccgccagcgccgacagcttcatcaagtacatcagatacgccagaaagagccacctgaccggccccatggtggtgcactgcagcgccggcatcggcagaaccggcgtgttcctgtgcgtggacgtggtgttctgcgccatcgtgaagaactgcagcttcaacatcatggacatcgtggcccagatgagagagcagagaagcggcatggtgcagaccaaggagcagtaccacttctgctacgacatcgtgctggaggtgctgagaaagctgctgaccctggactag

SEQ ID NO: 10934 - DNA, 837 bp, synthetic construct
  source 1..837: mol_type = other DNA; note = Synthetic coding sequence
atgagcagccccagagacttcagagccgagcccgtgaacgactacgagggcaacgacagcgaggccgaggacctgaacttcagagagaccctgcccagcagcagccaggagaacacccccagaagcaaggtgttcgagaacaaggtgaacagcgagaaggtgaagctgagcctgagaaacttcccccacaacgactacgaggacgtgttcgaggagcccagcgagagcggcagcgaccccagcatgtggaccgccagaggccccttcagaagagacagatggagcagcgaggacgaggaggccgccggccccagccaggccctgagccccctgctgagcgacaccagaaagatcgtgagcgagggcgagctggaccagctggcccagatcagacccctgatcttcaacttccacgagcagaccgccatcaaggactgcctgaagatcctggaggagaagaccgccgcctacgacatcatgcaggagttcatgaccggcaccagccacagcgtgaagcagctgcagttcaccaagtggcccgaccacggcacccccgccagcgccgacagcttcatcaagtacatcagatacgccagaaagagccacctgaccggccccatggtggtgcactgcagcgccggcatcggcagaaccggcgtgttcctgtgcgtggacgtggtgttctgcgccatcgtgaagaactgcagcttcaacatcatggacatcgtggcccagatgagagagcagagaagcggcatggtgcagaccaaggagcagtaccacttctgctacgacatcgtgctggaggtgctgagaaagctgctgaccctggactag

SEQ ID NO: 10935 - DNA, 681 bp, synthetic construct
  source 1..681: mol_type = other DNA; note = Synthetic coding sequence
atgagcagccccagagacttcagagccgagcccgtgaacgactacgagggcaacgacagcgaggccgaggacctgaacttcagagagaccctgcccagcagcagccaggagaacacccccagaagcaaggtgttcgagaacaaggtgaacagcgagaaggtgaagctgagcctgagaaacttcccccacaacgactacgaggacgtgttcgaggagcccagcgagagcggcagcgaccccagcatgtggaccgccagaggccccttcagaagagacagatggagcagcgaggacgaggaggccgccggccccagccaggccctgagccccctgctgagcgacaccagaaagatcgtgagcgagggcgagctggaccagctggcccagatcagacccctgatcttcaacttccacgagcagaccgccatcaaggactgcctgaagatcctggaggagaagaccgccgcctacgacatcatgcaggagttcatggccctggagctgaagaacctgcccggcgagttcaacagcggcaaccagcccagcaacagagagaagaacagatacagagacatcctgcccttccagcaccacggctacagcggccccaacgagagaaccaccttctggcacggcagcaacgagggcgccgtgagcctgctgctgagatactgcgcctag

SEQ ID NO: 10936 - DNA, 681 bp, synthetic construct
  source 1..681: mol_type = other DNA; note = Synthetic coding sequence
atgcaccagacctgcgtgagactggagagagaggccagcgccagacccagccccggccccgtgctgccccccagacccctgcccagccacaccgagctgcagatcagagagggccccaagagaaccatcagagccgccgccgagggcgccccctgcgtgggcagagtgagatgcgcccccggcaacagaggcggcagagagggcgccagcggcgtgagaggcggcgtggcccaggtgccccccagactgcccgccccccccatcggccccgagagagacgacctggccggcggcgccggcagaaagcccctgcccagcaccgccgccgccagcagccccggcagcgccgccgccgccaccgccgccctgtgcccccccgccagactgagcacccccagcatgagcggcctgagagtgtacagcaccagcgtgaccggcagcagagagatcaagagccagcagagcgaggtgaccagaatcctggacggcaagagaatccagtaccagctggtggacatcagccaggacaacgccctgagagacgagatgagagccctggccggcaaccccaaggccacccccccccagatcgtgaacggcgaccagtactgcggcgactacgagctgttcgtggaggccgtggagcagaacaccctgcaggagttcctgaagctggcctag

SEQ ID NO: 10937 - DNA, 1518 bp, synthetic construct
  source 1..1518: mol_type = other DNA; note = Synthetic coding sequence
atggaccccggcaacgagaacagcgccaccgaggccgccgccatcatcgacctggaccccgacttcgagccccagagcagacccagaagctgcacctggcccctgcccagacccgagatcgccaaccagcccagcgagccccccgaggtggagcccgacctgggcgagaaggtgcacaccgagggcagaagcgagcccatcctgctgcccagcagactgcccgagcccgccggcggcccccagcccggcatcctgggcgccgtgaccggccccagaaagggcggcagcagaagaaacgcctggggcaaccagagctacgccgagctgatcagccaggccatcgagagcgcccccgagaagagactgaccctggcccagatctacgagtggatggtgagaaccgtgccctacttcaaggacaagggcgacagcaacagcagcgccggctggaagaacagcatcagacacaacctgagcctgcacagcaagttcatcaaggtgcacaacgaggccaccggcaagagcagctggtggatgctgaaccccgagggcggcaagagcggcaaggcccccagaagaagagccgccagcatggacagcagcagcaagctgctgagaggcagaagcaaggcccccaagaagaagcccagcgtgctgcccgccccccccgagggcgccacccccaccagccccgtgggccacttcgccaagtggagcggcagcccctgcagcagaaacagagaggaggccgacatgtggaccaccttcagacccagaagcagcagcaacgccagcagcgtgagcaccagactgagccccctgagacccgagagcgaggtgctggccgaggagatccccgccagcgtgagcagctacgccggcggcgtgccccccaccctgaacgagggcctggagctgctggacggcctgaacctgaccagcagccacagcctgctgagcagaagcggcctgagcggcttcagcctgcagcaccccggcgtgaccggccccctgcacacctacagcagcagcctgttcagccccgccgagggccccctgagcgccggcgagggctgcttcagcagcagccaggccctggaggccctgctgaccagcgacaccccccccccccccgccgacgtgctgatgacccaggtggaccccatcctgagccaggcccccaccctgctgctgctgggcggcctgcccagcagcagcaagctggccaccggcgtgggcctgtgccccaagcccctggaggcccccggccccagcagcctggtgcccaccctgagcatgatcgcccccccccccgtgatggccagcgcccccatccccaaggccctgggcacccccgtgctgaccccccccaccgaggccgccagccaggacagaatgccccaggacctggacctggacatgtacatggagaacctggagtgcgacatggacaacatcatcagcgacctgatggacgagggcgagggcctggacttcaacttcgagcccgacccctag

SEQ ID NO: 10938 - DNA, 1062 bp, synthetic construct
  source 1..1062: mol_type = other DNA; note = Synthetic coding sequence
atggactacaagagcagcctgatccaggacggcaaccccatggagaacctggagaagcagctgatctgccccatctgcctggagatgttcaccaagcccgtggtgatcctgccctgccagcacaacctgtgcagaaagtgcgccaacgacatcttccaggccgccaacccctactggaccagcagaggcagcagcgtgagcatgagcggcggcagattcagatgccccacctgcagacacgaggtgatcatggacagacacggcgtgtacggcctgcagagaaacctgctggtggagaacatcatcgacatctacaagcaggagtgcagcagcagacccctgcagaagggcagccaccccatgtgcaaggagcacgaggacgagaagatcaacatctactgcctgacctgcgaggtgcccacctgcagcatgtgcaaggtgttcggcatccacaaggcctgcgaggtggcccccctgcagagcgtgttccagggccagaagaccgagctgaacaactgcatcagcatgctggtggccggcaacgacagagtgcagaccatcatcacccagctggaggacagcagaagagtgaccaaggagaacagccaccaggtgaaggaggagctgagccagaagttcgacaccctgtacgccatcctggacgagaagaagagcgagctgctgcagagaatcacccaggagcaggagaagaagctgagcttcatcgaggccctgatccagcagtaccaggagcagctggacaagagcaccaagctggtggagaccgccatccagagcctggacgagcccggcggcgccaccttcctgctgaccgccaagcagctgatcaagagcatcgtggaggccagcaagggctgccagctgggcaagaccgagcagggcttcgagaacatggacttcttcaccctggacctggagcacatcgccgacgccctgagagccatcgacttcggcaccgacgaggaggaggaggagttcatcgaggaggaggaccaggaggaggaggagagcaccgagggcaaggaggagggccaccagtag

SEQ ID NO: 10939 - DNA, 1179 bp, synthetic construct
  source 1..1179: mol_type = other DNA; note = Synthetic coding sequence
atgggcgtgaaccagagcgtgggcttcccccccgtgaccggcccccacctggtgggctgcggcgacgtgatggagggccagaacctgcagggcagcttcttcagactgttctacccctgccagaaggccgaggagaccatggagcagcccctgtggatccccagatacgagtactgcaccggcctggccgagtacctgcagttcaacaagagatgcggcggcctgctgttcaacctggccgtgggcagctgcagactgcccgtgagctggaacggccccttcaagaccaaggacagcggctaccccctgatcatcttcagccacggcctgggcgccttcagaaccctgtacagcgccttctgcatggagctggccagcagaggcttcgtggtggccgtgcccgagcacagagacagaagcgccgccaccacctacttctgcaagcaggcccccgaggagaaccagcccaccaacgagagcctgcaggaggagtggatccccttcagaagagtggaggagggcgagaaggagttccacgtgagaaacccccaggtgcaccagagagtgagcgagtgcctgagagtgctgaagatcctgcaggaggtgaccgccggccagaccgtgttcaacatcctgcccggcggcctggacctgatgaccctgaagggcaacatcgacatgagcagagtggccgtgatgggccacagcttcggcggcgccaccgccatcctggccctggccaaggagacccagttcagatgcgccgtggccctggacgcctggatgttccccctggagagagacttctaccccaaggccagaggccccgtgttcttcatcaacaccgagaagttccagaccatggagagcgtgaacctgatgaagaagatctgcgcccagcacgagcagagcagaatcatcaccgtgctgggcagcgtgcacagaagccagaccgacttcgccttcgtgaccggcaacctgatcggcaagttcttcagcaccgagaccagaggcagcctggacccctacgagggccaggaggtgatggtgagagccatgctggccttcctgcagaagcacctggacctgaaggaggactacaaccagtggaacaacctgatcgagggcatcggccccagcctgacccccggcgccccccaccacctgagcagcctgtag

SEQ ID NO: 10940 - DNA, 1179 bp, synthetic construct; identical to SEQ ID NO: 10939
  source 1..1179: mol_type = other DNA; note = Synthetic coding sequence

SEQ ID NO: 10941 - DNA, 213 bp, synthetic construct
  source 1..213: mol_type = other DNA; note = Synthetic coding sequence
atggtgagaaccaagacctggaccctgaagaagcacttcgtgggctaccccaccaacagcgacttcgagctgaagaccgccgagctgccccccctgaagaacggcgaggtgctgctggaggccctgttcctgaccgtggacccctacatgagagtggccgccaagagactgaaggagggcgacaccatgatgggccagcaggtggccaagtag

SEQ ID NO: 10942 - DNA, 213 bp, synthetic construct; identical to SEQ ID NO: 10941
  source 1..213: mol_type = other DNA; note = Synthetic coding sequence

SEQ ID NO: 10943 - DNA, 534 bp, synthetic construct; identical to SEQ ID NO: 9284
  source 1..534: mol_type = other DNA; note = Synthetic coding sequence

SEQ ID NO: 10944 - DNA, 1263 bp, synthetic construct; identical to SEQ ID NO: 10933
  source 1..1263: mol_type = other DNA; note = Synthetic coding sequence

SEQ ID NO: 10945 - DNA, 837 bp, synthetic construct; identical to SEQ ID NO: 10934
  source 1..837: mol_type = other DNA; note = Synthetic coding sequence

SEQ ID NO: 10946 - DNA, 681 bp, synthetic construct; identical to SEQ ID NO: 10935
  source 1..681: mol_type = other DNA; note = Synthetic coding sequence

SEQ ID NO: 10947 - DNA, 789 bp, synthetic construct
  source 1..789: mol_type = other DNA; note = Synthetic coding sequence
atgagcagatacctgagaccccccaacaccagcctgttcgtgagaaacgtggccgacgacaccagaagcgaggacctgagaagagagttcggcagatacggccccatcgtggacgtgtacgtgcccctggacttctacaccagaagacccagaggcttcgcctacgtgcagttcgaggacgtgagagacgccgaggacgccctgcacaacctggacagaaagtggatctgcggcagacagatcgagatccagttcgcccagggcgacagaaagacccccaaccagatgaaggccaaggagggcagaaacgtgtacagcagcagcagatacgacgactacgacagatacagaagaagcagaagcagaagctacgagagaagaagaagcagaagcagaagcttcgactacaactacagaagaagctacagccccagaaacagcagacccaccggcagacccagaagaagcagaagccacagcgacaacgacagattcaagcacagaaacagaagcttcagcagaagcaagagcaacagcagaagcagaagcaagagccagcccaagaaggagatgaaggccaagagcagaagcagaagcgccagccacaccaagaccagaggcaccagcaagaccgacagcaagacccactacaagagcggcagcagatacgagaaggagagcagaaagaaggagccccccagaagcaagagccagagcagaagccagagcagaagcagaagcaagagcagaagcagaagctggaccagccccaagagcagcggccactag

SEQ ID NO: 10948 - DNA, 522 bp, synthetic construct
  source 1..522: mol_type = other DNA; note = Synthetic coding sequence
atgagcagatacctgagaccccccaacaccagcctgttcgtgagaaacgtggccgacgacaccagaagcgaggacctgagaagagagttcggcagatacggccccatcgtggacgtgtacgtgcccctggacttctacaccagaagacccagaggcttcgcctacgtgcagttcgaggacgtgagagacgccgaggacgccctgcacaacctggacagaaagtggatctgcggcagacagatcgagatccagttcgcccagggcgacagaaagacccccaaccagatgaaggccaaggagggcagaaacgtgtacagcagcagcagatacgacgactacgacagatacagaagaagcagaagcagaagctacgagagaagaagaagcagaagcagaagcttcgactacaactacagaagaagctacagccccagaaacagcagacccaccggcagacccagaagaagcagaagccacagcgacaacgacagccaggtgagcaagaagaagaacgagagatag

SEQ ID NO: 10949 - DNA, 669 bp, synthetic construct
  source 1..669: mol_type = other DNA; note = Synthetic coding sequence
atgagcgccttcggccacgacgaggcctggatggaggccggcggcttcggcctggaggccgccgagagaaccgagtaccagagcctgtgcaagagcaagctgctgttcctgggcgagcagagcgtgggcaagaccagcatcatcagcagattcatgtacaacagcttcggctgcgcctgccaggccaccgtgggcatcgacttcctgagcaagaccatgtacctggaggaccagatcgtgcagctgcagctgtgggacaccgccggccaggagagattccacagcctgatccccagctacatcagagacagcaccatcgccgtggtggtgtacgacatcaccaacatcaacagcttcaaggagaccgacaagtgggtggagcacgtgagagccgagagaggcgacgacgtggtgatcatgctgctgggcaacaagatcgacctggacaacaagagacaggtgaccgccgagcagggcgaggagaagagcagaaacctgaacgtgatgttcatcgagaccagcgccaagaccggctacaacgtgaagaagctgttcagaagagtggccagcgccctgctgagcaccagaaccagccccccccccaaggagggcaccgtggagatcgagctggagagcttcgaggagagcggcaacagaagctactgctag

SEQ ID NO: 10950 - DNA, 348 bp, synthetic construct
  source 1..348: mol_type = other DNA; note = Synthetic coding sequence
atggtgcagatcatcaaggacaccaacgagttcaagaccttcctgaccgccgccggccacaagctggccgtggtgcagttcagcagcaagagatgcggcccctgcaagagaatgttccccgtgttccacgccatgagcgtgaagtaccagaacgtgttcttcgccaacgtggacgtgaacaacagccccgagctggccgagacctgccacatcaagaccatccccaccttccagatgttcaagaagagccagaaggtgaccctgttcagcagaatcaagagaatcatctgctgctacagaagcggcttcatgagcaacctgtgcctggccgacgacggcaacgagtag

SEQ ID NO: 10951 - DNA, 384 bp, synthetic construct
  source 1..384: mol_type = other DNA; note = Synthetic coding sequence
atggtgcagatcatcaaggacaccaacgagttcaagaccttcctgaccgccgccggccacaagctggccgtggtgcagttcagcagcaagagatgcggcccctgcaagagaatgttccccgtgttccacgccatgagcgtgaagtaccagaacgtgttcttcgccaacgtggacgtgaacaacagccccgagctggccgagacctgccacatcaagaccatccccaccttccagatgttcaagaagagccagaaggtgaccctgttcagcagaatcaagagaatcatctgctgctacagaagcggcttcatgagcaacctgatcttcgagttctgcggcgccgacgccaagaagctggaggccaagacccaggagctgatgtag

SEQ ID NO: 10952 - DNA, 1767 bp, synthetic construct
  source 1..1767: mol_type = other DNA; note = Synthetic coding sequence
atgcacagaagcgcccccagccagaccaccaagagaagcagaagccccttcagcaccaccagaagaagctgggacgacagcgagagcagcggcaccaacctgaacatcgacaacgaggactacagcagatacccccccagagagtacagagccagcggcagcagaagaggcatggcctacggccacatcgacagctacggcgccgacgacagcgaggaggagggcgccggccccgtggagagaccccccgtgagaggcaagaccggcaagttcaaggacgacaagctgtacgaccccgagaagggcgccagaagcctggccggcccccccccccacttcagcagcttcagcagagacgtgagagaggagagagacaagctggaccccgtgcccgccgccagatgcagcgccagcagagccgacttcctgccccagagcagcgtggccagccagagcagcagcgagggcaagctggccaccaagggcgacagcagcgagagagagagaagagagcagaacctgcccgccagacccagcagagcccccgtgagcatctgcggcggcggcgagaacaccagcaagagcgccgaggagcccgtggtgagacccaagatcagaaacctggccagccccaactgcgtgaagcccaagatcttcttcgacaccgacgacgacgacgacatgccccacagcaccagcagatggagagacaccgccaacgacaacgagggccacagcgacggcctggccagaagaggcagaggcgagagcagcagcggctaccccgagcccaagtaccccgaggacaagagagaggccagaagcgaccaggtgaagcccgagaaggtgcccagaagaagaagaaccatggccgaccccgacttctggacccacagcgacgactactacaagtactgcgacgaggacagcgacagcgacaaggagtggatcgccgccctgagaagaaagtacagaagcagagagcagaccctgagcagcagcggcgagagctgggagaccctgcccggcaaggaggagagagagcccccccaggccaaggtgagcgccagcaccggcaccagccccggccccggcgccagcgccagcgccggcgccggcgccggcgccagcgccggcagcaacggcagcaactacctggaggaggtgagagagcccagcctgcaggaggagcaggccagcctggaggagggcgagatcccctggctgcagtaccacgagaacgacagcagcagcgagggcgacaacgacagcggccacgagctgatgcagcccggcgtgttcatgctggacggcaacaacaacctggaggacgacagcagcgtgagcgaggacctggaggtggactggagcctgttcgacggcttcgccgacggcctgggcgtggccgaggccatcagctacgtggacccccagttcctgacctacatggccctggaggagagactggcccaggccatggagaccgccctggcccacctggagagcctggccgtggacgtggaggtggccaacccccccgccagcaaggagagcatcgacgccctgcccgagatcctggtgaccgaggaccacggcgccgtgggccaggagatgtgctgccccatctgctgcagcgagtacgtgaagggcgaggtggccaccgagctgccctgccaccactacttccacaagccctgcgtgagcatctggctgcagaagagcggcacctgccccgtgtgcagatgcatgttccccccccccctgtag

SEQ ID NO: 10953 - DNA, 612 bp, synthetic construct
  source 1..612: mol_type = other DNA; note = Synthetic coding sequence
atgcccgagcagttcagcgtggccgagttcctggccgtgaccgccgaggacctgagcagccccgccggcgccgccgccttcgccgccaagatgcccagatacagaggcgccgccctggccagagaggagatcctggagggcgaccaggccatcctgcagagaatcaagaaggccgtgagagccatccacagcagcggcctgggccacgtggagaacgaggagcagtacagagaggccgtggagagcctgggcaacagccacctgagccagaacagccacgagctgagcaccggcttcctgaacctggccgtgttcaccagagaggtggccgccctgttcaagaacctgatccagaacctgaacaacatcgtgagcttccccctggacagcctgatgaagggccagctgagagacggcagacaggacagcaagaagcagctggagaaggcctggaaggactacgaggccaagatggccaagctggagaaggagagagacagagccagagtgaccggcggcatccccgcctggaacctgggcatccccgccaagccccaccccaccctgaagagagccagcgagagcccccaggccccccccgaccccgcctag

SEQ ID NO: 10954 - DNA, 1932 bp, synthetic construct; identical to SEQ ID NO: 10563
  source 1..1932: mol_type = other DNA; note = Synthetic coding sequence

SEQ ID NO: 10955 - DNA, 1368 bp, synthetic construct
  source 1..1368: mol_type = other DNA; note = Synthetic coding sequence
atgggccaggagagcagcaagcccgtgtggcccaaccccaccggcggctaccagagcaacaccggcagaagatacggcagaagacacgcctacgtgagcttcagaccccccaccagccagagagagagaatcgccagccagagaaagaccaacagcgaggtgcccatgcacagaagcgcccccagccagaccaccaagagaagcagaagccccttcagcaccaccagaagaagctgggacgacagcgagagcagcggcaccaacctgaacatcgacaacgaggactacagcagcaccagcagatggagagacaccgccaacgacaacgagggccacagcgacggcctggccagaagaggcagaggcgagagcagcagcggctaccccgagcccaagtaccccgaggacaagagagaggccagaagcgaccaggtgaagcccgagaaggtgcccagaagaagaagaaccatggccgaccccgacttctggacccacagcgacgactactacaagtactgcgacgaggacagcgacagcgacaaggagtggatcgccgccctgagaagaaagtacagaagcagagagcagaccctgagcagcagcggcgagagctgggagaccctgcccggcaaggaggagagagagcccccccaggccaaggtgagcgccagcaccggcaccagccccggccccggcgccagcgccagcgccggcgccggcgccggcgccagcgccggcagcaacggcagcaactacctggaggaggtgagagagcccagcctgcaggaggagcaggccagcctggaggagggcgagatcccctggctgcagtaccacgagaacgacagcagcagcgagggcgacaacgacagcggccacgagctgatgcagcccggcgtgttcatgctggacggcaacaacaacctggaggacgacagcagcgtgagcgaggacctggaggtggactggagcctgttcgacggcttcgccgacggcctgggcgtggccgaggccatcagctacgtggacccccagttcctgacctacatggccctggaggagagactggcccaggccatggagaccgccctggcccacctggagagcctggccgtggacgtggaggtggccaacccccccgccagcaaggagagcatcgacgccctgcccgagatcctggtgaccgaggaccacggcgccgtgggccaggagatgtgctgccccatctgctgcagcgagtacgtgaagggcgaggtggccaccgagctgccctgccaccactacttccacaagccctgcgtgagcatctggctgcagaagagcggcacctgccccgtgtgcagatgcatgttccccccccccctgtag

SEQ ID NO: 10956 - DNA, 390 bp, synthetic construct
  source 1..390: mol_type = other DNA; note = Synthetic coding sequence
atggccgagctgatccagaagaagctgcagggcgaggtggagaagtaccagcagctgcagaaggacctgagcaagagcatgagcggcagacagaagctggaggcccagctgaccgagaacaacatcgtgaaggaggagctggccctgctggacggcagcaacgtggtgttcaagctgctgggccccgtgctggtgaagcaggagctgggcgaggccagagccaccgtgggcaagagactggactacatcaccgccgagatcaagagatacgagagccagctgagagacctggagagacagagcgagcagcagagagagaccctggcccagctgcagcaggagttccagagagcccaggccgccaaggccggcgcccccggcaaggcctag

SEQ ID NO: 10957 - DNA, 390 bp, synthetic construct; identical to SEQ ID NO: 10956
  source 1..390: mol_type = other DNA; note = Synthetic coding sequence

SEQ ID NO: 10958 - DNA, 390 bp, synthetic construct; identical to SEQ ID NO: 10956
  source 1..390: mol_type = other DNA; note = Synthetic coding sequence

SEQ ID NO: 10959 - DNA, 1512 bp, synthetic construct
  source 1..1512: mol_type = other DNA; note = Synthetic coding sequence
atgaagtgcgagcactgcaccagaaaggagtgcagcaagaagaccaagaccgacgaccaggagaacgtgagcgccgacgcccccagccccgcccaggagaacggcgagaagggcgagttccacaagctggccgacgccaagatcttcctgagcgactgcctggcctgcgacagctgcatgaccgccgaggagggcgtgcagctgagccagcagaacgccaaggacttcttcagagtgctgaacctgaacaagaagtgcgacaccagcaagcacaaggtgctggtggtgagcgtgtgcccccagagcctgccctacttcgccgccaagttcaacctgagcgtgaccgacgccagcagaagactgtgcggcttcctgaagagcctgggcgtgcactacgtgttcgacaccaccatcgccgccgacttcagcatcctggagagccagaaggagttcgtgagaagatacagacagcacagcgaggaggagagaaccctgcccatgctgaccagcgcctgccccggctgggtgagatacgccgagagagtgctgggcagacccatcaccgcccacctgtgcaccgccaagagcccccagcaggtgatgggcagcctggtgaaggactacttcgccagacagcagaacctgagccccgagaagatcttccacgtgatcgtggccccctgctacgacaagaagctggaggccctgcaggagagcctgccccccgccctgcacggcagcagaggcgccgactgcgtgctgaccagcggcaaggtgctgatcagctggtggtgcacccccgtgatcaccgccacccaggaggccgccgccagagagagcctggagcccggcagacagagactgcagagagacaagatcgcccccctggacagcagcctgggcggcggcggcgagatcgcccagatcatggagcagggcgacctgagcgtgagagacgccgccgtggacaccctgttcggcgacctgaaggaggacaaggtgaccagacacgacggcgccagcagcgacggccacctggcccacatcttcagacacgccgccaaggagctgttcaacgaggacgtggaggaggtgacctacagagccctgagaaacaaggacttccaggaggtgaccctggagaagaacggcgaggtggtgctgagattcgccgccgcctacggcttcagaaacatccagaacatgatcctgaagctgaagaagggcaagttccccttccacttcgtggaggtgctggcctgcgccggcggctgcctgaacggcagaggccaggcccagacccccgacggccacgccgacaaggccctgctgagacagatggagggcatctacgccgacatccccgtgagaagacccgagagcagcgcccacgtgcaggagctgtaccaggagtggctggagggcatcaacagccccaaggccagagaggtgctgcacaccacctaccagagccaggagagaggcacccacagcctggacatcaagtggtag

SEQ ID NO: 10960 - DNA, 348 bp, synthetic construct
  source 1..348: mol_type = other DNA; note = Synthetic coding sequence
atggccaccgagcccgaggccgccgagcccgtggtgcccagcctggtggacagatacttcaccagatggtacaagcccgacgtgaagggcaagttctgcgaggaccactgcatcctgcagcacagcaacagaatctgcgtgatcaccctggccgagagccaccccgtgctgcagagcggcaagaccatcaagagcatcagctaccagatcagcaccaactgcagcagactgcagaacaaggtgagcggcaagttcaagagaagaatcatctacctggagaaggtggaggacgtgatcaagagaaagatgatgcccctgagcctgggcctgcacctgccccacagctag

SEQ ID NO: 10961 - DNA, 1566 bp, synthetic construct
  source 1..1566: mol_type = other DNA; note = Synthetic coding sequence
atgaacgtgagcctgagccagaagaccgtgaagatccacagactgttccccatgctggccttcagcgagccctacgagttcgtgagcctggagtggctgcagaagtggctggacgagagcacccccaccaagcccatcgacaaccacgcctgcctgtgcagccacgacaagctgcaccccgacaagatcagcatcatgaagagaatcagcgagtacgccgccgacatcttctacagcagatacggcggcggccccagactgaccgtgaaggccctgtgcaaggagtgcgtggtggagagatgcagaatcctgagactgaagaaccagctgaacgaggactacaagaccgtgaacaacctgctgaaggccgccgtgaagggcgacggcttctgggtgggcaagagcagcctgagaagctggagacagctggccctggagcagctggacgagcaggacggcgacgccgagcagagcaacggcaagatgaacggcagcaccctgaacaaggacgagagcaaggaggagagaaaggaggaggaggagctgaacttcaacgaggacatcctgtgcccccacggcgagctgtgcatcagcgagaacgagagaagactggtgagcaaggaggcctggagcaagctgcagcagtacttccccaaggcccccgagttccccagctacaaggagtgctgcagccagtgcaagatcctggagagagagggcgaggagaacgaggccctgcacaagatgatcgccaacgagcagaagaccagcctgcccaacctgttccaggacaagaacagaccctgcctgagcaactggcccgaggacaccgacgtgctgtacatcgtgagccagttcttcgtggaggagtggagaaagttcgtgagaaagcccaccagatgcagccccgtgagcagcgtgggcaacagcgccctgctgtgcccccacggcggcctgatgttcaccttcgccagcatgaccaaggaggacagcaagctgatcgccctgatctggcccagcgagtggcagatgatccagaagctgttcgtggtggaccacgtgatcaagatcaccagaatcgaggtgggcgacgtgaaccccagcgagacccagtacatcagcgagcccaagctgtgccccgagtgcagagagggcctgctgtgccagcagcagagagacctgagagagtacacccaggccaccatctacgtgcacaaggtggtggacaacaagaaggtgatgaaggacagcgcccccgagctgaacgtgagcagcagcgagaccgaggaggacaaggaggaggccaagcccgacggcgagaaggaccccgacttcaaccagatcatgcacgccttcagcgtggcccccttcgaccagaacctgagcatcgacggcaagatcctgagcgacgactgcgccaccctgggcaccctgggcgtgatccccgagagcgtgatcctgctgaaggccgacgagcccatcgccgactacgccgccatggacgacgtgatgcaggtgtgcatgcccgaggagggcttcaagggcaccggcctgctgggccactag

SEQ ID NO: 10962 - DNA, 984 bp, synthetic construct
  source 1..984: mol_type = other DNA; note = Synthetic coding sequence
atgaccgccgtgggcgccgagagactgaccagcgtgagagcctggctgagctgctgcggcgcctgcgtgtgcgtgttcctgttcctgtgcctgtgcgtgttccccctgagagtgcacgtgcacgtgtggggcggcgagtgcagagtggacatcgccgtgttcgtgagcaagcacatgatcgtggccctgatgcacgtgaccggcgccgccggcctgctgagactgtgcgtgagagcctgcgtgtgcatgagagtgtgcgccaccgcccacatgtacagagtggacaagagcttcaccagcagaagaagcgtgtggagaagcgacggccagaaccagcacttcccccaggccctggacctgagcagagtgaacctggtgcccagctacacccccagcctgtaccccaagaacaccgacctgttcgagatgatcgagaagatgcagggcagcagaatggacgagcagagatgcagcttccccccccccctgaagaccgaggaggactacatcccctaccccagcgtgcacgaggtgctgggcagagagggccccttccccctgatcctgctgccccagttcggcggctactggatcgagggcaccaaccacgagatcaccagcatccccgagaccgagcccctgcagagccccaccaccaaggtgaagctggagtgcaaccccaccgccagaatctacagaaagcacttcctgggcaaggagcacttcaactactacagcctggacgccgccctgggccacctggtgttcagcctgaagtacgacgtgatcggcgaccaggagcacctgagactgctgctgagaaccaagtgcagaacctaccacgacgtgatccccatcagctgcctgaccgagttccccaacgtggtgcagatggccaagctggtgtgcgaggacgtgaacgtggacagattctaccccgtgctgtaccccaaggtgtggctggacctgggcaccgcccactag

SEQ ID NO: 10963 - DNA, 2079 bp, synthetic construct
  source 1..2079: mol_type = other DNA; note = Synthetic coding sequence
atgatcgagaagatgcagggcagcagaatggacgagcagagatgcagcttccccccccccctgaagaccgaggaggactacatcccctaccccagcgtgcacgaggtgctgggcagagagggccccttccccctgatcctgctgccccagttcggcggctactggatcgagggcaccaaccacgagatcaccagcatccccgagaccgagcccctgcagagccccaccaccaaggtgaagctggagtgcaaccccaccgccagaatctacagaaagcacttcctgggcaaggagcacttcaactactacagcctggacgccgccctgggccacctggtgttcagcctgaagtacgacgtgatcggcgaccaggagcacctgagactgctgctgagaaccaagtgcagaacctaccacgacgtgatccccatcagctgcctgaccgagttccccaacgtggtgcagatggccaagctggtgtgcgaggacgtgaacgtggacagattctaccccgtgctgtaccccaaggccagcagactgatcgtgaccttcgacgagcacgtgatcagcaacaacttcaagttcggcgtgatctaccagaagctgggccagaccagcgaggaggagctgttcagcaccaacgaggagagccccgccttcgtggagttcctggagttcctgggccagaaggtgaagctgcaggacttcaagggcttcagaggcggcctggacgtgacccacggccagaccggcaccgagagcgtgtactgcaacttcagaaacaaggagatcatgttccacgtgagcaccaagctgccctacaccgagggcgacgcccagcagctgcagagaaagagacacatcggcaacgacatcgtggccgtggtgttccaggacgagaacacccccttcgtgcccgacatgatcgccagcaacttcctgcacgcctacgtggtggtgcaggccgagggcggcggccccgacggccccctgtacaaggtgagcgtgaccgccagagacgacgtgcccttcttcggcccccccctgcccgaccccgccgtgttcagaaagggccccgagttccaggagttcctgctgaccaagctgatcaacgccgagtacgcctgctacaaggccgagaagttcgccaagctggaggagagaaccagagccgccctgctggagaccctgtacgaggagctgcacatccacagccagagcatgatgggcctgggcggcgacgaggacaagatggagaacggcagcggcggcggcggcttcttcgagagcttcaagagagtgatcagaagcagaagccagagcatggacgccatgggcctgagcaacaagaagcccaacaccgtgagcaccagccacagcggcagcttcgcccccaacaaccccgacctggccaaggccgccggcatcagcctgctgatccccggcaagagcgccagcagattcggcagaagaggcagcgccatcggcatcggcaccgtggaggaggtggtggtgagaggcgccgccggcagcggcggctgcctgcacgccctgttcagcgccagaagccaggacggcggccacatcggcgacgtggcccccctgccccccggccaggcccccggcagagccggctggagcggcggcagcagcgacggcacccagcacctgctgtggggcctgagcctgatcgtgcccggcaagagccccaccagaaagaagagcggccccttcggcagcagaagaagcagcgccatcggcatcgagaacatccaggaggtgcaggagaagagagagagcccccccgccggccagaagacccccgacagcggccacgtgagccaggagcccaagagcgagaacagcagcacccagagcagccccgagatgcccaccaccaagaacagagccgagaccgccgcccagagagccgaggccctgaagctgcccctgctggtgcagtgccagcagctgagacagagaggcggcggcgacggcggctgcggcagaagaggccacagacccggcgagagagtgatcctgagaaacaccccccaggccggcctgctgcacctgtag

SEQ ID NO: 10964 - DNA, 2085 bp, synthetic construct
  source 1..2085: mol_type = other DNA; note = Synthetic coding sequence
atggcccagctgagacccgccgtgccccccggcagacccagaagaggcagcctgcccgccggcgccagctggcagaacaccgacctgttcgagatgatcgagaagatgcagggcagcagaatggacgagcagagatgcagcttccccccccccctgaagaccgaggaggactacatcccctaccccagcgtgcacgaggtgctgggcagagagggccccttccccctgatcctgctgccccagttcggcggctactggatcgagggcaccaaccacgagatcaccagcatccccgagaccgagcccctgcagagccccaccaccaaggtgaagctggagtgcaaccccaccgccagaatctacagaaagcacttcctgggcaaggagcacttcaactactacagcctggacgccgccctgggccacctggtgttcagcctgaagtacgacgtgatcggcgaccaggagcacctgagactgctgctgagaaccaagtgcagaacctaccacgacgtgatccccatcagctgcctgaccgagttccccaacgtggtgcagatggccaagctggtgtgcgaggacgtgaacgtggacagattctaccccgtgctgtaccccaaggccagcagactgatcgtgaccttcgacgagcacgtgatcagcaacaacttcaagttcggcgtgatctaccagaagctgggccagaccagcgaggaggagctgttcagcaccaacgaggagagccccgccttcgtggagttcctggagttcctgggccagaaggtgaagctgcaggacttcaagggcttcagaggcggcctggacgtgacccacggccagaccggcaccgagagcgtgtactgcaacttcagaaacaaggagatcatgttccacgtgagcaccaagctgccctacaccgagggcgacgcccagcagctgcagagaaagagacacatcggcaacgacatcgtggccgtggtgttccaggacgagaacacccccttcgtgcccgacatgatcgccagcaacttcctgcacgcctacgtggtggtgcaggccgagggcggcggccccgacggccccctgtacaaggtgagcgtgaccgccagagacgacgtgcccttcttcggcccccccctgcccgaccccgccgtgttcagaaagggccccgagttccaggagttcctgctgaccaagctgatcaacgccgagtacgcctgctacaaggccgagaagttcgccaagctggaggagagaaccagagccgccctgctggagaccctgtacgaggagctgcacatccacagccagagcatgatgggcctgggcggcgacgaggacaagatggagaacggcagcggcggcggcggcttcttcgagagcttcaagagagtgatcagaagcagaagccagagcatggacgccatgggcctgagcaacaagaagcccaacaccgtgagcaccagccacagcggcagcttcgcccccaacaaccccgacctggccaaggccgccggcatcagcctgatcgtgcccggcaagagccccaccagaaagaagagcggccccttcggcagcagaagaagcagcgccatcggcatcgagaacatccaggaggtgcaggagaagagagagagcccccccgccggccagaagacccccgacagcggccacgtgagccaggagcccaagagcgagaacagcagcacccagagcagccccgagatgcccaccaccaagaacagagccgagaccgccgcccagagagccgaggccctgaaggacttcagcagaagcagcagcagcgccagcagcttcgccagcgtggtggaggagaccgagggcgtggacggcgaggacaccggcctggagagcgtgagcagcagcggcaccccccacaagagagacagcttcatctacagcacctggctggaggacagcgtgagcaccaccagcggcggcagcagccccggccccagcagaagcccccaccccgacgccggcaagctgggcgaccccgcctgccccgagatcaagatccagctggaggccagcgagcagcacatgccccagctgggctgctag

SEQ ID NO: 10965 - DNA, 2082 bp, synthetic construct
  source 1..2082: mol_type = other DNA; note = Synthetic coding sequence
atggcccagctgagacccgccgtgccccccggcagacccagaagaggcagcctgcccgccggcgccagctggcagaacaccgacctgttcgagatgatcgagaagatgcagggcagcagaatggacgagcagagatgcagcttccccccccccctgaagaccgaggaggactacatcccctaccccagcgtgcacgaggtgctgggcagagagggccccttccccctgatcctgctgccccagttcggcggctactggatcgagggcaccaaccacgagatcaccagcatccccgagaccgagcccctgcagagccccaccaccaaggtgaagctggagtgcaaccccaccgccagaatctacagaaagcacttcctgggcaaggagcacttcaactactacagcctggacgccgccctgggccacctggtgttcagcctgaagtacgacgtgatcggcgaccaggagcacctgagactgctgctgagaaccaagtgcagaacctaccacgacgtgatccccatcagctgcctgaccgagttccccaacgtggtgcagatggccaagctggtgtgcgaggacgtgaacgtggacagattctaccccgtgctgtaccccaaggccagcagactgatcgtgaccttcgacgagcacgtgatcagcaacaacttcaagttcggcgtgatctaccagaagctgggccagaccagcgaggaggagctgttcagcaccaacgaggagagccccgccttcgtggagttcctggagttcctgggccagaaggtgaagctgcaggacttcaagggcttcagaggcggcctggacgtgacccacggccagaccggcaccgagagcgtgtactgcaacttcagaaacaaggagatcatgttccacgtgagcaccaagctgccctacaccgagggcgacgcccagctgcagagaaagagacacatcggcaacgacatcgtggccgtggtgttccaggacgagaacacccccttcgtgcccgacatgatcgccagcaacttcctgcacgcctacgtggtggtgcaggccgagggcggcggccccgacggccccctgtacaaggtgagcgtgaccgccagagacgacgtgcccttcttcggcccccccctgcccgaccccgccgtgttcagaaagggccccgagttccaggagttcctgctgaccaagctgatcaacgccgagtacgcctgctacaaggccgagaagttcgccaagctggaggagagaaccagagccgccctgctggagaccctgtacgaggagctgcacatccacagccagagcatgatgggcctgggcggcgacgaggacaagatggagaacggcagcggcggcggcggcttcttcgagagcttcaagagagtgatcagaagcagaagccagagcatggacgccatgggcctgagcaacaagaagcccaacaccgtgagcaccagccacagcggcagcttcgcccccaacaaccccgacctggccaaggccgccggcatcagcctgatcgtgcccggcaagagccccaccagaaagaagagcggccccttcggcagcagaagaagcagcgccatcggcatcgagaacatccaggaggtgcaggagaagagagagagcccccccgccggccagaagacccccgacagcggccacgtgagccaggagcccaagagcgagaacagcagcacccagagcagccccgagatgcccaccaccaagaacagagccgagaccgccgcccagagagccgaggccctgaaggacttcagcagaagcagcagcagcgccagcagcttcgccagcgtggtggaggagaccgagggcgtggacggcgaggacaccggcctggagagcgtgagcagcagcggcaccccccacaagagagacagcttcatctacagcacctggctggaggacagcgtgagcaccaccagcggcggcagcagccccggccccagcagaagcccccaccccgacgccggcaagctgggcgaccccgcctgccccgagatcaagatccagctggaggccagcgagcagcacatgccccagctgggctgctag

SEQ ID NO: 10966 - DNA, 1992 bp, synthetic construct
  source 1..1992: mol_type = other DNA; note = Synthetic coding sequence
atgatcgagaagatgcagggcagcagaatggacgagcagagatgcagcttccccccccccctgaagaccgaggaggactacatcccctaccccagcgtgcacgaggtgctgggcagagagggccccttccccctgatcctgctgccccagttcggcggctactggatcgagggcaccaaccacgagatcaccagcatccccgagaccgagcccctgcagagccccaccaccaaggtgaagctggagtgcaaccccaccgccagaatctacagaaagcacttcctgggcaaggagcacttcaactactacagcctggacgccgccctgggccacctggtgttcagcctgaagtacgacgtgatcggcgaccaggagcacctgagactgctgctgagaaccaagtgcagaacctaccacgacgtgatccccatcagctgcctgaccgagttccccaacgtggtgcagatggccaagctggtgtgcgaggacgtgaacgtggacagattctaccccgtgctgtaccccaaggccagcagactgatcgtgaccttcgacgagcacgtgatcagcaacaacttcaagttcggcgtgatctaccagaagctgggccagaccagcgaggaggagctgttcagcaccaacgaggagagccccgccttcgtggagttcctggagttcctgggccagaaggtgaagctgcaggacttcaagggcttcagaggcggcctggacgtgacccacggccagaccggcaccgagagcgtgtactgcaacttcagaaacaaggagatcatgttccacgtgagcaccaagctgccctacaccgagggcgacgcccagcagctgcagagaaagagacacatcggcaacgacatcgtggccgtggtgttccaggacgagaacacccccttcgtgcccgacatgatcgccagcaacttcctgcacgcctacgtggtggtgcaggccgagggcggcggccccgacggccccctgtacaaggtgagcgtgaccgccagagacgacgtgcccttcttcggcccccccctgcccgaccccgccgtgttcagaaagggccccgagttccaggagttcctgctgaccaagctgatcaacgccgagtacgcctgctacaaggccgagaagttcgccaagctggaggagagaaccagagccgccctgctggagaccctgtacgaggagctgcacatccacagccagagcatgatgggcctgggcggcgacgaggacaagatggagaacggcagcggcggcggcggcttcttcgagagcttcaagagagtgatcagaagcagaagccagagcatggacgccatgggcctgagcaacaagaagcccaacaccgtgagcaccagccacagcggcagcttcgcccccaacaaccccgacctggccaaggccgccggcatcagcctgatcgtgcccggcaagagccccaccagaaagaagagcggccccttcggcagcagaagaagcagcgccatcggcatcgagaacatccaggaggtgcaggagaagagagagagcccccccgccggccagaagacccccgacagcggccacgtgagccaggagcccaagagcgagaacagcagcacccagagcagccccgagatgcccaccaccaagaacagagccgagaccgccgcccagagagccgaggccctgaaggacttcagcagaagcagcagcagcgccagcagcttcgccagcgtggtggaggagaccgagggcgtggacggcgaggacaccggcctggagagcgtgagcagcagcggcaccccccacaagagagacagcttcatctacagcacctggctggaggacagcgtgagcaccaccagcggcggcagcagccccggccccagcagaagcccccaccccgacgccggcaagctgggcgaccccgcctgccccgagatcaagatccagctggaggccagcgagcagcacatgccccagctgggctgctag

SEQ ID NO: 10967 - DNA, 744 bp, synthetic construct
  source 1..744: mol_type = other DNA; note = Synthetic coding sequence
atgctggtgctgagaagcgccctgaccagagccctggccagcagaaccctggccccccagatgtgcagcagcttcgccaccggccccagacagtacgacggcatcttctacgagttcagaagctactacctgaagcccagcaagatgaacgagttcctggagaacttcgagaagaacgcccacctgagaaccgcccacagcgagctggtgggctactggagcgtggagttcggcggcagaatgaacaccgtgttccacatctggaagtacgacaacttcgcccacagaaccgaggtgagaaaggccctggccaaggacaaggagtggcaggagcagttcctgatccccaacctggccctgatcgacaagcaggagagcgagatcacctacctggtgccctggtgcaagctggagaagccccccaaggagggcgtgtacgagctggccaccttccagatgaagcccggcggccccgccctgtggggcgacgccttcaagagagccgtgcacgcccacgtgaacctgggctacaccaagctggtgggcgtgttccacaccgagtacggcgccctgaacagagtgcacgtgctgtggtggaacgagagcgccgacagcagagccgccggcagacacaagagccacgaggaccccagagtggtggccgccgtgagagagagcgtgaactacctggtgagccagcagaacatgctgctgatccccaccagcttcagccccctgaagtag

SEQ ID NO: 10968 - DNA, 3594 bp, synthetic construct; identical to SEQ ID NO: 9615
  source 1..3594: mol_type = other DNA; note = Synthetic coding sequence

SEQ ID NO: 10969 - DNA, 3594 bp, synthetic construct; identical to SEQ ID NO: 9615
  source 1..3594: mol_type = other DNA; note = Synthetic coding sequence

SEQ ID NO: 10970 - DNA, 1047 bp, synthetic construct
  source 1..1047: mol_type = other DNA; note = Synthetic coding sequence
atgagcctgcccagattccagagagtgaacttcggcccctacgacaactacatccccgtgagcgagctgagcaagaagagctggaaccagcagcacttcgccctgctgttccccaagccccagagacccggcaccaagagaagaagcaagcccagccagatcagagacaacaccgtgagcatcatcgacgaggagcagctgagaggcgacagaagacagcccctgtggatgtacagaagcctgatgagaatcagcgagagacccagcgtgtacctggccgccagaagacagcccctgaagcccaccagaaccgtggaggtggacagcaaggccgccgagatcggcaagaagggcgaggacaagaccacccagaaggacaccaccgacagcgagagcgagctgaagcagggcaagaaggacagcaagaagggcaaggacatcgagaagggcaaggaggagaagctggacgccaagaaggacagcaagaagggcaagaaggacgccgagaagggcaaggacagcgccaccgagagcgaggacgagaagggcggcgccaagaaggacaacaagaaggacaagaaggacagcaacaagggcaaggacagcgccaccgagagcgagggcgagaagggcggcaccgagaaggacagcaagaagggcaagaaggacagcaagaagggcaaggacagcgccatcgagctgcaggccgtgaaggccgacgagaagaaggacgaggacggcaagaaggacgccaacaagggcgacgagagcaaggacgccaagaaggacgccaaggagatcaagaagggcaagaaggacaagaagaagcccagcagcaccgacagcgacagcaaggacgacgtgaagaaggagagcaagaaggacgccaccaaggacgccaagaaggtggccaagaaggacaccgagaaggagagcgccgacagcaagaaggacgccaagaagaacgccaagaaggacgccaagaaggacgccaagaagaacgccaagaaggacgagaagaaggacgccaagaagaagggcaagtag

SEQ ID NO: 10971 - DNA, 1515 bp, synthetic construct
  source 1..1515: mol_type = other DNA; note = Synthetic coding sequence
atgaacagccagccccagaccagaagccccttcttccagagaccccagatccagccccccagagccaccatccccaacagcagccccagcatcagacccggcgcccagacccccaccgccgtgtaccaggccaaccagcacatcatgatggtgaaccacctgcccatgccctaccccgtgccccagggcccccagtactgcatcccccagtacagacacagcggccccccctacgtgggccccccccagcagtaccccgtgcagccccccggccccggccccttctaccccggccccggccccggcgacttccccaacgcctacggcacccccttctaccccagccagcccgtgtaccagagcgcccccatcatcgtgcccacccagcagcagcccccccccgccaagagagagaagaagaccatcagaatcagagaccccaaccagggcggcaaggacatcaccgaggagatcatgagcggcggcggcagcagaaaccccaccccccccatcggcagacccaccagcacccccacccccccccagcagctgcccagccaggtgcccgagcacagccccgtggtgtacggcaccgtggagagcgcccacctggccgccagcacccccgtgaccgccgccagcgaccagaagcaggaggagaagcccaagcccgaccccgtgctgaagagccccagccccgtgctgagactggtgctgagcggcgagaagaaggagcaggagggccagaccagcgagaccaccgccatcgtgagcatcgccgagctgcccctgccccccagccccaccaccgtgagcagcgtggccagaagcaccatcgccgcccccaccagcagcgccctgagcagccagcccatcttcaccaccgccatcgacgacagatgcgagctgagcagccccagagaggacaccatccccatccccagcctgaccagctgcaccgagaccagcgaccccctgcccaccaacgagaacgacgacgacatctgcaagaagccctgcagcgtggcccccaacgacatccccctggtgagcagcaccaacctgatcaacgagatcaacggcgtgagcgagaagctgagcgccaccgagagcatcgtggagatcgtgaagcaggaggtgctgcccctgaccctggagctggagatcctggagaacccccccgaggagatgaagctggagtgcatccccgcccccatcacccccagcaccgtgcccagcttcccccccaccccccccaccccccccgccagccccccccacacccccgtgatcgtgcccgccgccgccaccaccgtgagcagccccagcgccgccatcaccgtgcagagagtgctggaggaggacgagagcatcagaacctgcctgagcgaggacgccaaggagatccagaacaagatcgaggtggaggccgacggccagaccgaggagatcctggacagccagaacctgaacagcagaagaagccccgtgcccgagaccagcaacgagtgctag

SEQ ID NO: 10972 - DNA, 744 bp, synthetic construct
  source 1..744: mol_type = other DNA; note = Synthetic coding sequence
atgctgaagttcctggtgtggttcctgcagtggtgcgtgtgcgtgctggtgcagcccgccaaggagctgctgcactgcctgaagatgcagatgagaatcagcaagtacaccaagtgcctgcaggcccagatcgccatcaccgtgcccaagacctggaagaagcccaaggacagaaccagaaccaccgaggagatgctggaggccgagctggagctgaaggccgaggaggagctgagcatcgacaaggtgctggagagcgagcaggacaagatgagccagggcttccaccccgagagagaccccagcgacctgaagaaggtgaaggccgtggaggagaacggcgaggaggccgagcccgtgagaaacggcgccgagagcgtgagcgagggcgagggcatcgacgccaacagcggcagcaccgacagcagcggcgacggcgtgaccttccccttcaagcccgagagctggaagcccaccgacaccgagggcaagaagcagtacgacagagagttcctgctggacttccagttcatgcccgcctgcatccagaagcccgagggcctgccccccatcagcgacgtggtgctggacaagatcaaccagcccaagctgcccatgagaaccctggaccccagaatcctgcccagaggccccgacttcacccccgccttcgccgacttcggcagacagacccccggcggcagaggcgtgcccgtgagcgccagcagcctgcagctgacctag

SEQ ID NO: 10973 - DNA, 3918 bp, synthetic construct
  source 1..3918: mol_type = other DNA; note = Synthetic coding sequence
atgaacagccagccccagaccagaagccccttcttccagagaccccagatccagccccccagagccaccatccccaacagcagccccagcatcagacccggcgcccagacccccaccgccgtgtaccaggccaaccagcacatcatgatggtgaaccacctgcccatgccctaccccgtgccccagggcccccagtactgcatcccccagtacagacacagcggccccccctacgtgggccccccccagcagtaccccgtgcagccccccggccccggccccttctaccccggccccggccccggcgacttccccaacgcctacggcacccccttctaccccagccagcccgtgtaccagagcgcccccatcatcgtgcccacccagcagcagcccccccccgccaagagagagaagaagaccatcagaatcagagaccccaaccagggcggcaaggacatcaccgaggagatcatgagcggcggcggcagcagaaaccccaccccccccatcggcagacccaccagcacccccacccccccccagcagctgcccagccaggtgcccgagcacagccccgtggtgtacggcaccgtggagagcgcccacctggccgccagcacccccgtgaccgccgccagcgaccagaagcaggcccagatcgccatcaccgtgcccaagacctggaagaagcccaaggacagaaccagaaccaccgaggagatgctggaggccgagctggagctgaaggccgaggaggagctgagcatcgacaaggtgctggagagcgagcaggacaagatgagccagggcttccaccccgagagagaccccagcgacctgaagaaggtgaaggccgtggaggagaacggcgaggaggccgagcccgtgagaaacggcgccgagagcgtgagcgagggcgagggcatcgacgccaacagcggcagcaccgacagcagcggcgacggcgtgaccttccccttcaagcccgagagctggaagcccaccgacaccgagggcaagaagcagtacgacagagagttcctgctggacttccagttcatgcccgcctgcatccagaagcccgagggcctgccccccatcagcgacgtggtgctggacaagatcaaccagcccaagctgcccatgagaaccctggaccccagaatcctgcccagaggccccgacttcacccccgccttcgccgacttcggcagacagacccccggcggcagaggcgtgcccctgctgaacgtgggcagcagaagaagccagcccggccagagaagagagcccagaaagatcatcaccgtgagcgtgaaggaggacgtgcacctgaagaaggccgagaacgcctggaagcccagccagaagagagacagccaggccgacgaccccgagaacatcaagacccaggagctgttcagaaaggtgagaagcatcctgaacaagctgaccccccagatgttcaaccagctgatgaagcaggtgagcggcctgaccgtggacaccgaggagagactgaagggcgtgatcgacctggtgttcgagaaggccatcgacgagcccagcttcagcgtggcctacgccaacatgtgcagatgcctggtgaccctgaaggtgcccatggccgacaagcccggcaacaccgtgaacttcagaaagctgctgctgaacagatgccagaaggagttcgagaaggacaaggccgacgacgacgtgttcgagaagaagcagaaggagctggaggccgccagcgcccccgaggagagaaccagactgcacgacgagctggaggaggccaaggacaaggccagaagaagaagcatcggcaacatcaagttcatcggcgagctgttcaagctgaagatgctgaccgaggccatcatgcacgactgcgtggtgaagctgctgaagaaccacgacgaggagagcctggagtgcctgtgcagactgctgaccaccatcggcaaggacctggacttcgagaaggccaagcccagaatggaccagtacttcaaccagatggagaagatcgtgaaggagagaaagaccagcagcagaatcagattcatgctgcaggacgtgatcgacctgagactgtgcaactgggtgagcagaagagccgaccagggccccaagaccatcgagcagatccacaaggaggccaagatcgaggagcaggaggagcagagaaaggtgcagcagctgatgaccaaggagaagagaagacccggcgtgcagagagtggacgagggcggctggaacaccgtgcagggcgccaagaacagcagagtgctggaccccagcaagttcctgaagatcaccaagcccaccatcgacgagaagatccagctggtgcccaaggcccagctgggcagctggggcaagggcagcagcggcggcgccaaggccagcgagaccgacgccctgagaagcagcgccagcagcctgaacagattcagcgccctgcagccccccgcccccagcggcagcacccccagcacccccgtggagttcgacagcagaagaaccctgaccagcagaggcagcatgggcagagagaagaacgacaagcccctgcccagcgccaccgccagacccaacaccttcatgagaggcggcagcagcaaggacctgctggacaaccagagccaggaggagcagagaagagagatgctggagaccgtgaagcagctgaccggcggcgtggacgtggagagaaacagcaccgaggccgagagaaacaagaccagagagagcgccaagcccgagatcagcgccatgagcgcccacgacaaggccgccctgagcgaggaggagctggagagaaagagcaagagcatcatcgacgagttcctgcacatcaacgacttcaaggaggccatgcagtgcgtggaggagctgaacgcccagggcctgctgcacgtgttcgtgagagtgggcgtggagagcaccctggagagaagccagatcaccagagaccacatgggccagctgctgtaccagctggtgcagagcgagaagctgagcaagcaggacttcttcaagggcttcagcgagaccctggagctggccgacgacatggccatcgacatcccccacatctggctgtacctggccgagctggtgacccccatgctgaaggagggcggcatcagcatgagagagctgaccatcgagttcagcaagcccctgctgcccgtgggcagagccggcgtgctgctgagcgagatcctgcacctgctgtgcaagcagatgagccacaagaaggtgggcgccctgtggagagaggccgacctgagctggaaggacttcctgcccgagggcgaggacgtgcacaacttcctgctggagcagaagctggacttcatcgagagcgacagcccctgcagcagcgaggccctgagcaagaaggagctgagcgccgaggagctgtacaagagactggagaagctgatcatcgaggacaaggccaacgacgagcagatcttcgactgggtggaggccaacctggacgagatccagatgagcagccccaccttcctgagagccctgatgaccgccgtgtgcaaggccgccatcatcgccgacagcagcaccttcagagtggacaccgccgtgatcaagcagagagtgcccatcctgctgaagtacctggacagcgacaccgagaaggagctgcaggccctgtacgccctgcaggccagcatcgtgaagctggaccagcccgccaacctgctgagaatgttcttcgactgcctgtacgacgaggaggtgatcagcgaggacgccttctacaagtgggagagcagcaaggaccccgccgagcagaacggcaagggcgtggccctgaagagcgtgaccgccttcttcacctggctgagagaggccgaggaggagagcgaggacaactag

SEQ ID NO: 10974 - DNA, 4776 bp, synthetic construct
  source 1..4776: mol_type = other DNA; note = Synthetic coding sequence
atgaacagccagccccagaccagaagccccggcggcttcagacccatccagttcttccagagaccccagatccagccccccagagccaccatccccaacagcagccccagcatcagacccggcgcccagacccccaccgccgtgtaccaggccaaccagcacatcatgatggtgaaccacctgcccatgccctaccccgtgccccagggcccccagtactgcatcccccagtacagacacagcggccccccctacgtgggccccccccagcagtaccccgtgcagccccccggccccggccccttctaccccggccccggccccggcgacttccccaacgcctacggcacccccttctaccccagccagcccgtgtaccagagcgcccccatcatcgtgcccacccagcagcagcccccccccgccaagagagagaagaagaccatcagaatcagagaccccaaccagggcggcaaggacatcaccgaggagatcatgagcggcggcggcagcagaaaccccaccccccccatcggcagacccaccagcacccccacccccccccagctgcccagccaggtgcccgagcacagccccgtggtgtacggcaccgtggagagcgcccacctggccgccagcacccccgtgaccgccgccagcgaccagaagcaggaggagaagcccaagcccgaccccgtgctgaagagccccagccccgtgctgagactggtgctgagcggcgagaagaaggagcaggagggccagaccagcgagaccaccgccatcgtgagcatcgccgagctgcccctgccccccagccccaccaccgtgagcagcgtggccagaagcaccatcgccgcccccaccagcagcgccctgagcagccagcccatcttcaccaccgccatcgacgacagatgcgagctgagcagccccagagaggacaccatccccatccccagcctgaccagctgcaccgagaccagcgaccccctgcccaccaacgagaacgacgacgacatctgcaagaagccctgcagcgtggcccccaacgacatccccctggtgagcagcaccaacctgatcaacgagatcaacggcgtgagcgagaagctgagcgccaccgagagcatcgtggagatcgtgaagcaggaggtgctgcccctgaccctggagctggagatcctggagaacccccccgaggagatgaagctggagtgcatccccgcccccatcacccccagcaccgtgcccagcttcccccccaccccccccaccccccccgccagccccccccacacccccgtgatcgtgcccgccgccgccaccaccgtgagcagccccagcgccgccatcaccgtgcagagagtgctggaggaggacgagagcatcagaacctgcctgagcgaggacgccaaggagatccagaacaagatcgaggtggaggccgacggccagaccgaggagatcctggacagccagaacctgaacagcagaagaagccccgtgcccgcccagatcgccatcaccgtgcccaagacctggaagaagcccaaggacagaaccagaaccaccgaggagatgctggaggccgagctggagctgaaggccgaggaggagctgagcatcgacaaggtgctggagagcgagcaggacaagatgagccagggcttccaccccgagagagaccccagcgacctgaagaaggtgaaggccgtggaggagaacggcgaggaggccgagcccgtgagaaacggcgccgagagcgtgagcgagggcgagggcatcgacgccaacagcggcagcaccgacagcagcggcgacggcgtgaccttccccttcaagcccgagagctggaagcccaccgacaccgagggcaagaagcagtacgacagagagttcctgctggacttccagttcatgcccgcctgcatccagaagcccgagggcctgccccccatcagcgacgtggtgctggacaagatcaaccagcccaagctgcccatgagaaccctggaccccagaatcctgcccagaggccccgacttcacccccgccttcgccgacttcggcagacagacccccggcggcagaggcgtgcccctgctgaacgtgggcagcagaagaagccagcccggccagagaagagagcccagaaagatcatcaccgtgagcgtgaaggaggacgtgcacctgaagaaggccgagaacgcctggaagcccagccagaagagagacagccaggccgacgaccccgagaacatcaagacccaggagctgttcagaaaggtgagaagcatcctgaacaagctgaccccccagatgttcaaccagctgatgaagcaggtgagcggcctgaccgtggacaccgaggagagactgaagggcgtgatcgacctggtgttcgagaaggccatcgacgagcccagcttcagcgtggcctacgccaacatgtgcagatgcctggtgaccctgaaggtgcccatggccgacaagcccggcaacaccgtgaacttcagaaagctgctgctgaacagatgccagaaggagttcgagaaggacaaggccgacgacgacgtgttcgagaagaagcagaaggagctggaggccgccagcgcccccgaggagagaaccagactgcacgacgagctggaggaggccaaggacaaggccagaagaagaagcatcggcaacatcaagttcatcggcgagctgttcaagctgaagatgctgaccgaggccatcatgcacgactgcgtggtgaagctgctgaagaaccacgacgaggagagcctggagtgcctgtgcagactgctgaccaccatcggcaaggacctggacttcgagaaggccaagcccagaatggaccagtacttcaaccagatggagaagatcgtgaaggagagaaagaccagcagcagaatcagattcatgctgcaggacgtgatcgacctgagactgtgcaactgggtgagcagaagagccgaccagggccccaagaccatcgagcagatccacaaggaggccaagatcgaggagcaggaggagcagagaaaggtgcagcagctgatgaccaaggagaagagaagacccggcgtgcagagagtggacgagggcggctggaacaccgtgcagggcgccaagaacagcagagtgctggaccccagcaagttcctgaagatcaccaagcccaccatcgacgagaagatccagctggtgcccaaggcccagctgggcagctggggcaagggcagcagcggcggcgccaaggccagcgagaccgacgccctgagaagcagcgccagcagcctgaacagattcagcgccctgcagccccccgcccccagcggcagcacccccagcacccccgtggagttcgacagcagaagaaccctgaccagcagaggcagcatgggcagagagaagaacgacaagcccctgcccagcgccaccgccagacccaacaccttcatgagaggcggcagcagcaaggacctgctggacaaccagagccaggaggagcagagaagagagatgctggagaccgtgaagcagctgaccggcggcgtggacgtggagagaaacagcaccgaggccgagagaaacaagaccagagagagcgccaagcccgagatcagcgccatgagcgcccacgacaaggccgccctgagcgaggaggagctggagagaaagagcaagagcatcatcgacgagttcctgcacatcaacgacttcaaggaggccatgcagtgcgtggaggagctgaacgcccagggcctgctgcacgtgttcgtgagagtgggcgtggagagcaccctggagagaagccagatcaccagagaccacatgggccagctgctgtaccagctggtgcagagcgagaagctgagcaagcaggacttcttcaagggcttcagcgagaccctggagctggccgacgacatggccatcgacatcccccacatctggctgtacctggccgagctggtgacccccatgctgaaggagggcggcatcagcatgagagagctgaccatcgagttcagcaagcccctgctgcccgtgggcagagccggcgtgctgctgagcgagatcctgcacctgctgtgcaagcagatgagccacaagaaggtgggcgccctgtggagagaggccgacctgagctggaaggacttcctgcccgagggcgaggacgtgcacaacttcctgctggagcagaagctggacttcatcgagagcgacagcccctgcagcagcgaggccctgagcaagaaggagctgagcgccgaggagctgtacaagagactggagaagctgatcatcgaggacaaggccaacgacgagcagatcttcgactgggtggaggccaacctggacgagatccagatgagcagccccaccttcctgagagccctgatgaccgccgtgtgcaaggccgccatcatcgccgacagcagcaccttcagagtggacaccgccgtgatcaagcagagagtgcccatcctgctgaagtacctggacagcgacaccgagaaggagctgcaggccctgtacgccctgcaggccagcatcgtgaagctggaccagcccgccaacctgctgagaatgttcttcgactgcctgtacgacgaggaggtgatcagcgaggacgccttctacaagtgggagagcagcaaggaccccgccgagcagaacggcaagggcgtggccctgaagagcgtgaccgccttcttcacctggctgagagaggccgaggaggagagcgaggacaactag

SEQ ID NO: 10975 - DNA, 1002 bp, synthetic construct
  source 1..1002: mol_type = other DNA; note = Synthetic coding sequence
atgagcggcgacgagatgatcttcgaccccaccatgagcaagaagaagaagaagaagaagaagcccttcatgctggacgaggagggcgacacccagaccgaggagacccagcccagcgagaccaaggaggtggagcccgagcccaccgaggacaaggacctggaggccgacgaggaggacaccagaaagaaggacgccagcgacgacctggacgacctgaacttcttcaaccagaagaagaagaagaagaagaccaagaagatcttcgacatcgacgaggccgaggagggcgtgaaggacctgaagatcgagagcgacgtgcaggagcccaccgagcccgaggacgacctggacatcatgctgggcaacaagaagaagaagaagaagaacgtgaagttccccgacgaggacgagatcctggagaaggacgaggccctggaggacgaggacaacaagaaggacgacggcatcagcttcagcaaccagaccggccccgcctgggccggcagcgagagagactacacctacgaggagctgctgaacagagtgttcaacatcatgagagagaagaaccccgacatggtggccggcgagaagagaaagttcgtgatgaagcccccccaggtggtgagagtgggcaccaagaagaccagcttcgtgaacttcaccgacatctgcaagctgctgcacagacagcccaagcacctgctggccttcctgctggccgagctgggcaccagcggcagcatcgacggcaacaaccagctggtgatcaagggcagattccagcagaagcagatcgagaacgtgctgagaagatacatcaaggagtacgtgacctgccacacctgcagaagccccgacaccatcctgcagaaggacaccagactgtacttcctgcagtgcgagacctgccacagcagatgcagcgtggccagcatcaagaccggcttccaggccgtgaccggcaagagagcccagctgagagccaaggccaactag

SEQ ID NO: 10976 - DNA, 2619 bp, synthetic construct
  source 1..2619: mol_type = other DNA; note = Synthetic coding sequence
atgggcgagggcggcctgccccccgccttccagctgctgctgagagcctgcgaccagggcgacaccgagaccgccagaagactgctggagcccggcgccgccgagcccgccgagagaggcgccgagcccgaggccggcgccgagcccgccggcgccgaggtggccggccccggcgccgccgccgccggcgccgtgggcgcccccgtgcccgtggactgcagcgacgaggccggcaacaccgccctgcagttcgccgccgccggcggccacgagcccctggtgagattcctgctgagaagaggcgccagcgtgaacagcagaaaccactacggctggagcgccctgatgcaggccgccagattcggccacgtgagcgtggcccacctgctgctggaccacggcgccgacgtgaacgcccagaacagactgggcgccagcgtgctgaccgtggccagcagaggcggccacctgggcgtggtgaagctgctgctggaggccggcgccttcgtggaccaccaccaccccagcggcgagcagctgggcctgggcggcagcagagacgagcccctggacatcaccgccctgatggccgccatccagcacggccacgaggccgtggtgagactgctgatggagtggggcgccgaccccaaccacgccgccagaaccgtgggctggagccccctgatgctggccgccctgaccggcagactgggcgtggcccagcagctggtggagaagggcgccaaccccgaccacctgagcgtgctggagaagaccgccttcgaggtggccctggactgcaagcacagagacctggtggactacctggaccccctgaccaccgtgagacccaagaccgacgaggagaagagaagacccgacatcttccacgccctgaagatgggcaacttccagctggtgaaggagatcgccgacgaggaccccagccacgtgaacctggtgaacggcgacggcgccacccccctgatgctggccgccgtgaccggccagctggccctggtgcagctgctggtggagagacacgccgacgtggacaagcaggacagcgtgcacggctggaccgccctgatgcaggccacctaccacggcaacaaggagatcgtgaagtacctgctgaaccagggcgccgacgtgaccctgagagccaagaacggctacaccgccttcgacctggtgatgctgctgaacgaccccgacaccgagctggtgagactgctggccagcgtgtgcatgcaggtgaacaaggacaagggcagacccagccaccagccccccctgccccacagcaaggtgagacagccctggagcatccccgtgctgcccgacgacaagggcggcctgaagagctggtggaacagaatgagcaacagattcagaaagctgaagctgatgcagaccctgcccagaggcctgagcagcaaccagcccctgcccttcagcgacgagcccgagcccgccctggacagcaccatgagagccgccccccaggacaagaccagcagaagcgccctgcccgacgccgcccccgtgaccaaggacaacggccccggcagcaccagaggcgagaaggaggacaccctgctgaccaccatgctgagaaacggcgcccccctgaccagactgcccagcgacaagctgaaggccgtgatcccccccttcctgccccccagcagcttcgagctgtggagcagcgacagaagcagaaccagacacaacggcaaggccgaccccatgaagaccgccctgccccagagagccagcagaggccaccccgtgggcggcggcggcaccgacaccacccccgtgagacccgtgaagttccccagcctgcccagaagccccgccagcagcgccaacagcggcaacttcaaccacagcccccacagcagcggcggcagcagcggcgtgggcgtgagcagacacggcggcgagctgctgaacagaagcggcggcagcatcgacaacgtgctgagccagatcgccgcccagagaaagaaggccgccggcctgctggagcagaagcccagccacagaagcagccccgtgggccccgcccccggcagcagccccagcgagctgcccgccagccccgccggcggcagcgcccccgtgggcaagcagaagctggagaccagcaagagaccccccagcggcaccagcaccaccagcaagagcaccagccccaccctgacccccagccccagccccaagggccacaccgccgagagcagcgtgagcagcagcagcagccacagacagagcaagagcagcggcggcagcagcagcggcaccatcaccgacgaggacgagctgaccggcatcctgaagaagctgagcctggagaagtaccagcccatcttcgaggagcaggaggtggacatggaggccttcctgaccctgaccgacggcgacctgaaggagctgggcatcaagaccgacggcagcagacagcagatcctggccgccatcagcgagctgaacgccggcaagggcagagagagacagatcctgcaggagaccatccacaacttccacagcagcttcgagagcagcgccagcaacaccagagcccccggcaacagcccctgcgcctag

SEQ ID NO: 10977 - DNA, 483 bp, synthetic construct
  source 1..483: mol_type = other DNA; note = Synthetic coding sequence
atggaggccgagagaccccaggaggaggaggacggcgagcagggccccccccaggacgaggagggctggcccccccccaacagcaccaccagaccctggagaagcgccccccccagcccccccccccccggcaccagacacaccgccctgggccccagaagcgccagcctgctgagcctgcagaccgagctgctgctggacctggtggccgaggcccagagcagaagactggaggagcagagagccaccttctacaccccccagaaccccagcagcctggcccccgcccccctgagacccctggaggacagagagcagctgtacagcaccatcctgagccaccagtgccagagaatggaggcccagagaagcgagccccccctgccccccggcggccaggagctgctggagctgctgctgagagtgcagggcggcggcagaatggaggagcagagaagcagaccccccacccacacctgctag

SEQ ID NO: 10978 - DNA, 483 bp, synthetic construct; identical to SEQ ID NO: 10977
  source 1..483: mol_type = other DNA; note = Synthetic coding sequence

SEQ ID NO: 10979 - DNA, 2790 bp, synthetic construct
  source 1..2790: mol_type = other DNA; note = Synthetic coding sequence
atgcagggcctgcccgacccccccagccagagaggcatcatccccagagccttcgagcacgtgttcgagagcgtgcagtgcgccgagaacaccaagttcctggtgagagccagctacctggagatctacaacgaggacgtgagagacctgctgggcgccgacaccaagcagaagctggagctgaaggagcaccccgagaagggcgtgtacgtgaagggcctgagcatgcacaccgtgcacagcgtggcccagtgcgagcacatcatggagaccggctggaagaacagaagcgtgggctacaccctgatgaacaaggacagcagcagaagccacagcatcttcaccatcagcatcgagatgagcgccgtggacgagagaggcaaggaccacctgagagccggcaagctgaacctggtggacctggccggcagcgagagacagagcaagaccggcgccaccggcgagagactgaaggaggccaccaagatcaacctgagcctgagcgccctgggcaacgtgatcagcgccctggtggacggcagatgcaagcacgtgccctacagagacagcaagctgaccagactgctgcaggacagcctgggcggcaacaccaagaccctgatggtggcctgcctgagccccgccgacaacaactacgacgagaccctgagcaccctgagatacgccaacagagccaagaacatcagaaacaagcccagaatcaacgaggaccccaaggacgccctgctgagagagtaccaggaggagatcaagaagctgaaggccatcctgacccagcagatgagccccagcagcctgagcgccctgctgagcagacaggtgccccccgaccccgtgcaggtggaggagaagctgctgccccagcccgtgatccagcacgacgtggaggccgagaagcagctgatcagagaggagtacgaggagagactggccagactgaaggccgactacaaggccgagcaggagagcagagccagactggaggaggacatcaccgccatgagaaacagctacgacgtgagactgagcaccctggaggagaacctgagaaaggagaccgaggccgtgctgcaggtgggcgtgctgtacaaggccgaggtgatgagcagagccgagttcgccagcagcgccgagtacccccccgccttccagtacgagaccgtggtgaagcccaaggtgttcagcaccaccgacaccctgcccagcgacgacgtgagcaagacccaggtgagcagcagattcgccgagctgcccaaggtggagcccagcaagagcgagatcagcctgggcagcagcgagagcagcagcctggaggagaccagcgtgagcgaggccttccccggccccgaggagcccagcaacgtggaggtgagcatgcccaccgaggagagcagaagcagatacttcctggacgagtgcctgggccaggaggccgccggccacctgctgggcgagcagaactacctgccccaggaggagccccaggaggtgcccctgcagggcctgctgggcctgcaggaccccttcgccgaggtggaggccaagctggccagactgagcagcaccgtggccagaaccgacgccccccaggccgacgtgcccaaggtgcccgtgcaggtgcccgcccccaccgacctgctggagcccagcgacgccagacccgaggccgaggccgccgacgacttcccccccagacccgaggtggacctggccagcgaggtggccctggaggtggtgagaaccgccgagcccggcgtgtggctggaggcccaggcccccgtggccctggtggcccagcccgagcccctgcccgccaccgccggcgtgaagagagagagcgtgggcatggaggtggccgtgctgaccgacgaccccctgcccgtggtggaccagcagcaggtgctggccagactgcagctgctggagcagcaggtggtgggcggcgagcaggccaagaacaaggacctgaaggagaagcacaagagaagaaagagatacgccgacgagagaagaaagcagctggtggccgccctgcagaacagcgacgaggacagcggcgactgggtgctgctgaacgtgtacgacagcatccaggaggaggtgagagccaagagcaagctgctggagaagatgcagagaaagctgagagccgccgaggtggagatcaaggacctgcagagcgagttccagctggagaagatcgactacctggccaccatcagaagacaggagagagacagcatgctgctgcagcagctgctggagcaggtgcagcccctgatcagaagagactgcaactacagcaacctggagaagatcctgagagagagctgctgggacgaggacaacggcttctggaagatcccccaccccgtgatcaccaagaccagcctgcccgtggccgtgagcaccggcccccagaacaagcccgccagaaagaccagcgccgccgacaacggcgagcccaacatggaggacgacagatacagactgatgctgagcagaagcaacagcgagaacatcgccagcaactacttcagaagcaagagagccagccagatcctgagcaccgacgccagaaagagcctgacccaccacaacagcccccccggcctgagctgccccctgagcaacaacagcgccatcccccccacccaggcccccgagatgccccagcccagacccttcagactggagagcctggacatccccttcaccaaggccaagagaaagaagagcaagagcaacttcggcagcgagcccctgtag

SEQ ID NO: 10980 - DNA, 426 bp, synthetic construct
  source 1..426: mol_type = other DNA; note = Synthetic coding sequence
atgaacaagcacgtgctgaagatccagaaggagctggaggaggccaaggagaagctggccagacagcacaagagaagaagcgacgacgacgacagaagcagcgacagaaaggacggcgtgctggaggagcagatcgagagactgcaggagaaggtggagagcgcccagagcgagcagaagaacctgttcctggtgatcttccagagattcatcatgatcctgaccgagcacctggtgagatgcgagaccgacggcaccagcgtgctgaccccctggtacaagaactgcatcgagagactgcagcagatcttcctgcaggtgtgcggcgagctgagactgggcaacaacaccatcctgagccacaaggacttcagcctgaagaagatcctggtgaagttcgtgagaagactgtacagcacctgctag

SEQ ID NO: 10981 - DNA, 2373 bp, synthetic construct
  source 1..2373: mol_type = other DNA; note = Synthetic coding sequence
atgagcagaagaagacacagcgacgagaacgacggcggccagccccacaagagaagaaagaccagcgacgccaacgagaccgaggaccacctggagagcctgatctgcaaggtgggcgagaagagcgcctgcagcctggagagcaacctggagggcctggccggcgtgctggaggccgacctgcccaactacaagagcaagatcctgagactgctgtgcaccgtggccagactgctgcccgagaagctgaccatctacaccaccctggtgggcctgctgaacgccagaaactacaacttcggcggcgagttcgtggaggccatgatcagacagctgaaggagagcctgaaggccaacaactacaacgaggccgtgtacctggtgagattcctgagcgacctggtgaactgccacgtgatcgccgcccccagcatggtggccatgttcgagaacttcgtgagcgtgacccaggaggaggacgtgccccaggtgagaagagactggtacgtgtacgccttcctgagcagcctgccctgggtgggcaaggagctgtacgagaagaaggacgccgagatggacagaatcttcgccaacaccgagagctacctgaagagaagacagaagacccacgtgcccatgctgcaggtgtggaccgccgacaagccccacccccaggaggagtacctggactgcctgtgggcccagatccagaagctgaagaaggacagatggcaggagagacacatcctgagaccctacctggccttcgacagcatcctgtgcgaggccctgcagcacaacctgccccccttcaccccccccccccacaccgaggacagcgtgtaccccatgcccagagtgatcttcagaatgttcgactacaccgacgaccccgagggccccgtgatgcccggcagccacagcgtggagagattcgtgatcgaggagaacctgcactgcatcatcaagagccactggaaggagagaaagacctgcgccgcccagctggtgagctaccccggcaagaacaagatccccctgaactaccacatcgtggaggtgatcttcgccgagctgttccagctgcccgcccccccccacatcgacgtgatgtacaccaccctgctgatcgagctgtgcaagctgcagcccggcagcctgccccaggtgctggcccaggccaccgagatgctgtacatgagactggacaccatgaacaccacctgcgtggacagattcatcaactggttcagccaccacctgagcaacttccagttcagatggagctgggaggactggagcgactgcctgagccaggaccccgagagccccaagcccaagttcgtgagagaggtgctggagaagtgcatgagactgagctaccaccagagaatcctggacatcgtgccccccaccttcagcgccctgtgccccgccaaccccacctgcatctacaagtacggcgacgagagcagcaacagcctgcccggccacagcgtggccctgtgcctggccgtggccttcaagagcaaggccaccaacgacgagatcttcagcatcctgaaggacgtgcccaaccccaaccaggacgacgacgacgacgagggcttcagcttcaaccccctgaagatcgaggtgttcgtgcagaccctgctgcacctggccgccaagagcttcagccacagcttcagcgccctggccaagttccacgaggtgttcaagaccctggccgagagcgacgagggcaagctgcacgtgctgagagtgatgttcgaggtgtggagaaaccacccccagatgatcgccgtgctggtggacaagatgatcagaacccagatcgtggactgcgccgccgtggccaactggatcttcagcagcgagctgagcagagacttcaccagactgttcgtgtgggagatcctgcacagcaccatcagaaagatgaacaagcacgtgctgaagatccagaaggagctggaggaggccaaggagaagctggccagacagcacaagagaagaagcgacgacgacgacagaagcagcgacagaaaggacggcgtgctggaggagcagatcgagagactgcaggagaaggtggagagcgcccagagcgagcagaagaacctgttcctggtgatcttccagagattcatcatgatcctgaccgagcacctggtgagatgcgagaccgacggcaccagcgtgctgaccccctggtacaagaactgcatcgagagactgcagcagatcttcctgcagcaccaccagatcatccagcagtacatggtgaccctggagaacctgctgttcaccgccgagctggacccccacatcctggccgtgttccagcagttctgcgccctgcaggcctag

SEQ ID NO: 10982 - DNA, 699 bp, synthetic construct
  source 1..699: mol_type = other DNA; note = Synthetic coding sequence
atgagccaggtgctgagcatcctgggcatgcacaccctgatgagcaaccagcagtactaccaggccctgagcagcagcagcatcatgaacaaggagggcctgaacagcgtgatcaagcccacccagtacaagcccgtgcccgacgaggagcccaacagcaccgacgtggaggagaccctggagagaatcaagaacaacgaccccaagctggaggaggtgaacctgaacaacatcagaaacatccccatccccaccctgaaggcctacgccgaggccctgaaggagaacagctacgtgaagaagttcagcatcgtgggcaccagaagcaacgaccccgtggcctacgccctggccgagatgctgaaggagaacaaggtgctgaagaccctgaacgtggagagcaacttcatcagcggcgccggcatcctgagactggtggaggccctgccctacaacaccagcctggtggagatgaagatcgacaaccagagccagcccctgggcaacaaggtggagatggagatcgtgagcatgctggagaagaacgccaccctgctgaagttcggctaccacttcacccagcagggccccagactgagagccagcaacgccatgatgaacaacaacgacctggtgagaaagagaagactggccgacctgaccggccccatcatccccaagtgcagaagcggcgtgtag

SEQ ID NO: 10983 - DNA, 2403 bp, synthetic construct
  source 1..2403: mol_type = other DNA; note = Synthetic coding sequence
atgagcagcctgggcgccagcttcgtgcagatcaagttcgacgacctgcagttcttcgagaactgcggcggcggcagcttcggcagcgtgtacagagccaagtggatcagccaggacaaggaggtggccgtgaagaagctgctgaagatcgagaaggaggccgagatcctgagcgtgctgagccacagaaacatcatccagttctacggcgtgatcctggagccccccaactacggcatcgtgaccgagtacgccagcctgggcagcctgtacgactacatcaacagcaacagaagcgaggagatggacatggaccacatcatgacctgggccaccgacgtggccaagggcatgcactacctgcacatggaggcccccgtgaaggtgatccacagagacctgaagagcagaaacgtggtgatcgccgccgacggcgtgctgaagatctgcgacttcggcgccagcagattccacaaccacaccacccacatgagcctggtgggcaccttcccctggatggcccccgaggtgatccagagcctgcccgtgagcgagacctgcgacacctacagctacggcgtggtgctgtgggagatgctgaccagagaggtgcccttcaagggcctggagggcctgcaggtggcctggctggtggtggagaagaacgagagactgaccatccccagcagctgccccagaagcttcgccgagctgctgcaccagtgctgggaggccgacgccaagaagagacccagcttcaagcagatcatcagcatcctggagagcatgagcaacgacaccagcctgcccgacaagtgcaacagcttcctgcacaacaaggccgagtggagatgcgagatcgaggccaccctggagagactgaagaagctggagagagacctgagcttcaaggagcaggagctgaaggagagagagagaagactgaagatgtgggagcagaagctgaccgagcagagcaacacccccctgctgcccagcttcgagatcggcgcctggaccgaggacgacgtgtactgctgggtgcagcagctggtgagaaagggcgacagcagcgccgagatgagcgtgtacgccagcctgttcaaggagaacaacatcaccggcaagagactgctgctgctggaggaggaggacctgaaggacatgggcatcgtgagcaagggccacatcatccacttcaagagcgccatcgagaagctgacccacgactacatcaacctgttccacttcccccccctgatcaaggacagcggcggcgagcccgaggagaacgaggagaagatcgtgaacctggagctggtgttcggcttccacctgaagcccggcaccggcccccaggactgcaagtggaagatgtacatggagatggacggcgacgagatcgccatcacctacatcaaggacgtgaccttcaacaccaacctgcccgacgccgagatcctgaagatgaccaagccccccttcgtgatggagaagtggatcgtgggcatcgccaagagccagaccgtggagtgcaccgtgacctacgagagcgacgtgagaacccccaagagcaccaagcacgtgcacagcatccagtggagcagaaccaagccccaggacgaggtgaaggccgtgcagctggccatccagaccctgttcaccaacagcgacggcaaccccggcagcagaagcgacagcagcgccgactgccagtggctggacaccctgagaatgagacagatcgccagcaacaccagcctgcagagaagccagagcaaccccatcctgggcagccccttcttcagccacttcgacggccaggacagctacgccgccgccgtgagaagaccccaggtgcccatcaagtaccagcagatcacccccgtgaaccagagcagaagcagcagccccacccagtacggcctgaccaagaacttcagcagcctgcacctgaacagcagagacagcggcttcagcagcggcaacaccgacaccagcagcgagagaggcagatacagcgacagaagcagaaacaagtacggcagaggcagcatcagcctgaacagcagccccagaggcagatacagcggcaagagccagcacagcacccccagcagaggcagataccccggcaagttctacagagtgagccagagcgccctgaacccccaccagagccccgacttcaagagaagccccagagacctgcaccagcccaacaccatccccggcatgcccctgcaccccgagaccgacagcagagccagcgaggaggacagcaaggtgagcgagggcggctggaccaaggtggagtacagaaagaagccccacagacccagccccgccaagaccaacaaggagagagccagaggcgaccacagaggctggagaaacttctag

SEQ ID NO: 10984 - DNA, 1071 bp, synthetic construct
  source 1..1071: mol_type = other DNA; note = Synthetic coding sequence
atgagaagattcctgagacccggccacgaccccgtgagagagagactgaagagagacctgttccagttcaacaagaccgtggagcacggcttcccccaccagcccagcgccctgggctacagccccagcctgagaatcctggccatcggcaccagaagcggcgccatcaagctgtacggcgcccccggcgtggagttcatgggcctgcaccaggagaacaacgccgtgacccagatccacctgctgcccggccagtgccagctggtgaccctgctggacgacaacagcctgcacctgtggagcctgaaggtgaagggcggcgccagcgagctgcaggaggacgagagcttcaccctgagaggcccccccggcgccgcccccagcgccacccagatcaccgtggtgctgccccacagcagctgcgagctgctgtacctgggcaccgagagcggcaacgtgttcgtggtgcagctgcccgccttcagagccctggaggacagaaccatcagcagcgacgccgtgctgcagagactgcccgaggaggccagacacagaagagtgttcgagatggtggaggccctgcaggagcaccccagagaccccaaccagatcctgatcggctacagcagaggcctggtggtgatctgggacctgcagggcagcagagtgctgtaccacttcctgagcagccagcagctggagaacatctggtggcagagagacggcagactgctggtgagctgccacagcgacggcagctactgccagtggcccgtgagcagcgaggcccagcagcccgagcccctgagaagcctggtgccctacggccccttcccctgcaaggccatcaccagaatcctgtggctgaccaccagacagggcctgcccttcaccatcttccagggcggcatgcccagagccagctacggcgacagacactgcatcagcgtgatccacgacggccagcagaccgccttcgacttcaccagcagagtgatcggcttcaccgtgctgaccgaggccgaccccgccgccagcagaagagccagcggcgtgggcgcccagggctag

SEQ ID NO: 10985 - DNA, 2526 bp, synthetic construct
  source 1..2526: mol_type = other DNA; note = Synthetic coding sequence
atgggcgccagagccgccggcaccagcagcggcggcggccccagaccctgcctggccagaggcctgagcgccagccccttccccgccaagcagcagcacccccaggccggcgccagccccgccgagctgcagcagagagcctactacagagccagacaggacgccgccagccagcccggcctgggcttcctgatcagccccagcagctgcagcagctggggccccggcagcttcaccagaagctgcggctaccccaccctgtgcagcagctggatcagcaagagagagcccggcgagctgagcggcgtgtggaccagcgcctggagaacccacgccgccttcaccggcagccaggacctgtgcctgtacaagggcctgggcagcatctacgaggacaagaccgccctgagcctgctgggcctgggcgaggagaccaacgaggaggacgaggaggagagcgacaaccagagcgtgcacagcagcagcgagcccctgagaaacctgcacctggacatcggcgccctgggcggcgacttcgagtacgaggagagcctgagaaccagccagcccgaggagaagaaggacgtgagcctggacagcgacgccgccggcccccccaccccctgcaagcccagcagccccggcgccgacagcagcctgagcagcgccgtgggcaagggcagacagggcagcggcgccagacccggcctgcccgagaaggaggagaacgagaagagcgagcccaagatctgcagaaacctggtgacccccaaggccgaccccaccggcagcgagcccgccaaggccagcgagaaggaggcccccgaggacaccgtggacgccggcgaggagggcagcagaagagaggaggccgccaaggagcccaagaagaaggccagcgccctggaggagggcagcagcgacgccagccaggagctggagatcagcgagcacatgaaggagccccagctgagcgacagcatcgccagcgaccccaagagcttccacggcctggacttcggcttcagaagcagaatcagcgagcacctgctggacgtggacgtgctgagccccgtgctgggcggcgcctgcagacaggcccagcagcccctgggcatcgaggacaaggacgacagccagagcagccaggacgagctgcagagcaagcagagcaagggcctggaggagagataccacagactgagcccccccctgccccacgaggagagagcccagagcccccccagaagcctggccaccgaggaggagcccccccagggccccgagggccagcccgagtggaaggaggccgaggagctgggcgaggacagcgccgccagcctgagcctgcagctgagcctgcagagaagaagcaccgagcccgtggccccccccgagcagctgagcgaggccgccctgaaggccatggaggaggccgtggcccaggtgctggagcaggaccagagacacctgctggagagcaagcaggagaagatgcagcagctgagagagaagctgtgccaggaggaggaggaggagatcctgagactgcaccagcagaaggagcagagcctgagcagcctgagagagagactgcagaaggccatcgaggaggaggaggccagaatgagagaggaggagagccagagactgagctggctgagagcccaggtgcagagcagcacccaggccgacgaggaccagatcagagccgagcaggaggccagcctgcagaagctgagagaggagctggagagccagcagaaggccgagagagccagcctggagcagaagaacagacagatgctggagcagctgaaggaggagatcgaggccagcgagaagagcgagcaggccgccctgaacgccgccaaggagaaggccctgcagcagctgagagagcagctggagggcgagagaaaggaggccgtggccaccctggagaaggagcacagcgccgagctggagagactgtgcagcagcctggaggccaagcacagagaggtggtgagcagcctgcagaagaagatccaggaggcccagcagaaggaggaggcccagctgcagaagtgcctgggccaggtggagcacagagtgcaccagaagagctaccacgtggccggctacgagcacgagctgagcagcctgctgagagagaagagacaggaggtggagggcgagcacgagagaagactggacaagatgaaggaggagcaccagcaggtgatggccaaggccagagagcagtacgaggccgaggagagaaagcagagagccgagctgctgggccacctgaccggcgagctggagagactgcagagagcccacgagagagagctggagaccgtgagacaggagcagcacaagagactggaggacctgagaagaagacacagagagcaggagagaaagctgcaggacctggagctggacctggagaccagagccaaggacgtgaaggccagactggccctgctggaggtgcaggtgagagacctgcaggagagcctgaccagcgagagctag

SEQ ID NO: 10986 - DNA, 1053 bp, synthetic construct
  source 1..1053: mol_type = other DNA; note = Synthetic coding sequence
atgatcagaggcttcgaggcccccatggccgagaaccccccccccccccccccccccgtgatcttctgccacgacagccccaagagagtgctggtgagcgtgatcagaaccacccccatcaagcccacctgcggcggcggcggcgagcccgagccccccccccccctgatccccaccagccccggcttcagcgacttcatggtgtacccctggagatggggcgagaacgcccacaacgtgaccctgagccccggcgccgccggcgccgccgccagcgccgccctgcccgccgccgccgccgccgagcacagcggcctgagaggcagaggcgcccccccccccgccgccagcgccagcgccgccgccagcggcggcgaggacgaggaggaggccagcagccccgacagcggccacctgaaggacggcatcagaagaggcagacccagagccgacaccgtgagagacctgatcaacgagggcgagcacagcagcagcagaatcagatgcaacatctgcaacagagtgttccccagagagaagagcctgcaggcccacaagagaacccacaccggcgagagaccctacctgtgcgactaccccgactgcggcaaggccttcgtgcagagcggccagctgaagacccaccagagactgcacaccggcgagaagcccttcgtgtgcagcgagaacggctgcctgagcagattcacccacgccaacagacactgccccaagcacccctacgccagactgaagagagaggagcccaccgacaccctgagcaagcaccaggccgccgacaacaaggccgccgccgagtggctggccagatactgggagatgagagagcagagaacccccaccctgaagggcaagctggtgcagaaggccgaccaggagcagcaggaccccctggagtacctgcagagcgacgaggaggacgacgagaagagaggcgcccagagaagactgcaggagcagagagagagactgcacggcgccctggccctgatcgagctggccaacctgaccggcgcccccctgagacagtag

SEQ ID NO: 10987 - DNA, 1137 bp, synthetic construct
  source 1..1137: mol_type = other DNA; note = Synthetic coding sequence
atgaacatgatctggagaaacagcatcagctgcctgagactgggcaaggtgccccacagataccagagcggctaccaccccgtggcccccctgggcagcagaatcctgaccgaccccgccaaggtgttcgagcacaacatgtgggaccacatgcagtggagcaaggaggaggaggccgccgccagaaagaaggtgaaggagaacagcgccgtgagagtgctgctggaggagcaggtgaagtacgagagagaggccagcaagtactgggacaccttctacaagatccacaagaacaagttcttcaaggacagaaactggctgctgagagagttccccgagatcctgcccgtggaccagaagcccgaggagaaggccagagagagcagctgggaccacgtgaagaccagcgccaccaacagattcagcagaatgcactgccccaccgtgcccgacgagaagaaccactacgagaagagcagcggcagcagcgagggccagagcaagaccgagagcgacttcagcaacctggacagcgagaagcacaagaagggccccatggagaccggcctgttccccggcagcaacgccaccttcagaatcctggaggtgggctgcggcgccggcaacagcgtgttccccatcctgaacaccctggagaacagccccgagagcttcctgtactgctgcgacttcgccagcggcgccgtggagctggtgaagagccacagcagctacagagccacccagtgcttcgccttcgtgcacgacgtgtgcgacgacggcctgccctaccccttccccgacggcatcctggacgtgatcctgctggtgttcgtgctgagcagcatccaccccgacagaatgcagggcgtggtgaacagactgagcaagctgctgaagcccggcggcatgctgctgttcagagactacggcagatacgacaagacccagctgagattcaagaagggccactgcctgagcgagaacttctacgtgagaggcgacggcaccagagcctacttcttcaccaagggcgaggtgcacagcatgttctgcaaggccagcctggacgagaagcagaacctggtggacagaagactgcaggtgaacagaaagaagcaggtgaagatgcactag

SEQ ID NO: 10988 - DNA, 1797 bp, synthetic construct
  source 1..1797: mol_type = other DNA; note = Synthetic coding sequence
atgggcctgagagccagcagacccagcaagctgacctggaagaagtgggccaccaccgccgccagcaacagctgcagcagaagcgtgagcagctgcagaagatgcaccggcggcagactgatgaaggagccctggagaagacccagcagcagcatctgctacaccagcagaagcagcaccatcaagttcagcagcaacaagttcaagaccctgagcgtgctgctgagccacctgcacctgttcagactgcacgtgaagatcagccagcccagcctgcccatcagcagcagaggcgccgccagcagcagccagttccagggcctgcccagcagaagcgccatcttccagcagcagcccgagaactgcagcagcccccccaacgtggccctgacctgcctgggcatgcagcagcccgcccagagccagcaggtgaccatccaggtgcaggagcccgtggacatgctgagcaacatgcccggcaccgccgccggcagcagcggcagaggcatcagcatcagccccagcgccggccagatgcagatgcagcacagaaccaacctgatggccaccctgagctacggccacagacccctgagcaagcagctgagcgccgacagcgccgaggcccacagcgcccaccagcagcccccccactacaccaccagcgccctgcagcaggccctgctgagccccaccccccccgactacaccagacaccagcaggtgccccacatcctgcagggcctgctgagccccagacacagcctgaccggccacagcgacatcagactgccccccaccgagttcgcccagctgatcaagagacagcagcagcagagacagcagcagcagcagcagcagcagcagcaggagtaccaggagctgttcagacacatgaaccagggcgacgccggcagcctggcccccagcctgggcggccagagcatgaccgagagacaggccctgagctaccagaacgccgacagctaccaccaccacaccagcccccagcacctgctgcagatcagagcccaggagtgcgtgagccaggccagcagccccacccccccccacggctacgcccaccagcccgccctgatgcacagcgagagcatggaggaggactgcagctgcgagggcgccaaggacggcttccaggacagcaagagcagcagcaccctgaccaagggctgccacgacagccccctgctgctgagcaccggcggccccggcgaccccgagagcctgctgggcaccgtgagccacgcccaggagctgggcatccacccctacggccaccagcccaccgccgccttcagcaagaacaaggtgcccagcagagagcccgtgatcggcaactgcatggacagaagcagccccggccaggccgtggagctgcccgaccacaacggcctgggctaccccgccagacccagcgtgcacgagcaccacagacccagagccctgcagagacaccacaccatccagaacagcgacgacgcctacgtgcagctggacaacctgcccggcatgagcctggtggccggcaaggccctgagcagcgccagaatgagcgacgccgtgctgagccagagcagcctgatgggcagccagcagttccaggacggcgagaacgaggagtgcggcgccagcctgggcggccacgagcaccccgacctgagcgacggcagccagcacctgaacagcagctgctaccccagcacctgcatcaccgacatcctgctgagctacaagcaccccgaggtgagcttcagcatggagcaggccggcgtgtag

SEQ ID NO: 10989 - DNA, 3966 bp, synthetic construct
  source 1..3966: mol_type = other DNA; note = Synthetic coding sequence
atggccgccgccgccgccagcggcgccggcggcgccgccggcgccggcaccggcggcgccggccccgccggcagactgctgcccccccccgcccccggcagccccgccgcccccgccgccgtgagccccgccgccggccagcccagaccccccgcccccgccagcagaggccccatgcccgccagaatcggctactacgagatcgacagaaccatcggcaagggcaacttcgccgtggtgaagagagccacccacctggtgaccaaggccaaggtggccatcaagatcatcgacaagacccagctggacgaggagaacctgaagaagatcttcagagaggtgcagatcatgaagatgctgtgccacccccacatcatcagactgtaccaggtgatggagaccgagagaatgatctacctggtgaccgagtacgccagcggcggcgagatcttcgaccacctggtggcccacggcagaatggccgagaaggaggccagaagaaagttcaagcagatcgtgaccgccgtgtacttctgccactgcagaaacatcgtgcacagagacctgaaggccgagaacctgctgctggacgccaacctgaacatcaagatcgccgacttcggcttcagcaacctgttcacccccggccagctgctgaagacctggtgcggcagccccccctacgccgcccccgagctgttcgagggcaaggagtacgacggccccaaggtggacatctggagcctgggcgtggtgctgtacgtgctggtgtgcggcgccctgcccttcgacggcagcaccctgcagaacctgagagccagagtgctgagcggcaagttcagaatccccttcttcatgagcaccgagtgcgagcacctgatcagacacatgctggtgctggaccccaacaagagactgagcatggagcagatctgcaagcacaagtggatgaagctgggcgacgccgaccccaacttcgacagactgatcgccgagtgccagcagctgaaggaggagagacaggtggaccccctgaacgaggacgtgctgctggccatggaggacatgggcctggacaaggagcagaccctgcagagcctgagaagcgacgcctacgaccactacagcgccatctacagcctgctgtgcgacagacacaagagacacaagaccctgagactgggcgccctgcccagcatgcccagagccctggccttccaggcccccgtgaacatccaggccgagcaggccggcaccgccatgaacatcagcgtgccccaggtgcagctgatcaaccccgagaaccagatcgtggagcccgacggcaccctgaacctggacagcgacgagggcgaggagcccagccccgaggccctggtgagatacctgagcatgagaagacacaccgtgggcgtggccgaccccagaaccgaggtgatggaggacctgcagaagctgctgcccggcttccccggcgtgaacccccaggcccccttcctgcaggtggcccccaacgtgaacttcatgcacaacctgctgcccatgcagaacctgcagcccaccggccagctggagtacaaggagcagagcctgctgcagccccccaccctgcagctgctgaacggcatgggccccctgggcagaagagccagcgacggcggcgccaacatccagctgcacgcccagcagctgctgaagagacccagaggccccagccccctggtgaccatgacccccgccgtgcccgccgtgacccccgtggacgaggagagcagcgacggcgagcccgaccaggaggccgtgcagagcagcacctacaaggacagcaacaccctgcacctgcccaccgagagattcagccccgtgagaagattcagcgacggcgccgccagcatccaggccttcaaggcccacctggagaagatgggcaacaacagcagcatcaagcagctgcagcaggagtgcgagcagctgcagaagatgtacggcggccagatcgacgagagaaccctggagaagacccagcagcagcacatgctgtaccagcaggagcagcaccaccagatcctgcagcagcagatccaggacagcatctgccccccccagcccagcccccccctgcaggccgcctgcgagaaccagcccgccctgctgacccaccagctgcagagactgagaatccagcccagcagccccccccccaaccaccccaacaaccacctgttcagacagcccagcaacagccccccccccatgagcagcgccatgatccagccccacggcgccgccagcagcagccagttccagggcctgcccagcagaagcgccatcttccagcagcagcccgagaactgcagcagcccccccaacgtggccctgacctgcctgggcatgcagcagcccgcccagagccagcaggtgaccatccaggtgcaggagcccgtggacatgctgagcaacatgcccggcaccgccgccggcagcagcggcagaggcatcagcatcagccccagcgccggccagatgcagatgcagcacagaaccaacctgatggccaccctgagctacggccacagacccctgagcaagcagctgagcgccgacagcgccgaggcccacagcctgaacgtgaacagattcagccccgccaactacgaccaggcccacctgcacccccacctgttcagcgaccagagcagaggcagccccagcagctacagccccagcaccggcgtgggcttcagccccacccaggccctgaaggtgccccccctggaccagttccccaccttcccccccagcgcccaccagcagcccccccactacaccaccagcgccctgcagcaggccctgctgagccccaccccccccgactacaccagacaccagcaggtgccccacatcctgcagggcctgctgagccccagacacagcctgaccggccacagcgacatcagactgccccccaccgagttcgcccagctgatcaagagacagcagcagcagagacagcagcagcagcagcagcagcagcagcaggagtaccaggagctgttcagacacatgaaccagggcgacgccggcagcctggcccccagcctgggcggccagagcatgaccgagagacaggccctgagctaccagaacgccgacagctaccaccaccacaccagcccccagcacctgctgcagatcagagcccaggagtgcgtgagccaggccagcagccccacccccccccacggctacgcccaccagcccgccctgatgcacagcgagagcatggaggaggactgcagctgcgagggcgccaaggacggcttccaggacagcaagagcagcagcaccctgaccaagggctgccacgacagccccctgctgctgagcaccggcggccccggcgaccccgagagcctgctgggcaccgtgagccacgcccaggagctgggcatccacccctacggccaccagcccaccgccgccttcagcaagaacaaggtgcccagcagagagcccgtgatcggcaactgcatggacagaagcagccccggccaggccgtggagctgcccgaccacaacggcctgggctaccccgccagacccagcgtgcacgagcaccacagacccagagccctgcagagacaccacaccatccagaacagcgacgacgcctacgtgcagctggacaacctgcccggcatgagcctggtggccggcaaggccctgagcagcgccagaatgagcgacgccgtgctgagccagagcagcctgatgggcagccagcagttccaggacggcgagaacgaggagtgcggcgccagcctgggcggccacgagcaccccgacctgagcgacggcagccagcacctgaacagcagctgctaccccagcacctgcatcaccgacatcctgctgagctacaagcaccccgaggtgagcttcagcatggagcaggccggcgtgtag

SEQ ID NO: 10990 - DNA, 1569 bp, synthetic construct
  source 1..1569: mol_type = other DNA; note = Synthetic coding sequence
atgcccagaaagaaggccgccgccgccgcctgggaggagcccagcagcggcaacggcaccgccagagccggccccagaaagagaggcggccccgccggcagaaagagagagagacccgagagatgcagcagcagcagcggcggcggcagcagcggcgacgaggacggcctggagctggacggcgcccccggcggcggcaagagagccgccagacccgccaccgccggcaaggccggcggcgccgccgtggtgatcaccgagcccgagcacaccaaggagagagtgaagctggagggcagcaagtgcaagggccagctgctgatcttcggcgccaccaactgggacctgatcggcagaaaggaggtgcccaagcagcaggccgcctacagaaacctgggccagaacctgtggggcccccacagatacggctgcctggccggcgtgagagtgagaaccgtggtgagcggcagctgcgccgcccacagcctgctgatcaccaccgagggcaagctgtggagctggggcagaaacgagaagggccagctgggccacggcgacaccaagagagtggaggcccccagactgatcgagggcctgagccacgaggtgatcgtgagcgccgcctgcggcagaaaccacaccctggccctgaccgagaccggcagcgtgttcgccttcggcgagaacaagatgggccagctgggcctgggcaaccagaccgacgccgtgcccagccccgcccagatcatgtacaacggccagcccatcaccaagatggcctgcggcgccgagttcagcatgatcatggactgcaagggcaacctgtacagcttcggctgccccgagtacggccagctgggccacaacagcgacggcaagttcatcgccagagcccagagaatcgagtacgactgcgagctggtgcccagaagagtggccatcttcatcgagaagaccaaggacggccagatcctgcccgtgcccaacgtggtggtgagagacgtggcctgcggcgccaaccacaccctggtgctggacagccagaagagagtgttcagctggggcttcggcggctacggcagactgggccacgccgagcagaaggacgagatggtgcccagactggtgaagctgttcgacttccccggcagaggcgccagccagatctacgccggctacacctgcagcttcgccgtgagcgaggtgggcggcctgttcttctggggcgccaccaacaccagcagagagagcaccatgtaccccaaggccgtgcaggacctgtgcggctggagaatcagaagcctggcctgcggcaagagcagcatcatcgtggccgccgacgagagcaccatcagctggggccccagccccaccttcggcgagctgggctacggcgaccacaagcccaagagcagcaccgccgcccaggaggtgaagaccctggacggcatcttcagcgagcaggtggccatgggctacagccacagcctggtgatcgccagagacgagagcgagaccgagaaggagaagatcaagaagctgcccgagtacaaccccagaaccctgtag

SEQ ID NO: 10991 - DNA, 1569 bp, synthetic construct; identical to SEQ ID NO: 10990
  source 1..1569: mol_type = other DNA; note = Synthetic coding sequence

SEQ ID NO: 10992 - DNA, 552 bp, synthetic construct
  source 1..552: mol_type = other DNA; note = Synthetic coding sequence
atgaccgaccagacctactgcgacagactggtgcaggacacccccttcctgaccggccacggcagactgagcgagcagcaggtggacagaatcatcctgcagctgaacagatactacccccagatcctgaccaacaaggaggccgagaagttcagaaaccccaaggccagcctgagagtgagactgtgcgacctgctgagccacctgcagagaagcggcgagagagactgccaggagttctacagagccctgtacatccacgcccagcccctgcacagcagactgcccagcagacacgccctgcagaacagcgactgcaccgagctggacagcggcagccagagcggcgagctgagcaacagaggccccatgagcttcctggccggcctgggcctggccgtgggcctggccctgctgctgtactgctacccccccgaccccaagggcctgcccggcaccagaagagtgctgggcttcagccccgtgatcatcgacagacacgtgagcagatacctgctggccttcctggccgacgacctgggcggcctgtag

SEQ ID NO: 10993 - DNA, 492 bp, synthetic construct
  source 1..492: mol_type = other DNA; note = Synthetic coding sequence
atgctggacctgctggacatcgagggcctgtaccccctgtacaacagagtggagagatacctggaggagttccccgaggagagaaagaccctgcagatcgacggcccctacgacgaggccttctaccagaagctgctggacctgagcaccgaggacgacggcaccgtggccttcgccctgaccaaggtgcagcagtacagagtggccatgaccgccaaggactgcagcatcatgatcgccctgagcccctgcctgcaggacgccagcagcgaccagagacccgtggtgcccagcagcagaagcagattcgccttcagcgtgagcgtgctggacctggacctgaagccctacgagagcatcccccaccagtacaagctggacggcaagatcgtgaactactacagcaagaccgtgagagccaaggacaacgccgtgatgagcaccagattcaaggagagcgaggactgcaccctggtgctgcacaaggtgtag

SEQ ID NO: 10994 - DNA, 777 bp, synthetic construct
  source 1..777: mol_type = other DNA; note = Synthetic coding sequence
atggccagaccccccgtgcccggcagcgtggtggtgcccaactggcacgagagcgccgagggcaaggagtacctggcctgcatcctgagaaagaacagaagaagagtgttcggcctgctggagagacccgtgctgctgccccccgtgagcatcgacaccgccagctacaagatcttcgtgagcggcaagagcggcgtgggcaagaccgccctggtggccaagctggccggcctggaggtgcccgtggtgcaccacgagaccaccggcatccagaccaccgtggtgttctggcccgccaagctgcaggccagcagcagagtggtgatgttcagattcgagttctgggactgcggcgagagcgccctgaagaagttcgaccacatgctgctggcctgcatggagaacaccgacgccttcctgttcctgttcagcttcaccgacagagccagcttcgaggacctgcccggccagctggccagaatcgccggcgaggcccccggcgtggtgagaatggtgatcggcagcaagttcgaccagtacatgcacaccgacgtgcccgagagagacctgaccgccttcagacaggcctgggagctgcccctgctgagagtgaagagcgtgcccggcagaagactggccgacggcagaaccctggacggcagagccggcctggccgacgtggcccacatcctgaacggcctggccgagcagctgtggcaccaggaccaggtggccgccggcctgctgcccaacccccccgagagcgcccccgagtag

SEQ ID NO: 10995 - DNA, 333 bp, synthetic construct
  source 1..333: mol_type = other DNA; note = Synthetic coding sequence
atggccgacaaggtgctgaaggagaagagaaagcagttcatcagaagcgtgggcgagggcaccatcaacggcctgctgggcgagctgctggagaccagagtgctgagccaggaggagatcgagatcgtgaagtgcgagaacgccaccgtgatggacaaggccagagccctgctggacagcgtgatcagaaagggcgcccccgcctgccagatctgcatcacctacatctgcgaggaggacagccacctggccggcaccctgggcctgagcgccggccccaccagcggcaaccacctgaccacccaggacagccagatcgtgctgcccagctag

SEQ ID NO: 10996 - DNA, 924 bp, synthetic construct
  source 1..924: mol_type = other DNA; note = Synthetic coding sequence
atggagcccagcagcctggagctgcccgccgacaccgtgcagagaatcgccgccgagctgaagtgccaccccaccgacgagagagtggccctgcacctggacgaggaggacaagctgagacacttcagagagtgcttctacatccccaagatccaggacctgccccccgtggacctgagcctggtgaacaaggacgagaacgccatctacttcctgggcaacagcctgggcctgcagcccaagatggtgaagacctacctggaggaggagctggacaagtgggccaagatcgccgcctacggccacgaggtgggcaagagaccctggatcaccggcgacgagagcatcgtgggcctgatgaaggacatcgtgggcgccaacgagaaggagatcgccctgatgaacgccctgaccgtgaacctgcacctgctgatgctgagcttcttcaagcccacccccaagagatacaagatcctgctggaggccaaggccttccccagcgaccactacgccatcgagagccagctgcagctgcacggcctgaacatcgaggagagcatgagaatgatcaagcccagagagggcgaggagaccctgagaatcgaggacatcctggaggtgatcgagaaggagggcgacagcatcgccgtgatcctgttcagcggcgtgcacttctacaccggccagcacttcaacatccccgccatcaccaaggccggccaggccaagggctgctacgtgggcttcgacctggcccacgccgtgggcaacgtggagctgtacctgcacgactggggcgtggacttcgcctgctggtgcagctacaagtacctgaacgccggcgccggcggcatcgccggcgccttcatccacgagaagcacgcccacaccatcaagcccgccagaagcgagttcttcaactag

SEQ ID NO: 10997 - DNA, 3060 bp, synthetic construct
  source 1..3060: mol_type = other DNA; note = Synthetic coding sequence
atggagcccggcgaggtgaaggacagaatcctggagaacatcagcctgagcgtgaagaagctgcagagctacttcgccgcctgcgaggacgagatccccgccatcagaaaccacgacaaggtgctgcagagactgtgcgagcacctggaccacgccctgctgtacggcctgcaggacctgagcagcggctactgggtgctggtggtgcacttcaccagaagagaggccatcaagcagatcgaggtgctgcagcacgtggccaccaacctgggcagaagcagagcctggctgtacctggccctgaacgagaacagcctggagagctacctgagactgttccaggagaacctgggcctgctgcacaagtactacgtgaagaacgccctggtgtgcagccacgaccacctgaccctgttcctgaccctggtgagcggcctggagttcatcagattcgagctggacctggacgccccctacctggacctggccccctacatgcccgactactacaagccccagtacctgctggacttcgaggacagactgcccagcagcgtgcacggcagcgacagcctgagcctgaacagcttcaacagcgtgaccagcaccaacctggagtgggacgacagcgccatcgcccccagcagcgaggactacgacttcggcgacgtgttccccgccgtgcccagcgtgcccagcaccgactgggaggacggcgacctgaccgacaccgtgagcggccccagaagcaccgccagcgacctgaccagcagcaaggccagcaccagaagccccacccagagacagaaccccttcaacgaggagcccgccgagaccgtgagcagcagcgacaccacccccgtgcacaccaccagccaggagaaggaggaggcccaggccctggacccccccgacgcctgcaccgagctggaggtgatcagagtgaccaagaagaagaagatcggcaagaagaagaagagcagaagcgacgaggaggccagccccctgcaccccgcctgcagccagaagaagtgcgccaagcagggcgacggcgacagcagaaacggcagccccagcctgggcagagacagccccgacaccatgctggccagcccccaggaggagggcgagggccccagcagcaccaccgagagcagcgagagaagcgagcccggcctgctgatccccgagatgaaggacaccagcatggagagactgggccagcccctgagcaaggtgatcgaccagctgaacggccagctggaccccagcacctggtgcagcagagccgagccccccgaccagagcttcagaaccggcagccccggcgacgcccccgagagaccccccctgtgcgacttcagcgagggcctgagcgcccccatggacttctacagattcaccgtggagagccccagcaccgtgaccagcggcggcggccaccacgaccccgccggcctgggccagcccctgcacgtgcccagcagccccgaggccgccggccaggaggaggagggcggcggcggcgagggccagacccccagacccctggaggacaccaccagagaggcccaggagctggaggcccagctgagcctggtgagagagggccccgtgagcgagcccgagcccggcacccaggaggtgctgtgccagctgaagagagaccagcccagcccctgcctgagcagcgccgaggacagcggcgtggacgagggccagggcagccccagcgagatggtgcacagcagcgagttcagagtggacaacaaccacctgctgctgctgatgatccacgtgttcagagagaacgaggagcagctgttcaagatgatcagaatgagcaccggccacatggagggcaacctgcagctgctgtacgtgctgctgaccgactgctacgtgtacctgctgagaaagggcgccaccgagaagccctacctggtggaggaggccgtgagctacaacgagctggactacgtgagcgtgggcctggaccagcagaccgtgaagctggtgtgcaccaacagaagaaagcagttcctgctggacaccgccgacgtggccctggccgagttcttcctggccagcctgaagagcgccatgatcaagggctgcagagagcccccctaccccagcatcctgaccgacgccaccatggagaagctggccctggccaagttcgtggcccaggagagcaagtgcgaggccagcgccgtgaccgtgagattctacggcctggtgcactgggaggaccccaccgacgagagcctgggccccaccccctgccactgcagcccccccgagggcaccatcaccaaggagggcatgctgcactacaaggccggcaccagctacctgggcaaggagcactggaagacctgcttcgtggtgctgagcaacggcatcctgtaccagtaccccgacagaaccgacgtgatccccctgctgagcgtgaacatgggcggcgagcagtgcggcggctgcagaagagccaacaccaccgacagaccccacgccttccaggtgatcctgagcgacagaccctgcctggagctgagcgccgagagcgaggccgagatggccgagtggatgcagcacctgtgccaggccgtgagcaagggcgtgatcccccagggcgtggcccccagcccctgcatcccctgctgcctggtgctgaccgacgacagactgttcacctgccacgaggactgccagaccagcttcttcagaagcctgggcaccgccaagctgggcgacatcagcgccgtgagcaccgagcccggcaaggagtactgcgtgctggagttcagccaggacagccagcagctgctgcccccctgggtgatctacctgagctgcaccagcgagctggacagactgctgagcgccctgaacagcggctggaagaccatctaccaggtggacctgccccacaccgccatccaggaggccagcaacaagaagaagttcgaggacgccctgagcctgatccacagcgcctggcagagaagcgacagcctgtgcagaggcagagccagcagagacccctggtgctag

SEQ ID NO: 10998 - DNA, 318 bp, synthetic construct
  source 1..318: mol_type = other DNA; note = Synthetic coding sequence
atgaagcccttcgaggacgccctgaagaaccagcccctgggccccgtgctgagcaaggccgccagcgtggagtgcatcagccccgtgagccccagagcccccgacgccaagatgctggaggagctgcaggccgagacctggtaccagggcgagatgagcagaaaggaggccgagggcctgctggagaaggacggcgacttcctggtgagaaagagcaccaccaaccccggcagcttcgtgctgaccggcatgcacaacggccaggccaagcacctgctgctggtggaccccgagggcaccagaagcaacagctactag

SEQ ID NO: 10999 - DNA, 318 bp, synthetic construct; identical to SEQ ID NO: 10998
  source 1..318: mol_type = other DNA; note = Synthetic coding sequence

SEQ ID NO: 11000 - DNA, 1785 bp, synthetic construct
  source 1..1785: mol_type = other DNA; note = Synthetic coding sequence
atgctgcccagaaccaagtacaacagattcagaaacgacagcgtgaccagcgtggacgacctgctgcacagcctgagcgtgagcggcggcggcggcaaggtgagcgccgccagagccacccccgccgccgccccctacctggtgagcggcgaggccctgagaaaggcccccgacgacggccccggcagcctgggccacctgctgcacaaggtgagccacctgaagctgagcagcagcggcctgagaggcctgagcagcgccgccagagagagagccggcgccagactgagcggcagctgcagcgcccccagcctggccgcccccgacggcagcgcccccagcgcccccagagcccccgccatgagcgccgccagaaagggcagacccggcgacgagcccctgcccagaccccccagaggcgccccccacgccagcgaccaggtgctgggccccggcgtgacctacgtggtgaagtacctgggctgcatcgaggtgctgagaagcatgagaagcctggacttcagcaccagaacccagatcaccagagaggccatcagcagagtgtgcgaggccgtgcccggcgccaagggcgccttcaagaagagaaagccccccagcaagatgctgagcagcatcctgggcaagagcaacctgcagttcgccggcatgagcatcagcctgaccatcagcaccgccagcctgaacctgagaacccccgacagcaagcagatcatcgccaaccaccacatgagaagcatcagcttcgccagcggcggcgaccccgacaccaccgactacgtggcctacgtggccaaggaccccgtgaacagaagagcctgccacatcctggagtgctgcgacggcctggcccaggacgtgatcggcagcatcggccaggccttcgagctgagattcaagcagtacctgcagtgccccaccaagatccccgccctgcacgacagaatgcagagcctggacgagccctggaccgaggaggagggcgacggcagcgaccacccctactacaacagcatccccagcaagatgcccccccccggcggcttcctggacaccagactgaagcccagaccccacgcccccgacaccgcccagttcgccggcaaggagcagacctactaccagggcagacacctgggcgacaccttcggcgaggactggcagcagacccccctgagacagggcagcagcgacatctacagcacccccgagggcaagctgcacgtggcccccaccggcgaggcccccacctacgtgaacacccagcagatccccccccaggcctggcccgccgccgtgagcagcgccgagagcagccccagaaaggacctgttcgacatgaagcccttcgaggacgccctgaagaaccagcccctgggccccgtgctgagcaaggccgccagcgtggagtgcatcagccccgtgagccccagagcccccgacgccaagatgctggaggagctgcaggccgagacctggtaccagggcgagatgagcagaaaggaggccgagggcctgctggagaaggacggcgacttcctggtgagaaagagcaccaccaaccccggcagcttcgtgctgaccggcatgcacaacggccaggccaagcacctgctgctggtggaccccgagggcaccatcagaaccaaggacagagtgttcgacagcatcagccacctgatcaaccaccacctggagagcagcctgcccatcgtgagcgccggcagcgagctgtgcctgcagcagcccgtggagagaaagcagtag

SEQ ID NO: 11001 - DNA, 693 bp, synthetic construct
  source 1..693: mol_type = other DNA; note = Synthetic coding sequence
atgaacaccctgatggacgtgctgagacacagacccggctgggtggaggtgaaggacgagggcgagtgggacttctactggtgcgacgtgagctggctgagagagaacttcgaccacacctacatggacgagcacgtgagaatcagccacttcagaaaccactacgagctgaccagaaagaactacatggtgaagaacctgaagagattcagaaagcagctggagagagaggccggcaagctggaggccgccaagtgcgacttcttccccaagaccttcgagatgccctgcgagtaccacctgttcgtggaggagttcagaaagaaccccggcatcacctggatcatgaagcccgacaccagaagcagcgacgaccagaaggacgacatccccgtggagaactacgtggcccagagatacatcgagaacccctacctgatcggcggcagaaagttcgacctgagagtgtacgtgctggtgatgagctacatccccctgagagcctggctgtacagagacggcttcgccagattcagcaacaccagattcaccctgaacagcatcgacgaccagtacgtgcacctgaccaacgtggccgtgcagaagaccagccccgactaccaccccaagaaggtggcccccggcggccagtgcgtgcccatcaccgacagccagcagcccggcagactgtag

SEQ ID NO: 11002 - DNA, 1068 bp, synthetic construct
  source 1..1068: mol_type = other DNA; note = Synthetic coding sequence
atgaacaccctgatggacgtgctgagacacagacccggctgggtggaggtgaaggacgagggcgagtgggacttctactggtgcgacgtgagctggctgagagagaacttcgaccacacctacatggacgagcacgtgagaatcagccacttcagaaaccactacgagctgaccagaaagaactacatggtgaagaacctgaagagattcagaaagcagctggagagagaggccggcaagctggaggccgccaagtgcgacttcttccccaagaccttcgagatgccctgcgagtaccacctgttcgtggaggagttcagaaagaaccccggcatcacctggatcatgaagcccgacaccagaagcagcgacgaccagaaggacgacatccccgtggagaactacgtggcccagagatacatcgagaacccctacctgatcggcggcagaaagttcgacctgagagtgtacgtgctggtgatgagctacatccccctgagagcctggctgtacagagacggcttcgccagattcagcaacaccagattcaccctgaacagcatcgacgaccagtacgtgcacctgaccaacgtggccgtgcagaagaccagccccgactaccaccccaagaagggctgcaagtggaccctgcagagattcagacagtacctggccagcaagcacggccccgaggccgtggagaccctgttcagagacatcgacaacatcttcgtgaagagcctgcagagcgtgcagaaggtgatcatcagcgacaagcactgcttcgagctgtacggctacgacatcctgatcgaccaggacctgaagccctggctgctggaggtgaacgccagccccagcctgaccgccagcagccaggaggactacgagctgaagacctgcctgctggaggacaccctgcacgtggtggacatggaggccagactgagacagagaagcgaggagaccaccgaggccgccctgctgctgcccagcagcagcgaggagagcttccagctgatccccagctgccaggaggagatcagcctgagcagaccctgcgtgtag

SEQ ID NO: 11003 - DNA, 840 bp, synthetic construct
  source 1..840: mol_type = other DNA; note = Synthetic coding sequence
atgagcagacccaagaaccagaactacaagggccacggcctgagcaagggcaaggagagagagcagagagccagcatcagattcaagaccaccctgatgaacaccctgatggacgtgctgagacacagacccggctgggtggaggtgaaggacgagggcgagtgggacttctactggtgcgacgtgagctggctgagagagaacttcgaccacacctacatggacgagcacgtgagaatcagccacttcagaaaccactacgagctgaccagaaagaactacatggtgaagaacctgaagagattcagaaagcagctggagagagaggccggcaagctggaggccgccaagtgcgacttcttccccaagaccttcgagatgccctgcgagtaccacctgttcgtggaggagttcagaaagaaccccggcatcacctggatcatgaagcccgtggccagaagccagggcaagggcatcttcctgttcagaagactgaaggacatcgtggactggagaaaggacaccagaagcagcgacgaccagaaggacgacatccccgtggagaactacgtggcccagagatacatcgagaacccctacctgatcggcggcagaaagttcgacctgagagtgtacgtgctggtgatgagcatgttcaccagccccacctggctgtgcaagaagcacctgcccaccaccacccagagaagagccgccagcggcagatgcagcgccagcggcagcacctggagacccaacaccggccccagacagtggagacacagcagcggcaccagcaccaccagcctgagcaaggcctgcagagtgtgcagaagatag

SEQ ID NO: 11004 - DNA, 1116 bp, synthetic construct
  source 1..1116: mol_type = other DNA; note = Synthetic coding sequence
atgagcagacccaagaaccagaactacaagggccacggcctgagcaagggcaaggagagagagcagagagccagcatcagattcaagaccaccctgatgaacaccctgatggacgtgctgagacacagacccggctgggtggaggtgaaggacgagggcgagtgggacttctactggtgcgacgtgagctggctgagagagaacctggagagagaggccggcaagctggaggccgccaagtgcgacttcttccccaagaccttcgagatgccctgcgagtaccacctgttcgtggaggagttcagaaagaaccccggcatcacctggatcatgaagcccgtggccagaagccagggcaagggcatcttcctgttcagaagactgaaggacatcgtggactggagaaaggacaccagaagcagcgacgaccagaaggacgacatccccgtggagaactacgtggcccagagatacatcgagaacccctacctgatcggcggcagaaagttcgacctgagagtgtacgtgctggtgatgagctacatccccctgagagcctggctgtacagagacggcttcgccagattcagcaacaccagattcaccctgaacagcatcgacgaccagtacgtgcacctgaccaacgtggccgtgcagaagaccagccccgactaccaccccaagaagctgcaccccaccgtgggccccctgtgcatccacagccccgagaacggcagcctgagcgtgaccccctggccctgggacgcccacatgggctgcaagtggaccctgcagagattcagacagtacctggccagcaagcacggccccgaggccgtggagaccctgttcagagacatcgacaacatcttcgtgaagagcctgcagagcgtgcagaaggtgatcatcagcgacaagcactgcttcgagctgtacggctacgacatcctgatcgaccaggacctgaagccctggctgctggaggtgaacgccagccccagcctgaccgccagcagccaggaggactacgagctgaagacctgcctgctggaggacaccctgcacgtggtggacatggaggccagcttcagccccatcatccccgccgaggtgtag

SEQ ID NO: 11005 - DNA, 1320 bp, synthetic construct
  source 1..1320: mol_type = other DNA; note = Synthetic coding sequence
atggtgcccagcagagaggccctgctgggccccggcaccaccgccatcagatgccccaagaagctgcagaaccagaactacaagggccacggcctgagcaagggcaaggagagagagcagagagccagcatcagattcaagaccaccctgatgaacaccctgatggacgtgctgagacacagacccggctgggtggaggtgaaggacgagggcgagtgggacttctactggtgcgacgtgagctggctgagagagaacttcgaccacacctacatggacgagcacgtgagaatcagccacttcagaaaccactacgagctgaccagaaagaactacatggtgaagaacctgaagagattcagaaagcagctggagagagaggccggcaagctggaggccgccaagtgcgacttcttccccaagaccttcgagatgccctgcgagtaccacctgttcgtggaggagttcagaaagaaccccggcatcacctggatcatgaagcccgtggccagaagccagggcaagggcatcttcctgttcagaagactgaaggacatcgtggactggagaaaggacaccagaagcagcgacgaccagaaggacgacatccccgtggagaactacgtggcccagagatacatcgagaacccctacctgatcggcggcagaaagttcgacctgagagtgtacgtgctggtgatgagcgtgttcgccgagtgcctgctgtggagcggccacagaagacaggacgtgcacctgaccaacgtggccgtgcagaagaccagccccgactaccaccccaagaagggctgcaagtggaccctgcagagattcagacagtacctggccagcaagcacggccccgaggccgtggagaccctgttcagagacatcgacaacatcttcgtgaagagcctgcagagcgtgcagaaggtgatcatcagcgacaagcactgcttcgagctgtacggctacgacatcctgatcgaccaggacctgaagccctggctgctggaggtgaacgccagccccagcctgaccgccagcagccaggaggactacgagctgaagacctgcctgctggaggacaccctgcacgtggtggacatggaggccagactgaccggcagagagaagagagtgggcggcttcgacctgatgtggaacgacggccccgtgagcagagaggagggcgcccccgacctgagcggcatgggcaacttcgtgaccaacacccacctgggctgcgtgaacgacagaaagaagcagctgagacagctgttctgcagcctgcaggtgcagaagaaggccagcagctag

SEQ ID NO: 11006 - DNA, 501 bp, synthetic construct
  source 1..501: mol_type = other DNA; note = Synthetic coding sequence
atgaaggagatgctggccaaggacctggaggagagccagggcggcaagagcagcgaggtgctgagcgccaccgagctgagagtgcagctggcccagaaggagcaggagctggccagagccaaggaggccctgcaggccatgaaggccgacagaaagagactgaagggcgagaagaccgacctggtgagccagatgcagcagctgtacgccaccctggagagcagagaggagcagctgagagacttcatcagaaactacgagcagcacagaaaggagagcgaggacgccgtgaaggccctggccaaggagaaggacctgctggagagagagaagtgggagctgagaagacaggccaaggaggccaccgaccacgccaccgccctgagaagccagctggacctgaaggacaacagaatgaaggagctggaggccgagctggccatggccaagcagagcctggccaccctgaccaaggacgtgcccaagagacacagcctgtag

SEQ ID NO: 11007 - DNA, 2328 bp, synthetic construct
  source 1..2328: mol_type = other DNA; note = Synthetic coding sequence
atgatggaggacaacaagcagctggccctgagaatcgacggcgccgtgcagagcgccagccaggaggtgaccaacctgagagccgagctgaccgccaccaacagaagactggccgagctgagcggcggcggcggccccggccccggccccggcgccgccgccagcgccagcgccgccggcgacagcgccgccaccaacatggagaacccccagctgggcgcccaggtgctgctgagagaggaggtgagcagactgcaggaggaggtgcacctgctgagacagatgaaggagatgctggccaaggacctggaggagagccagggcggcaagagcagcgaggtgctgagcgccaccgagctgagagtgcagctggcccagaaggagcaggagctggccagagccaaggaggccctgcaggccatgaaggccgacagaaagagactgaagggcgagaagaccgacctggtgagccagatgcagcagctgtacgccaccctggagagcagagaggagcagctgagagacttcatcagaaactacgagcagcacagaaaggagagcgaggacgccgtgaaggccctggccaaggagaaggacctgctggagagagagaagtgggagctgagaagacaggccaaggaggccaccgaccacgccaccgccctgagaagccagctggacctgaaggacaacagaatgaaggagctggaggccgagctggccatggccaagcagagcctggccaccctgaccaaggacgtgcccaagagacacagcctggccatgcccggcgagaccgtgctgaacggcaaccaggagtgggtggtgcaggccgacctgcccctgaccgccgccatcagacagagccagcagaccctgtaccacagccaccccccccaccccgccgacagacaggccgtgagagtgagcccctgccacagcagacagcccagcgtgatcagcgacgccagcgccgccgagggcgacagaagcagcacccccagcgacatcaacagccccagacacagaacccacagcctgtgcaacggcgacagccccggccccgtgcagaagaacctgcacaaccccatcgtgcagagcctggaggacctggaggaccagaagagaaagaagaagaaggagaagatgggcttcggcagcatcagcagagtgttcgccagaggcaagcagagaaagagcctggaccccggcctgttcgacgacagcgacagccagtgcagccccaccagacagagcctgagcctgagcgagggcgaggagcagatggacagactgcagcaggtggagctggtgagaaccacccccatgagccactggaaggccggcaccgtgcaggcctggctggaggtggtgatggccatgcccatgtacgtgaaggcctgcaccgagaacgtgaagagcggcaaggtgctgctgagcctgagcgacgaggacctgcagctgggcctgggcgtgtgcagcagcctgcacagaagaaagctgagactggccatcgaggactacagagacgccgaggccggcagaagcctgagcaaggccgccgagctggaccaccactgggtggccaaggcctggctgaacgacatcggcctgagccagtacagccaggccttccagaaccacctggtggacggcagaatgctgaacagcctgatgaagagagacctggagaagcacctgaacgtgagcaagaagttccaccaggtgagcatcctgctgggcatcgagctgctgtaccaggtgaacttcagcagagaggccctgcaggagagaagagccagatgcgagacccagaacatcgaccccgtggtgtggaccaaccagagagtgctgaagtgggtgagagacatcgacctgaaggagtacgccgacaacctgaccaacagcggcgtgcacggcgccgtgctggtgctggagcccaccttcaacgccgaggccatggccaccgccctgggcatccccagcggcaagcacatcctgagaagacacctggccgaggagatgagcgccgtgttccaccccgccaacagcaccggcatcagagaggccgagagattcggcaccccccccggcagagccagcagcgtgaccagagccggcaaggaggagaacagcagcggcctgaagtacaaggccggcagactgcccctgggcaagatcggcagaggcttcagcagcaaggaccccgacttccacgacgactacggcagcctgcagaacgaggactgcggcgacgacgacccccagagcagactggagcagtgcagactggagggctacaacagcctggaggtgaccaacgtgtag

SEQ ID NO: 11008 - DNA, 861 bp, synthetic construct
  source 1..861: mol_type = other DNA; note = Synthetic coding sequence
atgtacagcctggacagaatcttcgccggcttcagaaccagaagccagatgctgctgggccacatcgaggagcaggacaaggtgctgcactgccagttcagcgacaacagcgacgacgaggagagcgagggccaggagaagagcggcaccagatgcagaagcagaagctggatccagaagcccgacagcgtgtgcagcctggtggagctgagcgacacccaggacgagacccagaagagcgacctggagaacgaggacctgaagatcgactgcctgcaggagagccaggagctgaacctgcagaagctgaagaacagcgagagaatcctgaccgaggccaagcagaagatgagagagctgaccatcaacatcaagatgaaggaggacctgatcaaggagctgatcaagaccggcaacgacgccaagagcgtgagcaagcagtacagcctgaaggtgaccaagctggagcacgacgccgagcaggccaaggtggagctgatcgagacccagaagcagctgcaggagctggagaacaaggacctgagcgacgtggccatgaaggtgaagctgcagaaggagttcagaaagaagatggacgccgccaagctgagagtgcaggtgctgcagaagaagcagcaggacagcaagaagctggccagcctgagcatccagaacgagaagagagccaacgagctggagcagagcgtggaccacatgaagtaccagaagatccagctgcagagaaagctgagagaggagaacgagaagagaaagcagctggacgccgtgatcaagagagaccagcagaagatcaaggtgatcctgagctacatccccgccaagtacaacatgaagtgctag

SEQ ID NO: 11009 - DNA, 1662 bp, synthetic construct
  source 1..1662: mol_type = other DNA; note = Synthetic coding sequence
atgaacaagaacaccagcaccgtggtgagccccagcctgctggagaaggaccccgccttccagatgatcaccatcgccaaggagaccggcctgggcctgaaggtgctgggcggcatcaacagaaacgagggccccctggtgtacatccaggagatcatccccggcggcgactgctacaaggacggcagactgaagcccggcgaccagctggtgagcgtgaacaaggagagcatgatcggcgtgagcttcgaggaggccaagagcatcatcaccggcgccaagctgagactggagagcgcctgggagatcgccttcatcagacagaagagcgacaacatccagcccgagaacctgagctgcaccagcctgatcgaggccagcggcgagtacggcccccaggccagcaccctgagcctgttcagcagcccccccgagatcctgatccccaagaccagcagcacccccaagaccaacaacgacatcctgagcagctgcgagatcaagaccggctacaacaagaccgtgcagatccccatcaccagcgagaacagcaccgtgggcctgagcaacaccgacgtggccagcgcctggaccgagaactacggcctgcaggagaagatcagcctgaaccccagcgtgagattcaaggccgagaagctggagatggccctgaactacctgggcatccagcccaccaaggagcagcaccaggccctgagacagcaggtgcaggccgacagcaagggcaccgtgagcttcggcgacttcgtgcaggtggccagaaacctgttctgcctgcagctggacgaggtgaacgtgggcgcccacgagatcagcaacatcctggacagccagctgctgccctgcgacagcagcgaggccgacgagatggagagactgaagtgcgagagagacgacgccctgaaggaggtgaacaccctgaaggagaagctgctggagagcgacaagcagagaaagcagctgaccgaggagctgcagaacgtgaagcaggaggccaaggccgtggtggaggagaccagagccctgagaagcagaatccacctggccgaggccgcccagagacaggcccacggcatggagatggactacgaggaggtgatcagactgctggaggccaagatcaccgagctgaaggcccagctggccgactacagcgaccagaacaaggagagcgtgcaggacctgaagaagagaatcatggtgctggactgccagctgagaaagagcgagatggccagaaagaccttcgaggccagcaccgagaagctgctgcacttcgtggaggccatccaggaggtgttcagcgacaacagcacccccctgagcaacctgagcgagagaagagccgtgctggccagccagaccagcctgacccccctgggcagaaacggcagaagcatccccgccaccctggccctggagagcaaggagctggtgaagagcgtgagagccctgctggacatggactgcctgccctacggctgggaggaggcctacaccgccgacggcatcaagtacttcatcaaccacgtgacccagaccaccagctggatccaccccgtgatgagcgtgctgaacctgagcagaagcgaggagaacgaggaggactgcagcagagagctgcccaaccagaagagctag

SEQ ID NO: 11010 - DNA, 564 bp, synthetic construct
  source 1..564: mol_type = other DNA; note = Synthetic coding sequence
atggccgcccccggcgccctgctggtgatgggcgtgagcggcagcggcaagagcaccgtgggcgccctgctggccagcgagctgggctggaagttctacgacgccgacgactaccaccccgaggagaacagaagaaagatgggcaagggcatccccctgaacgaccaggacagaatcccctggctgtgcaacctgcacgacatcctgctgagagacgtggccagcggccagagagtggtgctggcctgcagcgccctgaagaagacctacagagacatcctgacccagggcaaggacggcgtggccctgaagtgcgaggagagcggcaaggaggccaagcaggccgagatgcagctgctggtggtgcacctgagcggcagcttcgaggtgatcagcggcagactgctgaagagagagggccacttcatgccccccgagctgctgcagagccagttcgagaccctggagccccccgccgcccccgagaacttcatccagatcagcgtggacaagaacgtgagcgagatcatcgccaccatcatggagaccctgaagatgaagtag

SEQ ID NO: 11011 - DNA, 1134 bp, synthetic construct
  source 1..1134: mol_type = other DNA; note = Synthetic coding sequence
atggccaccatccccgactggaagctgcagctgctggccagaagaagacaggaggaggccagcgtgagaggcagagagaaggccgagagagagagactgagccagatgcccgcctggaagagaggcctgctggagagaagaagagccaagctgggcctgagccccggcgagcccagccccgtgctgggcaccgtggaggccggcccccccgaccccgacgagagcgccgtgctgctggaggccatcggccccgtgcaccagaacagattcatcagacaggagagacagcagcagcagcagcagcagcagagaagcgaggagctgctggccgagagaaagcccggccccctggaggccagagagagaagacccagccccggcgagatgagagaccagagccccaagggcagagagagcagagaggagagactgagccccagagagaccagagagagaagactgggcatcggcggcgcccaggagctgagcctgagacccctggaggccagagactggagacagagccccggcgaggtgggcgacagaagcagcagactgagcgaggcctggaagtggagactgagccccggcgagacccccgagagaagcctgagactggccgagagcagagagcagagccccagaagaaaggaggtggagagcagactgagccccggcgagagcgcctaccagaagctgggcctgaccgaggcccacaagtggagacccgacagcagagagagccaggagcagagcctggtgcagctggaggccaccgagtggagactgagaagcggcgaggagagacaggactacagcgaggagtgcggcagaaaggaggagtggcccgtgcccggcgtggcccccaaggagaccgccgagctgagcgagaccctgaccagagaggcccagggcaacagcagcgccggcgtggaggccgccgagcagagacccgtggaggacggcgagagaggcatgaagcccaccgagggctggaagtggaccctgatcatgagcctggccggcaagggcaaccagcacctggtgacctgcttcccccaccccgtgagcggcggcagagccaactgccccatcagcaccctgatccagagcccctggtgcggctggggctag

SEQ ID NO: 11012 - DNA, 2223 bp, synthetic construct
  source 1..2223: mol_type = other DNA; note = Synthetic coding sequence
atggaggccgacggcgacggcgaggagctggccagactgagaagcgtgttcgccgcctgcgacgccaacagaagcggcagactggagagagaggagttcagagccctgtgcaccgagctgagagtgagacccgccgacgccgaggccgtgttccagagactggacgccgacagagacggcgccatcaccttccaggagttcgccagaggcttcctgggcagcctgagaggcggcagaagaagagactggggccccctggaccccgcccccgccgtgagcgaggccggccccgagacccacgacagcgaggaggacgagggcgacgaggacgccgccgccgccctggccaccagctgcggccccgccagccccggcagagcctggcaggacttccaggccagactgggcgacgaggccaagttcatccccagagaggagcaggtgagcaccctgtaccagaacatcaacctggtggagcccagactgatccagccctacgagcacgtgatcaagaacttcatcagagagatcagactgcagagcaccgagatggagaacctggccatcgccgtgaagagagcccaggacaaggccgccatgcagctgagcgagctggaggaggagatggaccagagaatccaggccgccgagcacaagaccagaaaggacgagaagagaaaggccgaggaggccctgagcgacctgagaagacagtacgagaccgaggtgggcgacctgcaggtgaccatcaagaagctgagaaagctggaggagcagagcaagagagtgagccagaaggaggacgtggccgccctgaagaagcagatctacgacctgagcatggagaaccagaaggtgaagaaggacctgctggaggcccagaccaacatcgccttcctgcagagcgagctggacgccctgaagagcgactacgccgaccagagcctgaacaccgagagagacctggagatcatcagagcctacaccgaggacagaaacagcctggagagacagatcgagatcctgcagaccgccaacagaaagctgcacgacagcaacgacggcctgagaagcgccctggagaacagctacagcaagttcaacagaagcctgcacatcaacaacatcagccccggcaacaccatcagcagaagcagccccaagttcatcggccacagcccccagcccctgggctacgacagaagcagcagaagcagctacgtggacgaggactgcgacagcctggccctgtgcgaccccctgcagagaaccaactgcgaggtggacagcctgcccgagagctgcttcgacagcggcctgagcaccctgagagaccccaacgagtacgacagcgaggtggagtacaagcaccagagaggcttccagagaagccacggcgtgcaggagagcttcggcggcgacgccagcgacaccgacgtgcccgacatcagagacgaggagaccttcggcctggaggacgtggccagcgtgctggactggaagccccagggcagcgtgagcgagggcagcatcgtgagcagcagcagaaagcccatcagcgccctgagcccccagaccgacctggtggacgacaacgccaagagcttcagcagccagaaggcctacaagatcgtgctggccggcgacgccgccgtgggcaagagcagcttcctgatgagactgtgcaagaacgagttcagagagaacatcagcgccaccctgggcgtggacttccagatgaagaccctgatcgtggacggcgagagaaccgtgctgcagctgtgggacaccgccggccaggagagattcagaagcatcgccaagagctacttcagaaaggccgacggcgtgctgctgctgtacgacgtgacctgcgagaagagcttcctgaacatcagagagtgggtggacatgatcgaggacgccgcccacgagaccgtgcccatcatgctggtgggcaacaaggccgacatcagagacaccgccgccaccgagggccagaagtgcgtgcccggccacttcggcgagaagctggccatgacctacggcgccctgttctgcgagaccagcgccaaggacggcagcaacatcgtggaggccgtgctgcacctggccagagaggtgaagaagagaaccgacaaggacgacagcagaagcatcaccaacctgaccggcaccaacagcaagaagagcccccagatgaagaactgctgcaacggctag

SEQ ID NO: 11013 - DNA, 4125 bp, synthetic construct
  source 1..4125: mol_type = other DNA; note = Synthetic coding sequence
atggaggagaacgagagccagaagtgcgagccctgcctgccctacagcgccgacagaagacagatgcaggagcagggcaagggcaacctgcacgtgaccagccccgaggacgccgagtgcagaagaaccaaggagagactgagcaacggcaacagcagaggcagcgtgagcaagagcagcagaaacatccccagaagacacaccctgggcggccccagaagcagcaaggagatcctgggcatgcagaccagcgagatggacagaaagagagaggccttcctggagcacctgaagcagaagtacccccaccacgccagcgccatcatgggccaccaggagagactgagagaccagaccagaagccccaagctgagccacagcccccagccccccagcctgggcgaccccgtggagcacctgagcgagaccagcgccgacagcctggaggccatgagcgagggcgacgcccccacccccttcagcagaggcagcagaaccagagccagcctgcccgtggtgagaagcaccaaccagaccaaggagagaagcctgggcgtgctgtacctgcagtacggcgacgagaccaagcagctgagaatgcccaacgagatcaccagcgccgacaccatcagagccctgttcgtgagcgccttcccccagcagctgaccatgaagatgctggagagccccagcgtggccatctacatcaaggacgagagcagaaacgtgtactacgagctgaacgacgtgagaaacatccaggacagaagcctgctgaaggtgtacaacaaggaccccgcccacgccttcaaccacacccccaagaccatgaacggcgacatgagaatgcagagagagctggtgtacgccagaggcgacggccccggcgcccccagacccggcagcaccgcccaccccccccacgccatccccaacagcccccccagcacccccgtgccccacagcatgccccccagccccagcagaatcccctacggcggcaccagaagcatggtggtgcccggcaacgccaccatccccagagacagaatcagcagcctgcccgtgagcagacccatcagccccagccccagcgccatcctggagagaagagacgtgaagcccgacgaggacatgagcggcaagaacatcgccatgtacagaaacgagggcttctacgccgacccctacctgtaccacgagggcagaatgagcatcgccagcagccacggcggccaccccctggacgtgcccgaccacatcatcgcctaccacagaaccgccatcagaagcgccagcgcctactgcaaccccagcatgcaggccgagatgcacatggagcagagcctgtacagacagaagagcagaaagtaccccgacagccacctgcccaccctgggcagcaagaccccccccgccagcccccacagagtgagcgacctgagaatgatcgacatgcacgcccactacaacgcccacggccccccccacaccatgcagcccgacagagccagccccagcagacaggccttcaagaaggagcccggcaccctggtgtacatcgagaagcccagaagcgccgccggcctgagcagcctggtggacctgggcccccccctgatggagaagcaggtgttcgcctacagcaccgccaccatccccaaggacagagagaccagcgagaagatgatgaagaccaccgccaacagaaaccacaccgacagcgccggcaccccccacgtgagcggcggcaagatgctgagcgccctggagagcaccgtgccccccagccagcccccccccgtgggcaccagcgccatccacatgagcctgctggagatgagaagaagcgtggccgagctgagactgcagctgcagcagatgagacagctgcagctgcagaaccaggagctgctgagagccatgatgaagaaggccgagctggagatcagcggcaaggtgatggagaccatgaagagactggaggaccccgtgcagagacagagagtgctggtggagcaggagagacagaagtacctgcacgaggaggagaagatcgtgaagaagctgtgcgagctggaggacttcgtggaggacctgaagaaggacagcaccgccgccagcagactggtgaccctgaaggacgtggaggacggcgccttcctgctgagacaggtgggcgaggccgtggccaccctgaagggcgagttccccaccctgcagaacaagatgagagccatcctgagaatcgaggtggaggccgtgagattcctgaaggaggagccccacaagctggacagcctgctgaagagagtgagaagcatgaccgacgtgctgaccatgctgagaagacacgtgaccgacggcctgctgaagggcaccgacgccgcccaggccgcccagtacatggccatggagaaggccaccgccgccgaggtgctgaagagccaggaggaggccgcccacaccagcggccagcccttccacagcaccggcgcccccggcgacgccaagagcgaggtggtgcccctgagcggcatgatggtgagacacgcccagagcagccccgtggtgatccagcccagccagcacagcgtggccctgctgaaccccgcccagaacctgccccacgtggccagcagccccgccgtgccccaggaggccaccagcaccctgcagatgagccaggccccccagagcccccagatccccatgaacggcagcgccatgcagagcctgttcatcgaggagatccacagcgtgagcgccaagaacagagccgtgagcatcgagaaggccgagaagaagtgggaggagaagagacagaacctggaccactacaacggcaaggagttcgagaagctgctggaggaggcccaggccaacatcatgaagagcatccccaacctggagatgccccccgccaccggccccctgcccagaggcgacgcccccgtggacaaggtggagctgagcgacagccccaacagcgagcaggacctggagaagctgggcggcaagagcccccccccccccccccccccccccagaagaagctacctgcccggcagcggcctgaccaccaccagaagcggcgacgtggtgtacaccggcagaaaggagaacatcaccgccaaggccagcagcgaggacgccggccccagcccccagaccagagccaccaagtaccccgccgaggagcccgccagcgcctggacccccagccccccccccgtgaccaccagcagcagcaaggacgaggaggaggaggaggaggagggcgacaagatcatggccgagctgcaggccttccagaagtgcagcttcatggacgtgaacagcaacagccacgccgagcccagcagagccgacagccacgtgaaggacaccagaagcggcgccaccgtgccccccaaggagaagaagaacctggagttcttccacgaggacgtgagaaagagcgacgtggagtacgagaacggcccccagatggagttccagaagggcagcagcggcgccccccagaccagcagaatgcccgtgcccatgagcgccaagaacagacccggcaccctggacaagcccggcaagcagagcaagctgcaggaccccagacagtacagacaggccaacggcagcgccaagaagagcggcggcgacttcaagcccaccagccccagcctgcccgccagcaagatccccgccctgagccccagcagcggcaagagcagcagcctgcccagcagcagcggcgacagcagcaacctgcccaacccccccgccaccaagcccagcatcgccagcaaccccctgagcccccagaccggcccccccgcccacagcgccagcctgatccccagcgtgagcaacggcagcctgaagttccagagcctgacccacaccggcaagggccaccacctgagcttcagcccccagagccagaacggcagagcccccccccccctgagcttcagcagcagcccccccagccccgccagcagcgtgagcctgaaccagggcgccaagggcaccagaaccatccacacccccagcctgaccagctacaaggcccagaacggcagcagcagcaaggccacccccagcaccgccaaggagaccagctag

SEQ ID NO: 11014 - DNA, 5832 bp, synthetic construct
  source 1..5832: mol_type = other DNA; note = Synthetic coding sequence
atggaggagaacgagagccagaagtgcgagccctgcctgccctacagcgccgacagaagacagatgcaggagcagggcaagggcaacctgcacgtgaccagccccgaggacgccgagtgcagaagaaccaaggagagactgagcaacggcaacagcagaggcagcgtgagcaagagcagcagaaacatccccagaagacacaccctgggcggccccagaagcagcaaggagatcctgggcatgcagaccagcgagatggacagaaagagagaggccttcctggagcacctgaagcagaagtacccccaccacgccagcgccatcatgggccaccaggagagactgagagaccagaccagaagccccaagctgagccacagcccccagccccccagcctgggcgaccccgtggagcacctgagcgagaccagcgccgacagcctggaggccatgagcgagggcgacgcccccacccccttcagcagaggcagcagaaccagagccagcctgcccgtggtgagaagcaccaaccagaccaaggagagaagcctgggcgtgctgtacctgcagtacggcgacgagaccaagcagctgagaatgcccaacgagatcaccagcgccgacaccatcagagccctgttcgtgagcgccttcccccagcagctgaccatgaagatgctggagagccccagcgtggccatctacatcaaggacgagagcagaaacgtgtactacgagctgaacgacgtgagaaacatccaggacagaagcctgctgaaggtgtacaacaaggaccccgcccacgccttcaaccacacccccaagaccatgaacggcgacatgagaatgcagagagagctggtgtacgccagaggcgacggccccggcgcccccagacccggcagcaccgcccaccccccccacgccatccccaacagcccccccagcacccccgtgccccacagcatgccccccagccccagcagaatcccctacggcggcaccagaagcatggtggtgcccggcaacgccaccatccccagagacagaatcagcagcctgcccgtgagcagacccatcagccccagccccagcgccatcctggagagaagagacgtgaagcccgacgaggacatgagcggcaagaacatcgccatgtacagaaacgagggcttctacgccgacccctacctgtaccacgagggcagaatgagcatcgccagcagccacggcggccaccccctggacgtgcccgaccacatcatcgcctaccacagaaccgccatcagaagcgccagcgcctactgcaaccccagcatgcaggccgagatgcacatggagcagagcctgtacagacagaagagcagaaagtaccccgacagccacctgcccaccctgggcagcaagaccccccccgccagcccccacagagtgagcgacctgagaatgatcgacatgcacgcccactacaacgcccacggccccccccacaccatgcagcccgacagagccagccccagcagacaggccttcaagaaggagcccggcaccctggtgtacatcgagaagcccagaagcgccgccggcctgagcagcctggtggacctgggcccccccctgatggagaagcaggtgttcgcctacagcaccgccaccatccccaaggacagagagaccagagagagaatgcaggccatggagaagcagatcgccagcctgaccggcctggtgcagagcgccctgttcaagggccccatcaccagctacagcaaggacgccagcagcgagaagatgatgaagaccaccgccaacagaaaccacaccgacagcgccggcaccccccacgtgagcggcggcaagatgctgagcgccctggagagcaccgtgccccccagccagcccccccccgtgggcaccagcgccatccacatgagcctgctggagatgagaagaagcgtggccgagctgagactgcagctgcagcagatgagacagctgcagctgcagaaccaggagctgctgagagccatgatgaagaaggccgagctggagatcagcggcaaggtgatggagaccatgaagagactggaggaccccgtgcagagacagagagtgctggtggagcaggagagacagaagtacctgcacgaggaggagaagatcgtgaagaagctgtgcgagctggaggacttcgtggaggacctgaagaaggacagcaccgccgccagcagactggtgaccctgaaggacgtggaggacggcgccttcctgctgagacaggtgggcgaggccgtggccaccctgaagggcgagttccccaccctgcagaacaagatgagagccatcctgagaatcgaggtggaggccgtgagattcctgaaggaggagccccacaagctggacagcctgctgaagagagtgagaagcatgaccgacgtgctgaccatgctgagaagacacgtgaccgacggcctgctgaagggcaccgacgccgcccaggccgcccagtacatggccatggagaaggccaccgccgccgaggtgctgaagagccaggaggaggccgcccacaccagcggccagcccttccacagcaccggcgcccccggcgacgccaagagcgaggtggtgcccctgagcggcatgatggtgagacacgcccagagcagccccgtggtgatccagcccagccagcacagcgtggccctgctgaaccccgcccagaacctgccccacgtggccagcagccccgccgtgccccaggaggccaccagcaccctgcagatgagccaggccccccagagcccccagatccccatgaacggcagcgccatgcagagcctgttcatcgaggagatccacagcgtgagcgccaagaacagagccgtgagcatcgagaaggccgagaagaagtgggaggagaagagacagaacctggaccactacaacggcaaggagttcgagaagctgctggaggaggcccaggccaacatcatgaagagcatccccaacctggagatgccccccgccaccggccccctgcccagaggcgacgcccccgtggacaaggtggagctgagcgaggacagccccaacagcgagcaggacctggagaagctgggcggcaagagcccccccccccccccccccccccccagaagaagctacctgcccggcagcggcctgaccaccaccagaagcggcgacgtggtgtacaccggcagaaaggagaacatcaccgccaaggccagcagcgaggacgccggccccagcccccagaccagagccaccaagtaccccgccgaggagcccgccagcgcctggacccccagccccccccccgtgaccaccagcagcagcaaggacgaggaggaggaggaggaggagggcgacaagatcatggccgagctgcaggccttccagaagtgcagcttcatggacgtgaacagcaacagccacgccgagcccagcagagccgacagccacgtgaaggacaccagaagcggcgccaccgtgccccccaaggagaagaagaacctggagttcttccacgaggacgtgagaaagagcgacgtggagtacgagaacggcccccagatggagttccagaaggtgaccaccggcgccgtgagacccagcgacccccccaagtgggagagaggcatggagaacagcatcagcgacgccagcagaaccagcgagtacaagaccgagatcatcatgaaggagaacagcatcagcaacatgagcctgctgagagacagcagaaactacagccaggagaccgtgcccaaggccagcttcggcttcagcggcatcagccccctggaggacgagatcaacaagggcagcaagatcagcggcctgcagtacagcatccccgacaccgagaaccagaccctgaactacggcaagaccaaggagatggagaagcagaacaccgacaagtgccacgtgagcagccacaccagactgaccgagagcagcgtgcacgacttcaagaccgaggaccaggaggtgatcaccaccgacttcggccaggtggtgctgagacccaaggaggccagacacgccaacgtgaaccccaacgaggacggcgagagcagcagcagcagccccaccgaggagaacgccgccaccgacaacatcgccttcatgatcaccgagaccaccgtgcaggtgctgagcagcggcgaggtgcacgacatcgtgagccagaagggcgaggacatccagaccgtgaacatcgacgccagaaaggagatgacccccagacaggagggcaccgacaacgaggaccccgtggtgtgcctggacaagaagcccgtgatcatcatcttcgacgagcccatggacatcagaagcgcctacaagagactgagcaccatcttcgaggagtgcgacgaggagctggagagaatgatgatggaggagaagatcgaggaggaggaggaggaggagaacggcgacagcgtggtgcagaacaacaacaccagccagatgagccacaagaaggtggcccccggcaacctgagaaccggccagcaggtggagaccaagagccagccccacagcctggccaccgagaccagaaaccccggcggccaggagatgaacagaaccgagctgaacaagttcagccacgtggacagccccaacagcgagtgcaagggcgaggacgccaccgacgaccagttcgagagccccaagaagaagttcaagttcaagttccccaagaagcagctggccgccctgacccaggccatcagaaccggcaccaagaccggcaagaagaccctgcaggtggtggtgtacgaggaggaggaggaggacggcaccctgaagcagcacaaggaggccaagagattcgagatcgccagaagccagcccgaggacacccccgagaacaccgtgagaagacaggagcagcccagcatcgagagcaccagccccatcagcagaaccgacgagatcagaaagaacacctacagaaccctggacagcctggagcagaccatcaagcagctggagaacaccatcagcgagatgagccccaaggccctggtggacaccagctgcagcagcaacagagacagcgtggccagcagcagccacatcgcccaggaggccagccccagacccctgctggtgcccgacgagggccccaccgccctggagccccccaccagcatccccagcgccagcagaaagggcagcagcggcgccccccagaccagcagaatgcccgtgcccatgagcgccaagaacagacccggcaccctggacaagcccggcaagcagagcaagctgcaggaccccagacagtacagacaggccaacggcagcgccaagaagagcggcggcgacttcaagcccaccagccccagcctgcccgccagcaagatccccgccctgagccccagcagcggcaagagcagcagcctgcccagcagcagcggcgacagcagcaacctgcccaacccccccgccaccaagcccagcatcgccagcaaccccctgagcccccagaccggcccccccgcccacagcgccagcctgatccccagcgtgagcaacggcagcctgaagttccagagcctgacccacaccggcaagggccaccacctgagcttcagcccccagagccagaacggcagagcccccccccccctgagcttcagcagcagcccccccagccccgccagcagcgtgagcctgaaccagggcgccaagggcaccagaaccatccacacccccagcctgaccagctacaaggcccagaacggcagcagcagcaaggccacccccagcaccgccaaggagaccagctag

SEQ ID NO: 11015 - DNA, 3795 bp, synthetic construct
  source 1..3795: mol_type = other DNA; note = Synthetic coding sequence
atgcagaccagcgagatggacagaaagagagaggccttcctggagcacctgaagcagaagtacccccaccacgccagcgccatcatgggccaccaggagagactgagagaccagaccagaagccccaagctgagccacagcccccagccccccagcctgggcgaccccgtggagcacctgagcgagaccagcgccgacagcctggaggccatgagcgagggcgacgcccccacccccttcagcagaggcagcagaaccagagccagcctgcccgtggtgagaagcaccaaccagaccaaggagagaagcctgggcgtgctgtacctgcagtacggcgacgagaccaagcagctgagaatgcccaacgagatcaccagcgccgacaccatcagagccctgttcgtgagcgccttcccccagcagctgaccatgaagatgctggagagccccagcgtggccatctacatcaaggacgagagcagaaacgtgtactacgagctgaacgacgtgagaaacatccaggacagaagcctgctgaaggtgtacaacaaggaccccgcccacgccttcaaccacacccccaagaccatgaacggcgacatgagaatgcagagagagctggtgtacgccagaggcgacggccccggcgcccccagacccggcagcaccgcccaccccccccacgccatccccaacagcccccccagcacccccgtgccccacagcatgccccccagccccagcagaatcccctacggcggcaccagaagcatggtggtgcccggcaacgccaccatccccagagacagaatcagcagcctgcccgtgagcagacccatcagccccagccccagcgccatcctggagagaagagacgtgaagcccgacgaggacatgagcggcaagaacatcgccatgtacagaaacgagggcttctacgccgacccctacctgtaccacgagggcagaatgagcatcgccagcagccacggcggccaccccctggacgtgcccgaccacatcatcgcctaccacagaaccgccatcagaagcgccagcgcctactgcaaccccagcatgcaggccgagatgcacatggagcagagcctgtacagacagaagagcagaaagtaccccgacagccacctgcccaccctgggcagcaagaccccccccgccagcccccacagagtgagcgacctgagaatgatcgacatgcacgcccactacaacgcccacggccccccccacaccatgcagcccgacagagccagccccagcagacaggccttcaagaaggagcccggcaccctggtgtacatcgagaagcccagaagcgccgccggcctgagcagcctggtggacctgggcccccccctgatggagaagcaggtgttcgcctacagcaccgccaccatccccaaggacagagagaccagagagagaatgcaggccatggagaagcagatcgccagcctgaccggcctggtgcagagcgccctgttcaagggccccatcaccagctacagcaaggacgccagcagcgagaagatgatgaagaccaccgccaacagaaaccacaccgacagcgccggcaccccccacgtgagcggcggcaagatgctgagcgccctggagagcaccgtgccccccagccagcccccccccgtgggcaccagcgccatccacatgagcctgctggagatgagaagaagcgtggccgagctgagactgcagctgcagcagatgagacagctgcagctgcagaaccaggagctgctgagagccatgatgaagaaggccgagctggagatcagcggcaaggtgatggagaccatgaagagactggaggaccccgtgcagagacagagagtgctggtggagcaggagagacagaagtacctgcacgaggaggagaagatcgtgaagaagctgtgcgagctggaggacttcgtggaggacctgaagaaggacagcaccgccgccagcagactggtgaccctgaaggacgtggaggacggcgccttcctgctgagacaggtgggcgaggccgtggccaccctgaagggcgagttccccaccctgcagaacaagatgagagccatcctgagaatcgaggtggaggccgtgagattcctgaaggaggagccccacaagctggacagcctgctgaagagagtgagaagcatgaccgacgtgctgaccatgctgagaagacacgtgaccgacggcctgctgaagggcaccgacgccgcccaggccgcccagtacatggccatggagaaggccaccgccgccgaggtgctgaagagccaggaggaggccgcccacaccagcggccagcccttccacagcaccggcgcccccggcgacgccaagagcgaggtggtgcccctgagcggcatgatggtgagacacgcccagagcagccccgtggtgatccagcccagccagcacagcgtggccctgctgaaccccgcccagaacctgccccacgtggccagcagccccgccgtgccccaggaggccaccagcaccctgcagatgagccaggccccccagagcccccagatccccatgaacggcagcgccatgcagagcctgttcatcgaggagatccacagcgtgagcgccaagaacagagccgtgagcatcgagaaggccgagaagaagtgggaggagaagagacagaacctggaccactacaacggcaaggagttcgagaagctgctggaggaggcccaggccaacatcatgaagagcatccccaacctggagatgccccccgccaccggccccctgcccagaggcgacgcccccgtggacaaggtggagctgagcgaggacagccccaacagcgagcaggacctggagaagctgggcggcaagagcccccccccccccccccccccccccagaagaagctacctgcccggcagcggcctgaccaccaccagaagcggcgacgtggtgtacaccggcagaaaggagaacatcaccgccaaggccagcagcgaggacgccggccccagcccccagaccagagccaccaagtaccccgccgaggagcccgccagcgcctggacccccagccccccccccgtgaccaccagcagcagcaaggacgaggaggaggaggaggaggagggcgacaagatcatggccgagctgcagggcagcagcggcgccccccagaccagcagaatgcccgtgcccatgagcgccaagaacagacccggcaccctggacaagcccggcaagcagagcaagctgcaggaccccagacagtacagacaggccaacggcagcgccaagaagagcggcggcgacttcaagcccaccagccccagcctgcccgccagcaagatccccgccctgagccccagcagcggcaagagcagcagcctgcccagcagcagcggcgacagcagcaacctgcccaacccccccgccaccaagcccagcatcgccagcaaccccctgagcccccagaccggcccccccgcccacagcgccagcctgatccccagcgtgagcaacggcagcctgaagttccagagcctgacccacaccggcaagggccaccacctgagcttcagcccccagagccagaacggcagagcccccccccccctgagcttcagcagcagcccccccagccccgccagcagcgtgagcctgaaccagggcgccaagggcaccagaaccatccacacccccagcctgaccagctacaaggcccagaacggcagcagcagcaaggccacccccagcaccgccaaggagaccagctag

SEQ ID NO: 11016 - DNA, 531 bp, synthetic construct
  source 1..531: mol_type = other DNA; note = Synthetic coding sequence
atgggctgctgcggctgcagcggcggctgcggcagcggctgcggcggctgcggcagcggcagcggcggctgcggcagcggctgcggcggctgcggcagcagctgctgcgtgcccatctgctgctgcaagcccgtgtgctgctgcgtgcccgcctgcagctgcagcagctgcggcagctgcggcggcagcaagggcggctgcggcagctgcggcagcagcaagggcggctgcggcagctgcggctgcagccagagcaactgctgcaagccctgctgcagcagcagcggctgcggcagcttctgctgccagagcagctgcagcaagccctgctgctgccagagcagctgctgccagagcagctgctgcaagccctgctgctgccagagcagctgctgccagagcagctgcttcaagccctgctgctgccagagcagctgctgcgtgcccgtgtgctgccagagcagctgctgcaagccctgctgcagccagagcagctgctgcgtgcccatctgctgccagtacaagatctag

SEQ ID NO: 11017 - DNA, 513 bp, synthetic construct
  source 1..513: mol_type = other DNA; note = Synthetic coding sequence
atgggctgctgcggctgcagcggcggctgcggcagcggctgcggcggctgcggcagcggctgcggcggctgcggcagcggctgcggcggctacggcagcggctgcggcggctgcggcagcagctgctgcgtgcccgtgtgctgctgcaagcccgtgtgctgctgcgtgcccgcctgcagctgcagcagctgcggcagctgcggcggcagcaagggcgactgcggctgcggcagctgcggcggcagcaagggcggctgcggcagctgcggctgcagccagtgcaactgctgcaagccctgctgctgcagcagcggctgcggcagctgctgccagagcagctgctgcaacccctgctgctgccagagcagctgctgcgtgcccgtgtgctgccagagcagctgctgcaagccctgctgctgccagagcagctgctgcgtgcccagcagctgctgcagaagctgctgcagcaagagcagctgctgcgtgcccatctgctgccagtacaagatctag

SEQ ID NO: 11018 - DNA, 2169 bp, synthetic construct
  source 1..2169: mol_type = other DNA; note = Synthetic coding sequence
atgatcgacagcgtgaagctgagaagagacagcgccgccgacttcttcagccactacgagtacctgtgcgccctgcagaacagcgtgcccctgcccgccgtgagagcctgcctgagagagggcgtgctggacttcaacgccgacagactgagaggcgtggactgggcccccctgctgagcaccctgaagatcaacaaggacctgcccctggtgagcatcaagagcttcttccagccctggctgggcgacaccggcagcgacatgaacaagttctgcagaagcagagtgcccgccatcagatacaaggacgtgaccttccagctgtgcaaggccctgaagggctgcctgagcatcagcagcgtgctgaagaacctggagctgaacggcctgatcctgagagagagagacctgaccatcctggccaagggcctgaacaagagcgccagcctggtgcacctgagcctggccaactgccccatcggcgacggcggcctggagatcatctgccagggcatcaagagcagcatcaccctgaagaccgtgaacttcaccggctgcaacctgacctggcagggcgccgaccacatggccaagatcctgaagtaccagaccatgagaagacacgaggagacctgggccgagagcctgagatacagaagacccgacctggactgcatggccggcctgagaagaatcaccctgaactgcaacaccctgatcggcgacctgggcgcctgcgccttcgccgacagcctgagcgaggacctgtggctgagagccctggacctgcagcagtgcggcctgaccaacgagggcgccaaggccctgctggaggccctggagaccaacaccaccctggtggtgctggacatcagaaagaaccccctgatcgaccacagcatgatgaaggccgtgatcaagaaggtgctgcagaacggcagaagcgccaagagcgagtaccagtggatcaccagccccagcgtgaaggagcccagcaagaccgccaagcagaagagaagaaccatcatcctgggcagcggccacaagggcaaggccaccatcagaatcgtgggcctggccaccaagaagcccgtgagcagcggcagaaagcacagcctgggcaaggagtactacgcccccgcccccctgccccccggcgtgagcggcttcctgccctggagaaccgccgagagagccaagagacacagaggcttccccctgatcaagaccagagacatctgcaaccagctgcagcagcccggcttccccgtgaccgtgaccgtggagagccccagcagcagcgaggtggaggaggtggacgacagcagcgagagcgtgcacgaggtgcccgagaagaccagcatcgagcaggaggccctgcaggagaagctggaggagtgcctgaagcagctgaaggaggagagagtgatcagactgaaggtggacaagagagtgagcgagctggagcacgagaacgcccagctgagaaacatcaacttcagcctgagcgaggccctgcacgcccagagcctgaccaacatgatcctggacgacgagggcgtgctgggcagcatcgagaacagcttccagaagttccacgccttcctggacctgctgaaggacgccggcctgggccagctggccaccatggccggcatcgaccagagcgacttccagctgctgggccacccccagatgaccagcaccgtgagcaacccccccaaggaggagaagaaggccctggaggacgagaagcccgagcccaagcagaacgccctgggccagatgcagaacatccaggtgagcatctgcatgcagagcgcctacaacgagggcaccctgatgaagttccagaagatcaccggcgacgccagaatccccctgcccctggacagcttccccgtgcccgtgagcacccccgagggcctgggcaccagcagcaacaacctgggcgtgcccgccaccgagcagagacaggagagcttcgagggcttcatcgccagaatgtgcagccccagccccgacgccaccagcggcaccggcagccagagaaaggaggaggagctgagcagaaacagcagaagcagcagcgagaagaagaccaagaccggcgagtacaccaagaagcacagcgacaagcagcaccccggcaaggacctgcacagctag

SEQ ID NO: 11019 - DNA, 1122 bp, synthetic construct
  source 1..1122: mol_type = other DNA; note = Synthetic coding sequence
atggccctgaacgtggcccccgtgagagacaccaagtggctgaccctggaggtgtgcagacagttccagagaggcacctgcagcagaagcgacgaggagtgcaagttcgcccacccccccaagagctgccaggtggagaacggcagagtgatcgcctgcttcgacagcctgaagggcagatgcagcagagagaactgcaagtacctgcacccccccacccacctgaagacccagctggagatcaacggcagaaacaacctgatccagcagaagaccgccgccgccatgctggcccagcagatgcagttcatgttccccggcacccccctgcaccccgtgcccaccttccccgtgggccccgccatcggcaccaacaccgccatcagcttcgccccctacctggcccccgtgacccccggcgtgggcctggtgcccaccgagatcctgcccaccacccccgtgatcgtgcccggcagcccccccgtgaccgtgcccggcagcaccgccacccagaagctgctgagaaccgacaagctggaggtgtgcagagagttccagagaggcaactgcgccagaggcgagaccgactgcagattcgcccaccccgccgacagcaccatgatcgacaccagcgacaacaccgtgaccgtgtgcatggactacatcaagggcagatgcatgagagagaagtgcaagtacttccacccccccgcccacctgcaggccaagatcaaggccgcccagcaccaggccaaccaggccgccgtggccgcccaggccgccgccgccgccgccaccgtgatggccttcccccccggcgccctgcaccccctgcccaagagacaggccctggagaagagcaacggcaccagcgccgtgttcaaccccagcgtgctgcactaccagcaggccctgaccagcgcccagctgcagcagcacgccgccttcatccccaccggcagcgtgctgtgcatgacccccgccaccagcatcgacaacagcgagatcatcagcagaaacggcatggagtgccaggagagcgccctgagaatcaccaagcactgctactgcacctactaccccgtgagcagcagcatcgagctgccccagaccgcctgctag

SEQ ID NO: 11020 - DNA, 321 bp, synthetic construct
  source 1..321: mol_type = other DNA; note = Synthetic coding sequence
atgacccagagcaccgccaaggccatgaagagacccctggaggccaccgtggacctggccttcccccccggcgccctgcaccccctgcccaagagacaggccctggagaagagcaacggcaccagcgccgtgttcaaccccagcgtgctgcactaccagcaggccctgaccagcgcccagctgcagcagcacgccgccttcatccccaccgtgcccatgatgcacagcgccaccagcgccaccgtgagcgccgccaccacccccgccaccagcgtgcccttcgccgccaccgccaccgccaaccagctggtgtacagctag

SEQ ID NO: 11021 - DNA, 915 bp, synthetic construct
  source 1..915: mol_type = other DNA; note = Synthetic coding sequence
atggccaagatcgagaagaacgcccccaccatggagaagaagcccgagctgttcaacatcatggaggtggacggcgtgcccaccctgatcctgagcaaggagtggtgggagaaggtgtgcaacttccaggccaagcccgacgacctgatcctggccacctaccccaagagcggcaccacctggatgcacgagatcctggacatgatcctgaacgacggcgacgtggagaagtgcaagagagcccagaccctggacagacacgccttcctggagctgaagttcccccacaaggagaagcccgacctggagttcgtgctggagatgagcagcccccagctgatcaagacccacctgcccagccacctgatcccccccagcatctggaaggagaactgcaagatcgtgtacgtggccagaaaccccaaggactgcctggtgagctactaccacttccacagaatggccagcttcatgcccgacccccagaacctggaggagttctacgagaagttcatgagcggcaaggtggtgggcggcagctggttcgaccacgtgaagggctggtgggccgccaaggacatgcacagaatcctgtacctgttctacgaggacatcaagaagaaccccaagcacgagatccacaaggtgctggagttcctggagaagacctggagcggcgacgtgatcaacaagatcgtgcaccacaccagcttcgacgtgatgaaggacaaccccatggccaaccacaccgccgtgcccgcccacatcttcaaccacagcatcagcaagttcatgagaaagggcatgcccggcgactggaagaaccacttcaccgtggccctgaacgagaacttcgacaagcactacgagaagaagatggccggcagcaccctgaacttctgcctggagatctag

SEQ ID NO: 11022 - DNA, 1188 bp, synthetic construct
  source 1..1188: mol_type = other DNA; note = Synthetic coding sequence
atggccagcgccgccagcgtgaccagcctggccgacgaggtgaactgccccatctgccagggcaccctgagagagcccgtgaccatcgactgcggccacaacttctgcagagcctgcctgaccagatactgcgagatccccggccccgacctggaggagagccccacctgccccctgtgcaaggagcccttcagacccggcagcttcagacccaactggcagctggccaacgtggtggagaacatcgagagactgcagctggtgagcaccctgggcctgggcgaggaggacgtgtgccaggagcacggcgagaagatctacttcttctgcgaggacgacgagatgcagctgtgcgtggtgtgcagagaggccggcgagcacgccacccacaccatgagattcctggaggacgccgccgccccctacagagagcagatccacaagtgcctgaagtgcctgagaaaggagagagaggagatccaggagatccagagcagagagaacaagagaatgcaggtgctgctgacccaggtgagcaccaagagacagcaggtgatcagcgagttcgcccacctgagaaagttcctggaggagcagcagagcatcctgctggcccagctggagagccaggacggcgacatcctgagacagagagacgagttcgacctgctggtggccggcgagatctgcagattcagcgccctgatcgaggagctggaggagaagaacgagagacccgccagagagctgctgaccgacatcagaagcaccctgatcagatgcgagaccagaaagtgcagaaagcccgtggccgtgagccccgagctgggccagagaatcagagacttcccccagcaggccctgcccctgcagagagagatgaagatgttcctggagaagctgtgcttcgagctggactacgagcccgcccacatcagcctggacccccagaccagccaccccaagctgctgctgagcgaggaccaccagagagcccagttcagctacaagtggcagaacagccccgacaacccccagagattcgacagagccacctgcgtgctggcccacaccggcatcaccggcggcagacacacctgggtgtggatggccagagtgcccggcgacagcggctgctgccagttctgcagcccccccagcgtgctgggcaccgaggtggccgcctag

SEQ ID NO: 11023 - DNA, 1446 bp, synthetic construct
  source 1..1446: mol_type = other DNA; note = Synthetic coding sequence
atggccagcgccgccagcgtgaccagcctggccgacgaggtgaactgccccatctgccagggcaccctgagagagcccgtgaccatcgactgcggccacaacttctgcagagcctgcctgaccagatactgcgagatccccggccccgacctggaggagagccccacctgccccctgtgcaaggagcccttcagacccggcagcttcagacccaactggcagctggccaacgtggtggagaacatcgagagactgcagctggtgagcaccctgggcctgggcgaggaggacgtgtgccaggagcacggcgagaagatctacttcttctgcgaggacgacgagatgcagctgtgcgtggtgtgcagagaggccggcgagcacgccacccacaccatgagattcctggaggacgccgccgccccctacagagagcagatccacaagtgcctgaagtgcctgagaaaggagagagaggagatccaggagatccagagcagagagaacaagagaatgcaggtgctgctgacccaggtgagcaccaagagacagcaggtgatcagcgagttcgcccacctgagaaagttcctggaggagcagcagagcatcctgctggcccagctggagagccaggacggcgacatcctgagacagagagacgagttcgacctgctggtggccggcgagatctgcagattcagcgccctgatcgaggagctggaggagaagaacgagagacccgccagagagctgctgaccgacatcagaagcaccctgatcagatgcgagaccagaaagtgcagaaagcccgtggccgtgagccccgagctgggccagagaatcagagacttcccccagcaggccctgcccctgcagagagagatgaagatgttcctggagaacctgcccaaccacctggtgatccccaccgcccacatcagcctggacccccagaccagccaccccaagctgctgctgagcgaggaccaccagagagcccagttcagctacaagtggcagaacagccccgacaacccccagagattcgacagagccacctgcgtgctggcccacaccggcatcaccggcggcagacacacctgggtggtgagcatcgacctggcccacggcggcagctgcaccgtgggcgtggtgagcgaggacgtgcagagaaagggcgagctgagactgagacccgaggagggcgtgtgggccgtgagactggcctggggcttcgtgagcgccctgggcagcttccccaccagactgaccctgaaggagcagcccagacaggtgagagtgagcctggactacgaggtgggctgggtgaccttcaccaacgccgtgaccagagagcccatctacaccttcaccgccagcttcaccagaaaggtgatccccttcttcggcctgtggggcagaggcagcagcttcagcctgagcagctag

SEQ ID NO: 11024 - DNA, 2604 bp, synthetic construct; identical to SEQ ID NO: 10319
  source 1..2604: mol_type = other DNA; note = Synthetic coding sequence

SEQ ID NO: 11025 - DNA, 279 bp, synthetic construct
  source 1..279: mol_type = other DNA; note = Synthetic coding sequence
atggccaccccccccaagagaagagccgtggaggccaccggcgagaaggtgctgagatacgagaccttcatcagcgacgtgctgcagagagacctgagaaaggtgctggaccacagagacaaggtgtacgagcagctggccaagtacctgcagctgagaaacgtgatcgagagactgcaggtgaagaccatgggcctgggcaccatcttcctggtgtgcgtgggcaagggcggcaagtgggaggagagactgcagacccagccctgccacctgacctag

SEQ ID NO: 11026 - DNA, 2532 bp, synthetic construct
  source 1..2532: mol_type = other DNA; note = Synthetic coding sequence
atggccgtggaggacagcaccctgcaggtggtggtgagagtgagaccccccacccccagagagctggacagccagagaagacccgtggtgcaggtggtggacgagagagtgctggtgttcaaccccgaggagcccgacggcggcttccccggcctgaagtggggcggcacccacgacggccccaagaagaagggcaaggacctgaccttcgtgttcgacagagtgttcggcgaggccgccacccagcaggacgtgttccagcacaccacccacagcgtgctggacagcttcctgcagggctacaactgcagcgtgttcgcctacggcgccaccggcgccggcaagacccacaccatgctgggcagagagggcgaccccggcatcatgtacctgaccaccgtggagctgtacagaagactggaggccagacagcaggagaagcacttcgaggtgctgatcagctaccaggaggtgtacaacgagcagatccacgacctgctggagcccaagggccccctggccatcagagaggaccccgacaagggcgtggtggtgcagggcctgagcttccaccagcccgccagcgccgagcagctgctggagatcctgaccagaggcaacagaaacagaacccagcaccccaccgacgccaacgccaccagcagcagaagccacgccatcttccagatcttcgtgaagcagcaggacagagtgcccggcctgacccaggccgtgcaggtggccaagatgagcctgatcgacctggccggcagcgagagagccagcagcacccacgccaagggcgagagactgagagagggcgccaacatcaacagaagcctgctggccctgatcaacgtgctgaacgccctggccgacgccaagggcagaaagacccacgtgccctacagagacagcaagctgaccagactgctgaaggacagcctgggcggcaactgcagaaccgtgatgatcgccgccatcagccccagcagcctgacctacgaggacacctacaacaccctgaagtacgccgacagagccaaggagatcagactgagcctgaagagcaacgtgaccagcctggactgccacatcagccagtacgccaccatctgccagcagctgcaggccgaggtggccgccctgagaaagaagctgcaggtgtacgagggcggcggccagccccccccccaggacctgcccggcagccccaagagcggccccccccccgagcacctgcccagcagccccctgcccccccacccccccagccagccctgcacccccgagctgcccgccggccccagagccctgcaggaggagagcctgggcatggaggcccaggtggagagagccatggagggcaacagcagcgaccaggagcagagccccgaggacgaggacgagggccccgccgaggaggtgcccacccagatgcccgagcagaaccccacccacgccctgcccgagagccccagactgaccctgcagcccaagcccgtggtgggccacttcagcgccagagagctggacggcgacagaagcaagcagctggccctgaaggtgctgtgcgtggcccagagacagtacagcctgctgcaggccgccaacctgctgacccccgacatgatcaccgagttcgagaccctgcagcagctggtgcaggaggagaagatcgagcccggcgccgaggccctgagaaccagcggcctggccagaggcgcccccctggcccaggagctgtgcagcgagagcatccccgtgcccagccccctgtgccccgagccccccggctacaccggccccgtgaccagaaccatggccagaagactgagcggccccctgcacaccctgggcatcccccccggccccaactgcacccccgcccagggcagcagatggcccatggagaagaagagaagaagacccagcgccctggaggccgacagccccatggcccccaagagaggcaccaagagacagagacagagcttcctgccctgcctgagaagaggcagcctgcccgacacccagcccagccagggccccagcacccccaagggcgagagagccagcagcccctgccacagccccagagtgtgccccgccaccgtgatcaagagcagagtgcccctgggccccagcgccatgcagaactgcagcacccccctggccctgcccaccagagacctgaacgccaccttcgacctgagcgaggagccccccagcaagcccagcttccacgagtgcatcggctgggacaagatcccccaggagctgagcagactggaccagcccttcatccccagagcccccgtgcccctgttcaccatgaagggccccaagcccaccagcagcctgcccggcaccagcgcctgcaagaagaagagagtggccagcagcagcgtgagccacggcagaagcagaatcgccagactgcccagcagcaccctgaagagacccggccccctgtacagccaggtgaccggcaccagagacagagacagcctgggccacggcggcagatag

SEQ ID NO: 11027 - DNA, 561 bp, synthetic construct
  source 1..561: mol_type = other DNA; note = Synthetic coding sequence
atggagccccccagaggcccccccgccaacggcgccgagcccagcagagccgtgggcaccgtgaaggtgtacctgcccaacaagcagagaaccgtggtgaccgtgagagacggcatgagcgtgtacgacagcctggacaaggccctgaaggtgagaggcctgaaccaggactgctgcgtggtgtacagactgatcaagggcagaaagaccgtgaccgcctgggacaccgccatcgcccccctggacggcgaggagctgatcgtggaggtgctggaggacgtgcccctgaccatgcacaacttcgtgagaaagaccttcttcagcctggccttctgcgacttctgcctgaagttcctgttccacggcttcagatgccagacctgcggctacaagttccaccagcactgcagcagcaaggtgcccaccgtgtgcgtggacatgagcaccaacagacagcagttctaccacagcgtgcaggacctgagcggcggcagcagacagcacgaggcccccagcaacagacccctgaacgagctgctgaccccccagggccccagatag

SEQ ID NO: 11028 - DNA, 1821 bp, synthetic construct
  source 1..1821: mol_type = other DNA; note = Synthetic coding sequence
atggagccccccagaggcccccccgccaacggcgccgagcccagcagagccgtgggcaccgtgaaggtgtacctgcccaacaagcagagaaccgtggtgaccgtgagagacggcatgagcgtgtacgacagcctggacaaggccctgaaggtgagaggcctgaaccaggactgctgcgtggtgtacagactgatcaagggcagaaagaccgtgaccgcctgggacaccgccatcgcccccctggacggcgaggagctgatcgtggaggtgctggaggacgtgcccctgaccatgcacaacttcgtgagaaagaccttcttcagcctggccttctgcgacttctgcctgaagttcctgttccacggcttcagatgccagacctgcggctacaagttccaccagcactgcagcagcaaggtgcccaccgtgtgcgtggacatgagcaccaacagacagcagttctaccacagcgtgcaggacctgagcggcggcagcagacagcacgaggcccccagcaacagacccctgaacgagctgctgaccccccagggccccagccccagaacccagcactgcgaccccgagcacttccccttccccgcccccgccaacgcccccctgcagagaatcagaagcaccagcacccccaacgtgcacatggtgagcaccaccgcccccatggacagcaacctgatccagctgaccggccagagcttcagcaccgacgccgccggcagcagaggcggcagcgacggcacccccagaggcagccccagccccgccagcgtgagcagcggcagaaagagcccccacagcaagagccccgccgagcagagagagagaaagagcctggccgacgacaagaagaaggtgaagaacctgggctacagagacagcggctactactgggaggtgccccccagcgaggtgcagctgctgaagagaatcggcaccggcagcttcggcaccgtgttcagaggcagatggcacggcgacgtggccgtgaaggtgctgaaggtgagccagcccaccgccgagcaggcccaggccttcaagaacgagatgcaggtgctgagaaagaccagacacgtgaacatcctgctgttcatgggcttcatgaccagacccggcttcgccatcatcacccagtggtgcgagggcagcagcctgtaccaccacctgcacgtggccgacaccagattcgacatggtgcagctgatcgacgtggccagacagaccgcccagggcatggactacctgcacgccaagaacatcatccacagagacctgaagagcaacaacatcttcctgcacgagggcctgaccgtgaagatcggcgacttcggcctggccaccgtgaagaccagatggagcggcgcccagcccctggagcagcccagcggcagcgtgctgtggatggccgccgaggtgatcagaatgcaggaccccaacccctacagcttccagagcgacgtgtacgcctacggcgtggtgctgtacgagctgatgaccggcagcctgccctacagccacatcggctgcagagaccagatcatcttcatggtgggcagaggctacctgagccccgacctgagcaagatcagcagcaactgccccaaggccatgagaagactgctgagcgactgcctgaagttccagagagaggagagacccctgttcccccagatcctggccaccatcgagctgctgcagagaagcctgcccaagatcgagagaagcgccagcgagcccagcctgcacagaacccaggccgacgagctgcccgcctgcctgctgagcgccgccagactggtgccctag

SEQ ID NO: 11029 - DNA, 3036 bp, synthetic construct
  source 1..3036: mol_type = other DNA; note = Synthetic coding sequence
atggtgagcagcgacagacccgtgagcctggaggacgaggtgagccacagcatgaaggagatgatcggcggctgctgcgtgtgcagcgacgagagaggctgggccgagaaccccctggtgtactgcgacggccacggctgcagcgtggccgtgcaccaggcctgctacggcatcgtgcaggtgcccaccggcccctggttctgcagaaagtgcgagagccaggagagagccgccagagtgagatgcgagctgtgcccccacaaggacggcgccctgaagagaaccgacaacggcggctgggcccacgtggtgtgcgccctgtacatccccgaggtgcagttcgccaacgtgagcaccatggagcccatcgtgctgcagagcgtgccccacgacagatacaacaagacctgctacatctgcgacgagcagggcagagagagcaaggccgccaccggcgcctgcatgacctgcaacaagcacggctgcagacaggccttccacgtgacctgcgcccagttcgccggcctgctgtgcgaggaggagggcaacggcgccgacaacgtgcagtactgcggctactgcaagtaccacttcagcaagctgaagaagagcaagagaggcagcaacagaagctacgaccagagcctgagcgacagcagcagccacagccaggacaagcaccacgagaaggagaagaagaagtacaaggagaaggacaagcacaagcagaagcacaagaagcagcccgagcccagccccgccctggtgcccagcctgaccgtgaccaccgagaagacctacaccagcaccagcaacaacagcatcagcggcagcctgaagagactggaggacaccaccgccagattcaccaacgccaacttccaggaggtgagcgcccacaccagcagcggcaaggacgtgagcgagaccagaggcagcgagggcaagggcaagaagagcagcgcccacagcagcggccagagaggcagaaagcccggcggcggcagaaaccccggcaccaccgtgagcgccgccagccccttcccccagggcagcttcagcggcacccccggcagcgtgaagagcagcagcggcagcagcgtgcagagcccccaggacttcctgagcttcaccgacagcgacctgagaaacgacagctacagccacagccagcagagcagcgccaccaaggacgtgcacaagggcgagagcggcagccaggagggcggcgtgaacagcttcagcaccctgatcggcctgcccagcaccagcgccgtgaccagccagcccaagagcttcgagaacagccccggcgacctgggcaacagcagcctgcccaccgccggctacaagagagcccagaccagcggcatcgaggaggagaccgtgaaggagaagaagagaaagggcaacaagcagagcaagcacggccccggcagacccaagggcaacaagaaccaggagaacgtgagccacctgagcgtgagcagcgccagccccaccagcagcgtggccagcgccgccggcagcatcaccagcagcagcctgcagaagagccccaccctgctgagaaacggcagcctgcagagcctgagcgtgggcagcagccccgtgggcagcgagatcagcatgcagtacagacacgacggcgcctgccccaccaccaccttcagcgagctgctgaacgccatccacaacggcatctacaacagcaacgacgtggccgtgagcttccccaacgtggtgagcggcagcggcagcagcacccccgtgagcagcagccacctgccccagcagagcagcggccacctgcagcaggtgggcgccctgagccccagcgccgtgagcagcgccgcccccgccgtggccaccacccaggccaacaccctgagcggcagcagcctgagccaggcccccagccacatgtacggcaacagaagcaacagcagcatggccgccctgatcgcccagagcgagaacaaccagaccgaccaggacctgggcgacaacagcagaaacctggtgggcagaggcagcagccccagaggcagcctgagccccagaagccccgtgagcagcctgcagatcagatacgaccagcccggcaacagcagcctggagaacctgccccccgtggccgccagcatcgagcagctgctggagagacagtggagcgagggccagcagttcctgctggagcagggcacccccagcgacatcctgggcatgctgaagagcctgcaccagctgcaggtggagaacagaagactggaggagcagatcaagaacctgaccgccaagaaggagagactgcagctgctgaacgcccagctgagcgtgcccttccccaccatcaccgccaaccccagccccagccaccagatccacaccttcagcgcccagaccgcccccaccaccgacagcctgaacagcagcaagagcccccacatcggcaacagcttcctgcccgacaacagcctgcccgtgctgaaccaggacctgaccagcagcggccagagcaccagcagcagcagcgccctgagcacccccccccccgccggccagagccccgcccagcagggcagcggcgtgagcggcgtgcagcaggtgaacggcgtgaccgtgggcgccctggccagcggcatgcagcccgtgaccagcaccatccccgccgtgagcgccgtgggcggcatcatcggcgccctgcccggcaaccagctggccatcaacggcatcgtgggcgccctgaacggcgtgatgcagacccccgtgaccatgagccagaaccccacccccctgacccacaccaccgtgccccccaacgccacccaccccatgcccgccaccctgaccaacagcgccagcggcctgggcctgctgagcgaccagcagagacagatcctgatccaccagcagcagttccagcagctgctgaacagccagcagctgacccccgtgcacagacacccccacttcacccagctgccccccacccacttcagccccagcatggagatcatgcaggtgagaaagtag

SEQ ID NO: 11030 - DNA, 3084 bp, synthetic construct
  source 1..3084: mol_type = other DNA; note = Synthetic coding sequence
atggtgagcagcgacagacccgtgagcctggaggacgaggtgagccacagcatgaaggagatgatcggcggctgctgcgtgtgcagcgacgagagaggctgggccgagaaccccctggtgtactgcgacggccacggctgcagcgtggccgtgcaccaggcctgctacggcatcgtgcaggtgcccaccggcccctggttctgcagaaagtgcgagagccaggagagagccgccagagtgagatgcgagctgtgcccccacaaggacggcgccctgaagagaaccgacaacggcggctgggcccacgtggtgtgcgccctgtacatccccgaggtgcagttcgccaacgtgagcaccatggagcccatcgtgctgcagagcgtgccccacgacagatacaacaagacctgctacatctgcgacgagcagggcagagagagcaaggccgccaccggcgcctgcatgacctgcaacaagcacggctgcagacaggccttccacgtgacctgcgcccagttcgccggcctgctgtgcgaggaggagggcaacggcgccgacaacgtgcagtactgcggctactgcaagtaccacttcagcaagctgaagaagagcaagagaggcagcaacagaagctacgaccagagcctgagcgacagcagcagccacagccaggacaagcaccacgagaaggagaagaagaagtacaaggagaaggacaagcacaagcagaagcacaagaagcagcccgagcccagccccgccctggtgcccagcctgaccgtgaccaccgagaagacctacaccagcaccagcaacaacagcatcagcggcagcctgaagagactggaggacaccaccgccagattcaccaacgccaacttccaggaggtgagcgcccacaccagcagcggcaaggacgtgagcgagaccagaggcagcgagggcaagggcaagaagagcagcgcccacagcagcggccagagaggcagaaagcccggcggcggcagaaaccccggcaccaccgtgagcgccgccagccccttcccccagggcagcttcagcggcacccccggcagcgtgaagagcagcagcggcagcagcgtgcagagcccccaggacttcctgagcttcaccgacagcgacctgagaaacgacagctacagccacagccagcagagcagcgccaccaaggacgtgcacaagggcgagagcggcagccaggagggcggcgtgaacagcttcagcaccctgatcggcctgcccagcaccagcgccgtgaccagccagcccaagagcttcgagaacagccccggcgacctgggcaacagcagcctgcccaccgccggctacaagagagcccagaccagcggcatcgaggaggagaccgtgaaggagaagaagagaaagggcaacaagcagagcaagcacggccccggcagacccaagggcaacaagaaccaggagaacgtgagccacctgagcgtgagcagcgccagccccaccagcagcgtggccagcgccgccggcagcatcaccagcagcagcctgcagaagagccccaccctgctgagaaacggcagcctgcagagcctgagcgtgggcagcagccccgtgggcagcgagatcagcatgcagtacagacacgacggcgcctgccccaccaccaccttcagcgagctgctgaacgccatccacaacgacagaggcgacagcagcaccctgaccaagcaggagctgaagttcatcggcatctacaacagcaacgacgtggccgtgagcttccccaacgtggtgagcggcagcggcagcagcacccccgtgagcagcagccacctgccccagcagagcagcggccacctgcagcaggtgggcgccctgagccccagcgccgtgagcagcgccgcccccgccgtggccaccacccaggccaacaccctgagcggcagcagcctgagccaggcccccagccacatgtacggcaacagaagcaacagcagcatggccgccctgatcgcccagagcgagaacaaccagaccgaccaggacctgggcgacaacagcagaaacctggtgggcagaggcagcagccccagaggcagcctgagccccagaagccccgtgagcagcctgcagatcagatacgaccagcccggcaacagcagcctggagaacctgccccccgtggccgccagcatcgagcagctgctggagagacagtggagcgagggccagcagttcctgctggagcagggcacccccagcgacatcctgggcatgctgaagagcctgcaccagctgcaggtggagaacagaagactggaggagcagatcaagaacctgaccgccaagaaggagagactgcagctgctgaacgcccagctgagcgtgcccttccccaccatcaccgccaaccccagccccagccaccagatccacaccttcagcgcccagaccgcccccaccaccgacagcctgaacagcagcaagagcccccacatcggcaacagcttcctgcccgacaacagcctgcccgtgctgaaccaggacctgaccagcagcggccagagcaccagcagcagcagcgccctgagcacccccccccccgccggccagagccccgcccagcagggcagcggcgtgagcggcgtgcagcaggtgaacggcgtgaccgtgggcgccctggccagcggcatgcagcccgtgaccagcaccatccccgccgtgagcgccgtgggcggcatcatcggcgccctgcccggcaaccagctggccatcaacggcatcgtgggcgccctgaacggcgtgatgcagacccccgtgaccatgagccagaaccccacccccctgacccacaccaccgtgccccccaacgccacccaccccatgcccgccaccctgaccaacagcgccagcggcctgggcctgctgagcgaccagcagagacagatcctgatccaccagcagcagttccagcagctgctgaacagccagcagctgacccccgtgcacagacacccccacttcacccagctgccccccacccacttcagccccagcatggagatcatgcaggtgagaaagtag

SEQ ID NO: 11031 - DNA, 567 bp, synthetic construct; identical to SEQ ID NO: 10128
  source 1..567: mol_type = other DNA; note = Synthetic coding sequence

SEQ ID NO: 11032 - DNA, 381 bp, synthetic construct
  source 1..381: mol_type = other DNA; note = Synthetic coding sequence
atggtgagcagcgacagacccgtgagcctggaggacgaggtgagccacagcatgaaggagatgatcggcggctgctgcgtgtgcagcgacgagagaggctgggccgagaaccccctggtgtactgcgacggccacggctgcagcgtggccgtgcaccaggcctgctacggcatcgtgcaggtgcccaccggcccctggttctgcagaaagtgcgagagccaggagagagccgccagagtggccgagagcagaagcgtggcccaggccaaggtgcagtggtgcgacctgagccccctgcagcccctgctgcccggcttcaagagattcagctgcctgagcctgcccaacggcatgcagttcctgctggtgagcctgatctag

SEQ ID NO: 11033 - DNA, 540 bp, synthetic construct
  source 1..540: mol_type = other DNA; note = Synthetic coding sequence
atggtgagcagcgacagacccgtgagcctggaggacgaggtgagccacagcatgaaggagatgatcggcggctgctgcgtgtgcagcgacgagagaggctgggccgagaaccccctggtgtactgcgacggccacggctgcagcgtggccgtgcaccaggcctgctacggcatcgtgcaggtgcccaccggcccctggttctgcagaaagtgcgagagccaggagagagccgccagagtgatggtgtgcaacagctgctggctggccagcagcgagaacgtgacccccggctacatcgagcaccactgcgcctgcgccagcccccaccccagatgcctggtgagcaacgtgccccccgtgagcggcgccctgatgcactgcttctgggcctgcctgaccaccgccgccttcttcggcccccagagcttcaccacctgccacatgagcttcctggtgagcagagacatcctgttctacatctacggcttcatgcccttcatcagcgtggtgatctggagattcaagaaggagagatggtag

SEQ ID NO: 11034 - DNA, 540 bp, synthetic construct
  source 1..540: mol_type = other DNA; note = Synthetic coding sequence
atgggcctgatcttcgccaagctgtggagcctgttctgcaaccaggagcacaaggtgatcatcgtgggcctggacaacgccggcaagaccaccatcctgtaccagttcctgatgaacgaggtggtgcacaccagccccaccatcggcagcaacgtggaggagatcgtggtgaagaacacccacttcctgatgtgggacatcggcggccaggagagcctgagaagcagctggaacacctactacagcaacaccgagttcatcatcctggtggtggacagcatcgacagagagagactggccatcaccaaggaggagctgtacagaatgctggcccacgaggacctgagaaaggccgccgtgctgatcttcgccaacaagcaggacatgaagggctgcatgaccgccgccgagatcagcaagtacctgaccctgagcagcatcaaggaccacccctggcacatccagagctgctgcgccctgaccggcgagggcctgtgccagggcctggagtggatgaccagcagaatcggcgtgagatag

SEQ ID NO: 11035 - DNA, 3345 bp, synthetic construct
  source 1..3345: mol_type = other DNA; note = Synthetic coding sequence
atgagccagacccaggactacgagtgcagaagccacaacgtggacctgcccgagagcagaatccccggcagcaacaccagactggagtgggtggagatcatcgagcccagaaccagagagagaatgtacgccaacctggtgaccggcgagtgcgtgtgggacccccccgccggcgtgagaatcaagagaaccagcgagaaccagtggtgggagctgttcgaccccaacaccagcagattctactactacaacgccagcacccagagaaccgtgtggcacagaccccagggctgcgacatcatccccctggccaagctgcagaccctgaagcagaacaccgagagccccagagccagcgccgagagcagccccggcagaggcagcagcgtgagcagagagggcagcaccagcagcagcctggagcccgagcccgacaccgagaaggcccaggagctgcccgccagagccggcagacccgccgccttcggcaccgtgaaggaggacagcggcagcagcagcccccccggcgtgttcctggagaaggactacgagatctacagagactacagcgccgacggccagctgctgcactacagaaccagcagcctgagatggaacagcggcgccaaggagagaatgctgatcaaggtggccgacagagagcccagcttcctggccgcccagggcaacggctacgcccccgacggcccccccggcgtgagaagcagaagacccagcggcagccagcacagccccagcctgcagaccttcgcccccgaggccgacggcaccatcttcttccccgagagaagacccagccccttcctgaagagagccgagctgcccggcagcagcagccccctgctggcccagcccagaaagcccagcggcgacagccagcccagcagccccagatacggctacgagccccccctgtacgaggagccccccgtggagtaccaggcccccatctacgacgagccccccatggacgtgcagttcgaggccggcggcggctaccaggccggcagcccccagagaagccccggcagaaagcccagacccttcctgcagcccaacaagcagggcccccccagcccctgccagcagctggtgctgaccaagcagaagtgccccgagagattcctgagcctggagtacagccccgccggcaaggagtacgtgagacagctggtgtacgtggagcaggccggcagcagccccaagctgagagccggccccagacacaagtacgcccccaaccccggcggcggcagctacagcctgcagcccagcccctgcctgctgagagaccagagactgggcgtgaagagcggcgactacagcaccatggagggccccgagctgagacacagccagccccccacccccctgccccaggcccaggaggacgccatgagctggagcagccagcaggacaccctgagcagcaccggctacagccccggcaccagaaagagaaagagcagaaagcccagcctgtgccaggccaccagcgccacccccaccgagggccccggcgacctgctggtggagcagcccctggccgaggagcagcccccctgcggcaccagcctggcccccgtgaagagagccgagggcgaggccgagggcgccagaggcgccgccgagcccttcctggcccaggccagactggcctgggaggcccagcaggcccacttccacatgaagcagagaagcagctgggacagccagcaggacggcagcggctacgagagcgacggcgccctgcccctgcccatgcccggccccgtggtgagagccttcagcgaggacgaggccctggcccagcaggagaacagacactggagaagaggcaccttcgagaagctgggcttcccccagatcctgctggagaagagcgtgagcgtgcagaccaacctggccagccccgagccctacctgcaccccagccagagcgaggacctggccgcctgcgcccagttcgagagcagcagacagagcagaagcggcgtgcccagcagcagctgcgtgttccccaccttcaccctgagaaagcccagcagcgagaccgacatcgagaactgggccagcaagcacttcaacaagcacacccagggcctgttcagaagaaaggtgagcatcgccaacatgctggcctggagcagcgagagcatcaagaagcccatgatcgtgaccagcgacagacacgtgaagaaggaggcctgcgagctgttcaagctgatccagatgtacatgggcgacagaagagccaaggccgaccccctgcacgtggccctggaggtggccaccaagggctggagcgtgcagggcctgagagacgagctgtacatccagctgtgcagacagaccaccgagaacttcagactggagagcctggccagaggctgggagctgatggccatctgcctggccttcttcccccccacccccaagttccacagctacctggagggctacatctacagacacatggaccccgtgaacgacaccaaggtgacccagcacatcaaggagctgctggagagaaacaccaagaagaagagcaagctgagaaagaagcccaagccctacgtggaggagcccgacggcgtggccatcagcacctacgccaagtactgctaccacaagctgcagaaggccgccctgaccggcgccaagaagggcctgaagaagcccaacgtggaggagatcagacacgccaagaacgccgtgttcagccccagcatgttcggcagcgccctgcaggaggtgatgggcatgcagagagagagataccccgagagacagctgccctgggtgcagaccagactgagcgaggaggtgctggccctgaacggcgaccagaccgagggcatcttcagagtgcccggcgacatcgacgaggtgaacgccctgaagctgcaggtggaccagtggaaggtgcccaccggcctggaggacccccacgtgcccgccagcctgctgaagctgtggtacagagagctggaggagcccctgatcccccacgagttctacgagcagtgcatcgcccactacgacagccccgaggccgccgtggccgtggtgcacgccctgcccagaatcaacagaatggtgctgtgctacctgatcagattcctgcaggtgttcgtgcagcccgccaacgtggccgtgaccaagatggacgtgagcaacctggccatggtgatggcccccaactgcctgagatgccagagcgacgaccccagagtgatcttcgagaacaccagaaaggagatgagcttcctgagagtgctgatccagcacctggacaccagcttcatggagggcgtgctgtag

SEQ ID NO: 11036 - DNA, 822 bp, synthetic construct; identical to SEQ ID NO: 10030
  source 1..822: mol_type = other DNA; note = Synthetic coding sequence

SEQ ID NO: 11037 - DNA, 3633 bp, synthetic construct
  source 1..3633: mol_type = other DNA; note = Synthetic coding sequence
atgcccagaggcgaggcccccggccccggcagaagaggcgccaaggacgaggccctgggcgaggagagcggcgagagatggagccccgagttccacctgcagagaaagctggccgacagcagccacagcgagcagcaggacagaaacagagtgagcgaggagctgatcatggtggtgcaggagatgaagaagtacttccccagcgagagaagaaacaagcccagcaccctggacgccctgaactacgccctgagatgcgtgcacagcgtgcaggccaacagcgagttcttccagatcctgagccagaacggcgccccccaggccgacgtgagcatgtacagcctggaggagctggccaccatcgccagcgagcacaccagcaagaacaccgacaccttcgtggccgtgttcagcttcctgagcggcagactggtgcacatcagcgagcaggccgccctgatcctgaacagaaagaaggacgtgctggccagcagccacttcgtggacctgctggccccccaggacatgagagtgttctacgcccacaccgccagagcccagctgcccttctggaacaactggacccagagagccgccgccagatacgagtgcgcccccgtgaagcccttcttctgcagaatcagaggcggcgaggacagaaagcaggagaagtgccacagccccttcagaatcatcccctacctgatccacgtgcaccaccccgcccagcccgagctggagagcgagccctgctgcctgaccgtggtggagaagatccacagcggctacgaggcccccagaatccccgtgaacaagagaatcttcaccaccacccacacccccggctgcgtgttcctggaggtggacgagaaggccgtgcccctgctgggctacctgccccaggacctgatcggcaccagcatcctgagctacctgcaccccgaggacagaagcctgatggtggccatccaccagaaggtgctgaagtacgccggccacccccccttcgagcacagccccatcagattctgcacccagaacggcgactacatcatcctggacagcagctggagcagcttcgtgaacccctggagcagaaagatcagcttcatcatcggcagacacaaggtgagaaccagccccctgaacgaggacgtgttcgccaccaagatcaagaagatgaacgacaacgacaaggacatcaccgagctgcaggagcagatctacaagctgctgctgcagcccgtgcacgtgagcgtgagcagcggctacggcagcctgggcagcagcggcagccaggagcagctggtgagcatcgccagcagcagcgaggccagcggccacagagtggaggagaccaaggccgagcagatgaccctgcagcaggtgtacgccagcgtgaacaagatcaagaacctgggccagcagctgtacatcgagagcatgaccaagagcagcttcaagcccgtgaccggcaccagaaccgagcccaacggcggcggcgagagcgccaacggcggcggcgagtgcaagaccttcaccagcttccaccagaccctgaagaacaacagcgtgtacaccgagccctgcgaggacctgagaaacgacgagcacagccccagctaccagcagatcaactgcatcgacagcgtgatcagatacctgaagagctacaacatccccgccctgaagagaaagtgcatcagctgcaccaacaccaccagcagcagcagcgaggaggacaagcagaaccacaaggccgacgacgtgcaggccctgcaggccggcctgcagatccccgccatccccaagagcgagatgcccaccaacggcagaagcatcgacaccggcggcggcgccccccagatcctgagcaccgccatgctgagcctgggcagcggcatcagccagtgcggctacagcagcaccatcgtgcacgtgcccccccccgagaccgccagagacgccaccctgttctgcgagccctggaccctgaacatgcagcccgcccccctgaccagcgaggagttcaagcacgtgggcctgaccgccgccgtgctgagcgcccacacccagaaggaggagcagaactacgtggacaagttcagagagaagatcctgagcagcccctacagcagctacctgcagcaggagagcagaagcaaggccaagtacagctacttccagggcgacagcaccagcaagcagaccagaagcgccggctgcagaaagggcaagcacaagagaaagaagctgcccgagccccccgacagcagcagcagcaacaccggcagcggccccagaagaggcgcccaccagaacgcccagccctgctgccccagcgccgccagcagcccccacaccagcagccccaccttcccccccgccgccatggtgcccagccaggccccctacctggtgcccgccttccccctgcccgccgccaccagccccggcagagagtacgccgcccccggcaccgcccccgagggcctgcacggcctgcccctgagcgagggcctgcagccctaccccgccttccccttcccctacctggacaccttcatgaccgtgttcctgcccgacccccccgtgtgccccctgctgagccccagcttcctgccctgccccttcctgggcgccaccgccagcagcgccatcagccccagcatgagcagcgccatgagccccaccctggaccccccccccagcgtgaccagccagagaagagaggaggagaagtgggaggcccagagcgagggccaccccttcatcaccagcagaagcagcagccccctgcagctgaacctgctgcaggaggagatgcccagacccagcgagagccccgaccagatgagaagaaacacctgcccccagaccgagtaccagtgcgtgaccggcaacaacggcagcgagagcagccccgccaccaccggcgccctgagcaccggcagcccccccagagagaaccccagccaccccaccgccagcgccctgagcaccggcagcccccccatgaagaaccccagccaccccaccgccagcgccctgagcaccggcagcccccccatgaagaaccccagccaccccaccgccagcaccctgagcatgggcctgccccccagcagaacccccagccaccccaccgccaccgtgctgagcaccggcagcccccccagcgagagccccagcagaaccggcagcgccgccagcggcagcagcgacagcagcatctacctgaccagcagcgtgtacagcagcaagatcagccagaacggccagcagagccaggacgtgcagaagaaggagaccttccccaacgtggccgaggagcccatctggagaatgatcagacagacccccgagagaatcctgatgacctaccaggtgcccgagagagtgaaggaggtggtgctgaaggaggacctggagaagctggagagcatgagacagcagcagccccagttcagccacggccagaaggaggagctggccaaggtgtacaactggatccagagccagaccgtgacccaggagatcgacatccaggcctgcgtgacctgcgagaacgaggacagcgccgacggcgccgccaccagctgcggccaggtgctggtggaggacagctgctag

SEQ ID NO: 11038 - DNA, 1137 bp, synthetic construct
  source 1..1137: mol_type = other DNA; note = Synthetic coding sequence
atgcccagaggcgaggcccccggccccggcagaagaggcgccaaggacgaggccctgggcgaggagagcggcgagagatggagccccgagttccacctgcagagaaagctggccgacagcagccacagcgagcagcaggacagaaacagagtgagcgaggagctgatcatggtggtgcaggagatgaagaagtacttccccagcgagagaagaaacaagcccagcaccctggacgccctgaactacgccctgagatgcgtgcacagcgtgcaggccaacagcgagttcttccagatcctgagccagaacggcgccccccaggccgacgtgagcatgtacagcctggaggagctggccaccatcgccagcgagcacaccagcaagaacaccgacaccttcgtggccgtgttcagcttcctgagcggcagactggtgcacatcagcgagcaggccgccctgatcctgaacagaaagaaggacgtgctggccagcagccacttcgtggacctgctggccccccaggacatgagagtgttctacgcccacaccgccagagcccagctgcccttctggaacaactggacccagagagccgccagatacgagtgcgcccccgtgaagcccttcttctgcagaatcagaggcggcgaggacagaaagcaggagaagtgccacagccccttcagaatcatcccctacctgatccacgtgcaccaccccgcccagcccgagctggagagcgagccctgctgcctgaccgtggtggagaagatccacagcggctacgaggcccccagaatccccgtgaacaagagaatcttcaccaccacccacacccccggctgcgtgttcctggaggtggacgagaaggccgtgcccctgctgggctacctgccccaggacctgatcggcaccagcatcctgagctacctgcaccccgaggacagaagcctgatggtggccatccaccagaaggtgctgaagtacgccggccacccccccttcgagcacagccccatcagattctgcacccagaacggcgactacatcatcctggacagcagctggagcagcttcgtgaacccctggagcagaaagatcagcttcatcatcggcagacacaaggtgagaacctag

SEQ ID NO: 11039 - DNA, 1794 bp, synthetic construct
  source 1..1794: mol_type = other DNA; note = Synthetic coding sequence
atggagagacccgcccccctggccgtgctgcccttcagcgaccccgcccacgccctgagcctgctgagaggcctgagccagctgagagccgagagaaagttcctggacgtgaccctggaggccgccggcggcagagacttccccgcccacagagccgtgctggccgccgccagcccctacttcagagccatgttcgccggccagctgagagagagcagagccgagagagtgagactgcacggcgtgccccccgacatgctgcagctgctgctggacttcagctacaccggcagagtggccgtgagcggcgacaacgccgagcccctgctgagagccgccgacctgctgcagttccccgccgtgaaggaggcctgcggcgccttcctgcagcagcagctggacctggccaactgcctggacatgcaggacttcgccgaggccttcagctgcagcggcctggccagcgccgcccagagattcatcctgagacacgtgggcgagctgggcgccgagcagctggagagactgcccctggccagactgctgagatacctgagagacgacggcctgtgcgtgcccaaggaggaggccgcctaccagctggccctgagatgggtgagagccgacccccccagaagagccgcccactggccccagctgctggaggccgtgagactgcccttcgtgagaagattctacctgctggcccacgtggaggccgagcccctggtggccagatgccccccctgcctgagactgctgagagaggccagagacttccaggccgccagatacgacagacacgacagaggcccctgccccagaatgagacccagacccagcaccggcctggccgagatcctggtgctggtgggcggctgcgaccaggactgcgacgagctggtgaccgtggactgctacaacccccagaccggccagtggagatacctggccgagttccccgaccacctgggcggcggctacagcatcgtggccctgggcaacgacatctacgtgaccggcggcagcgacggcagcagactgtacgactgcgtgtggagatacaacagcagcgtgaacgagtgggccgaggtggcccccatgctgaaggccagagagtaccacagcagcagcgtgctggacggcctgctgtacgtggtggccgccgacagcaccgagagatacgaccacaccaccgacagctgggaggccctgcagcccatgacctaccccatggacaactgcagcaccaccgcctgcagaggcagactgtacgccatcggcagcctggccggcaaggagaccatggtgatgcagtgctacgaccccgacaccgacctgtggagcctggtggactgcggccagctgcccccctggagcttcgcccccaagaccgccaccctgaacggcctgatgtacttcgtgagagacgacagcgccgaggtggacgtgtacaaccccaccagaaacgagtgggacaagatccccagcatgaaccaggtgcacgtgggcggcagcctggccgtgctgggcggcaagctgtacgtgagcggcggctacgacaacaccttcgagctgagcgacgtggtggaggcctacgaccccgagaccagagcctggagcgtggtgggcagactgcccgagcccaccttctggcacggcagcgtgagcatcttcagacagttcatgccccagaccttcagcggcggcagaggcttcgagctggacagcggcagcgacgacatggaccccggcagacccagaccccccagagaccccgacgagctgcactag

SEQ ID NO: 11040 - DNA, 1620 bp, synthetic construct
  source 1..1620: mol_type = other DNA; note = Synthetic coding sequence
atggagagacccgcccccctggccgtgctgcccttcagcgaccccgcccacgccctgagcctgctgagaggcctgagccagctgagagccgagagaaagttcctggacgtgaccctggaggccgccggcggcagagacttccccgcccacagagccgtgctggccgccgccagcccctacttcagagccatgttcgccggccagctgagagagagcagagccgagagagtgagactgcacggcgtgccccccgacatgctgcagctgctgctggacttcagctacaccggcagagtggccgtgagcggcgacaacgccgagcccctgctgagagccgccgacctgctgcagttccccgccgtgaaggaggcctgcggcgccttcctgcagcagcagctggacctggccaactgcctggacatgcaggacttcgccgaggccttcagctgcagcggcctggccagcgccgcccagagattcatcctgagacacgtgggcgagctgggcgccgagcagctggagagactgcccctggccagactgctgagatacctgagagacgacggcctgtgcgtgcccaaggaggaggccgcctaccagctggccctgagatgggtgagagccgacccccccagaagagccgcccactggccccagctgctggaggccgtgagactgcccttcgtgagaagattctacctgctggcccacgtggaggccgagcccctggtggccagatgccccccctgcctgagactgctgagagaggccagagacttccaggccgccagatacgacagacacgacagaggcccctgccccagaatgagacccagacccagcaccggcctggccgagatcctggtgctggtgggcggctgcgaccaggactgcgacgagctggtgaccgtggactgctacaacccccagaccggccagtggagatacctggccgagttccccgaccacctgggcggcggctacagcatcgtggccctgggcaacgacatctacgtgaccggcggcagcgacggcagcagactgtacgactgcgtgtggagatacaacagcagcgtgaacgagtgggccgaggtggcccccatgctgaaggccagagagtaccacagcagcagcgtgctggacggcctgctgtacgtggtggccgccgacagcaccgagagatacgaccacaccaccgacagctgggaggccctgcagcccatgacctaccccatggacaactgcagcaccaccgcctgcagaggcagactgtacgccatcggcagcctggccggcaaggagaccatggtgatgcagtgctacgaccccgacaccgacctgtggagcctggtggactgcggccagctgcccccctggagcttcgcccccaagaccgccaccctgaacggcctgatgtacttcgtgagagacgacagcgccgaggtggacgtgtacaaccccaccagaaacgagtgggacaagatccccagcatgaaccaggtgaacttccaggccggccagcactggaagcacagactggtgctgatcctgcagcccaagtgccacagagacgagtgcctgggcagcaccgccatgatgggcggcagccacctgaactag

SEQ ID NO: 11041 - DNA, 2067 bp, synthetic construct
  source 1..2067: mol_type = other DNA; note = Synthetic coding sequence
atggacggcagcttcgtgcagcacagcgtgagagtgctgcaggagctgaacaagcagagagagaagggccagtactgcgacgccaccctggacgtgggcggcctggtgttcaaggcccactggagcgtgctggcctgctgcagccacttcttccagagcctgtacggcgacggcagcggcggcagcgtggtgctgcccgccggcttcgccgagatcttcggcctgctgctggacttcttctacaccggccacctggccctgaccagcggcaacagagaccaggtgctgctggccgccagagagctgagagtgcccgaggccgtggagctgtgccagagcttcaagcccaagaccagcgtgggccaggccgccggcggccagagcggcctgggcccccccgccagccagaacgtgaacagccacgtgaaggagcccgccggcctggaggaggaggaggtgagcagaaccctgggcctggtgcccagagaccaggagcccagaggcagccacagcccccagagaccccagctgcacagccccgcccagagcgagggccccagcagcctgtgcggcaagctgaagcaggccctgaagccctgccccctggaggacaagaagcccgaggactgcaaggtgccccccagacccctggaggccgagggcgcccagctgcagggcggcagcaacgagtgggaggtggtggtgcaggtggaggacgacggcgacggcgactacatgagcgagcccgaggccgtgctgaccagaagaaagagcaacgtgatcagaaagccctgcgccgccgagcccgccctgagcgccggcagcctggccgccgagcccgccgagaacagaaagggcaccgccgtgcccgtggagtgccccacctgccacaagaagttcctgagcaagtactacctgaaggtgcacaacagaaagcacaccggcgagaagcccttcgagtgccccaagtgcggcaagtgctacttcagaaaggagaacctgctggagcacgaggccagaaactgcatgaacagaagcgagcaggtgttcacctgcagcgtgtgccaggagaccttcagaagaagaatggagctgagagtgcacatggtgagccacaccggcgagatgccctacaagtgcagcagctgcagccagcagttcatgcagaagaaggacctgcagagccacatgatcaagctgcacggcgcccccaagccccacgcctgccccacctgcgccaagtgcttcctgagcagaaccgagctgcagctgcacgaggccttcaagcacagaggcgagaagctgttcgtgtgcgaggagtgcggccacagagccagcagcagaaacggcctgcagatgcacatcaaggccaagcacagaaacgagagaccccacgtgtgcgagttctgcagccacgccttcacccagaaggccaacctgaacatgcacctgagaacccacaccggcgagaagcccttccagtgccacctgtgcggcaagaccttcagaacccaggccagcctggacaagcacaacagaacccacaccggcgagagacccttcagctgcgagttctgcgagcagagattcaccgagaagggccccctgctgagacacgtggccagcagacaccaggagggcagaccccacttctgccagatctgcggcaagaccttcaaggccgtggagcagctgagagtgcacgtgagaagacacaagggcgtgagaaagttcgagtgcaccgagtgcggctacaagttcaccagacaggcccacctgagaagacacatggagatccacgacagagtggagaactacaaccccagacagagaaagctgagaaacctgatcatcgaggacgagaagatggtggtggtggccctgcagccccccgccgagctggaggtgggcagcgccgaggtgatcgtggagagcctggcccagggcggcctggccagccagctgcccggccagagactgtgcgccgaggagagcttcaccggccccggcgtgctggagcccagcctgatcatcaccgccgccgtgcccgaggactgcgacacctag

SEQ ID NO: 11042 - DNA, 525 bp, synthetic construct
  source 1..525: mol_type = other DNA; note = Synthetic coding sequence
atgacccactgctgcagcccctgctgccagcccacctgctgcagaaccacctgctgcagaaccacctgctggaagcccaccaccgtgaccacctgcagcagcaccccctgctgccagcccgcctgctgcgtgagcagctgctgccagccctgctgcagacccacctgctgccagaacacctgctgcagaaccacctgctgccagcccacctgcgtgaccagctgctgccagcccagctgctgcagcaccccctgctgccagcccacctgctgcggcagcagctgctgcggccagaccagctgcggcagcagctgcggccagagcagcagctgcgcccccgtgtactgcagaagaacctgctactaccccaccaccgtgtgcctgcccggctgcctgaaccagagctgcggcagcaactgctgccagccctgctgcagacccgcctgctgcgagaccacctgctgcagaaccacctgcttccagcccacctgcgtgagcagctgctgccagcccagctgctgctag

SEQ ID NO: 11043 - DNA, 597 bp, synthetic construct
  source 1..597: mol_type = other DNA; note = Synthetic coding sequence
atggtgagcagctgctgcggcagcgtgtgcagcgaccagggctgcagccaggacctgtgccaggagacctgctgcagacccagctgctgccagaccacctgctgcagaaccacctgctacagacccagctgctgcgtgagcagctgctgcagaccccagtgctgccagagcgtgtgctgccagcccacctgctgcagaccccccagatgctgcatcagcagctgctgcagacccagctgctgcatgagcagctgctgcaagccccagtgctgccagagcgtgtgctgccagcccaccaccacctgctgccaccccagatgctgcatcagcagctgctgcagacccagctgctgcgtgagcagctgctgcaagccccagtgctgccagagcgtgtgctgccagcccaactgctgcagacccagctgcagcatcagcagctgctgcagacccagctgctgcgagagcagctgctgcagaccctgctgctgcgtgagacccgtgtgcggcagagtgagctgccacaccacctgctacagacccacctgcgtgatcagcagctgccccagacccctgtgctgcgccagcagctgctgctag

SEQ ID NO: 11044 - DNA, 1296 bp, synthetic construct
  source 1..1296: mol_type = other DNA; note = Synthetic coding sequence
atgaccagcgactgcagcagcacccactgcagccccgagagctgcggcaccgccagcggctgcgcccccgccagcagctgcagcgtggagaccgcctgcctgcccggcacctgcgccaccagcagatgccagacccccagcttcctgagcagaagcagaggcctgaccggctgcctgctgccctgctacttcaccggcagctgcaacagcccctgcctggtgggcaactgcgcctggtgcgaggacggcgtgttcaccagcaacgagaaggagaccatgcagttcctgaacgacagactggccagctacctggagaaggtgagaagcctggaggagaccaacgccgagctggagagcagaatccaggagcagtgcgagcaggacatccccatggtgtgccccgactaccagagatacttcaacaccatcgaggacctgcagcagaagatcctgtgcaccaaggccgagaacagcagactggccgtgcagctggacaactgcaagctggccaccgacgacttcaagagcaagtacgagagcgagctgagcctgagacagctgctggaggccgacatcagcagcctgcacggcatcctggaggagctgaccctgtgcaagagcgacctggaggcccacgtggagagcctgaaggaggacctgctgtgcctgaagaagaaccacgaggaggaggtgaacctgctgagagagcagctgggcgacagactgagcgtggagctggacaccgcccccaccctggacctgaacagagtgctggacgagatgagatgccagtgcgagaccgtgctggccaacaacagaagagaggccgaggagtggctggccgtgcagaccgaggagctgaaccagcagcagctgagcagcgccgagcagctgcagggctgccagatggagatcctggagctgaagagaaccgccagcgccctggagatcgagctgcaggcccagcagagcctgaccgagagcctggagtgcaccgtggccgagaccgaggcccagtacagcagccagctggcccagatccagtgcctgatcgacaacctggagaaccagctggccgagatcagatgcgacctggagagacagaaccaggagtaccaggtgctgctggacgtgaaggccagactggagggcgagatcaacacctactggggcctgctggacagcgaggacagcagactgagctgcagcccctgcagcaccacctgcaccagcagcaacacctgcgagccctgcagcgcctacgtgatctgcaccgtggagaactgctgcctgtag

SEQ ID NO: 11045 - DNA, 1047 bp, synthetic construct
  source 1..1047: mol_type = other DNA; note = Synthetic coding sequence
atggccggcagcctgcccccctgcgtggtggactgcggcaccggctacaccaagctgggctacgccggcaacaccgagccccagttcatcatccccagctgcatcgccatcagagagagcgccaaggtggtggaccaggcccagagaagagtgctgagaggcgtggacgacctggacttcttcatcggcgacgaggccatcgacaagcccacctacgccaccaagtggcccatcagacacggcatcatcgaggactgggacctgatggagagattcatggagcaggtggtgttcaagtacctgagagccgagcccgaggaccactacttcctgatgaccgagccccccctgaacacccccgagaacagagagtacctggccgagatcatgttcgagagcttcaacgtgcccggcctgtacatcgccgtgcaggccgtgctggccctggccgccagctggaccagcagacaggtgggcgagagaaccctgaccggcatcgtgatcgacagcggcgacggcgtgacccacgtgatccccgtggccgagggctacgtgatcggcagctgcatcaagcacatccccatcgccggcagagacatcacctacttcatccagcagctgctgagagagagagaggtgggcatcccccccgagcagagcctggagaccgccaaggccatcaaggagaagtactgctacatctgccccgacatcgtgaaggagttcgccaagtacgacgtggaccccagaaagtggatcaagcagtacaccggcatcaacgccatcaaccagaagaagttcgtgatcgacgtgggctacgagagattcctgggccccgagatcttcttccaccccgagttcgccaaccccgacttcatggagagcatcagcgacgtggtggacgaggtgatccagaactgccccatcgacgtgagaagacccctgtacaagcccgagttcttccaggtgtgccacaccaagaaggactacgaggagtacggccccagcatctgcagacacaaccccgtgttcggcgtgatgagctag

SEQ ID NO: 11046 - DNA, 273 bp, synthetic construct; identical to SEQ ID NO: 9311
  source 1..273: mol_type = other DNA; note = Synthetic coding sequence

SEQ ID NO: 11047 - DNA, 249 bp, synthetic construct
  source 1..249: mol_type = other DNA; note = Synthetic coding sequence
atggccagcagcagcggcgccggcgccgccgccgccgccgccgccgccaacctgaacgccgtgagagagaccatggacgtgctgctggagatcagcagaatcctgaacaccggcctggacatggagaccctgagcatctgcgtgagactgtgcgagcagggcatcaaccccgaggccctgagcagcgtgatcaaggagctgagaaaggccaccgaggccctgaaggccgccgagaacatgaccagctag

SEQ ID NO: 11048 - DNA, 3732 bp, synthetic construct
  source 1..3732: mol_type = other DNA; note = Synthetic coding sequence
atggagaccagagccgccgagaacaccgccatcttcatgtgcaagtgctgcaacctgttcagccccaaccagagcgagctgctgagccacgtgagcgagaagcacatggaggagggcgtgaacgtggacgagatcatcatccccctgagacccctgagcacccccgagccccccaacagcagcaagaccggcgacgagttcctggtgatgaagagaaagagaggcagacccaagggcagcaccaagaagagcagcaccgaggaggagctggccgagaacatcgtgagccccaccgaggacagccccctggcccccgaggagggcaacagcctgccccccagcagcctggagtgcagcaagtgctgcagaaagttcagcaacaccagacagctgagaaagcacatctgcatcatcgtgctgaacctgggcgaggaggagggcgaggccggcaacgagagcgacctggagctggagaagaagtgcaaggaggacgacagagagaaggccagcaagagacccagaagccagaagaccgagaaggtgcagaagatcagcggcaaggaggccagacagctgagcggcgccaagaagcccatcatcagcgtggtgctgaccgcccacgaggccatccccggcgccaccaagatcgtgcccgtggaggccggcccccccgagaccggcgccaccaacagcgagaccaccagcgccgacctggtgcccagaagaggctaccaggagtacgccatccagcagaccccctacgagcagcccatgaagagcagcagactgggccccacccagctgaagatcttcacctgcgagtactgcaacaaggtgttcaagttcaagcacagcctgcaggcccacctgagaatccacaccaacgagaagccctacaagtgcccccagtgcagctacgccagcgccatcaaggccaacctgaacgtgcacctgagaaagcacaccggcgagaagttcgcctgcgactactgcagcttcacctgcctgagcaagggccacctgaaggtgcacatcgagagagtgcacaagaagatcaagcagcactgcagattctgcaagaagaagtacagcgacgtgaagaacctgatcaagcacatcagagacgcccacgacccccaggacaagaaggtgaaggaggccctggacgagctgtgcctgatgaccagagagggcaagagacagctgctgtacgactgccacatctgcgagagaaagttcaagaacgagctggacagagacagacacatgctggtgcacggcgacaagtggcccttcgcctgcgagctgtgcggccacggcgccaccaagtaccaggccctggagctgcacgtgagaaagcaccccttcgtgtacgtgtgcgccgtgtgcagaaagaagttcgtgagcagcatcagactgagaacccacatcaaggaggtgcacggcgccgcccaggaggccctggtgttcaccagcagcatcaaccagagcttctgcctgctggagcccggcggcgacatccagcaggaggccctgggcgaccagctgcagctggtggaggaggagttcgccctgcagggcgtgaacgccctgaaggaggaggcctgccccggcgacacccagctggaggagggcagaaaggagcccgaggcccccggcgagatgcccgcccccgccgtgcacctggccagcccccaggccgagagcaccgccctgcccccctgcgagctggagaccaccgtggtgagcagcagcgacctgcacagccaggaggtggtgagcgacgacttcctgctgaagaacgacaccagcagcgccgaggcccacgccgcccccgagaagccccccgacatgcagcacagaagcagcgtgcagacccagggcgaggtgatcaccctgctgctgagcaaggcccagagcgccggcagcgaccaggagagccacggcgcccagagccccctgggcgagggccagaacatggccgtgctgagcgccggcgaccccgaccccagcagatgcctgagaagcaaccccgccgaggccagcgacctgctgccccccgtggccggcggcggcgacaccatcacccaccagcccgacagctgcaaggccgcccccgagcacagaagcggcatcaccgccttcatgaaggtgctgaacagcctgcagaagaagcagatgaacaccagcctgtgcgagagaatcagaaaggtgtacggcgacctggagtgcgagtactgcggcaagctgttctggtaccaggtgcacttcgacatgcacgtgagaacccacaccagagagcacctgtactactgcagccagtgccactacagcagcatcaccaagaactgcctgaagagacacgtgatccagaagcacagcaacatcctgctgaagtgccccaccgacggctgcgactacagcacccccgacaagtacaagctgcaggcccacctgaaggtgcacaccgccctggacaagagaagctacagctgccccgtgtgcgagaagagcttcagcgaggacagactgatcaagagccacatcaagaccaaccaccccgaggtgagcatgagcaccatcagcgaggtgctgggcagaagagtgcagctgaagggcctgatcggcaagagagccatgaagtgcccctactgcgacttctacttcatgaagaacggcagcgacctgcagagacacatctgggcccacgagggcgtgaagcccttcaagtgcagcctgtgcgagtacgccaccagaagcaagagcaacctgaaggcccacatgaacagacacagcaccgagaagacccacctgtgcgacatgtgcggcaagaagttcaagagcaagggcaccctgaagagccacaagctgctgcacaccgccgacggcaagcagttcaagtgcaccgtgtgcgactacaccgccgcccagaagccccagctgctgagacacatggagcagcacgtgagcttcaagcccttcagatgcgcccactgccactacagctgcaacatcagcggcagcctgaagagacactacaacagaaagcaccccaacgaggagtacgccaacgtgggcaccggcgagctggccgccgaggtgctgatccagcagggcggcctgaagtgccccgtgtgcagcttcgtgtacggcaccaagtgggagttcaacagacacctgaagaacaagcacggcctgaaggtggtggagatcgacggcgaccccaagtgggagaccgccaccgaggcccccgaggagcccagcacccagtacctgcacatcaccgaggccgaggaggacgtgcagggcacccaggccgccgtggccgccctgcaggacctgagatacaccagcgagagcggcgacagactggaccccaccgccgtgaacatcctgcagcagatcatcgagctgggcgccgagacccacgacgccaccgccctggccagcgtggtggccatggcccccggcaccgtgaccgtggtgaagcaggtgaccgaggaggagcccagcagcaaccacaccgtgatgatccaggagaccgtgcagcaggccagcgtggagctggccgagcagcaccacctggtggtgagcagcgacgacgtggagggcatcgagaccgtgaccgtgtacacccagggcggcgaggccagcgagttcatcgtgtacgtgcaggaggccatgcagcccgtggaggagcaggccgtggagcagcccgcccaggagctgtag

SEQ ID NO: 11049 - DNA, 2274 bp, synthetic construct
  source 1..2274: mol_type = other DNA; note = Synthetic coding sequence
atggccctgggcgaggagaaggccgaggccgaggccagcgaggacaccaaggcccagagctacggcagaggcagctgcagagagagagagctggacatccccggccccatgagcggcgagcagccccccagactggaggccgagggcggcctgatcagccccgtgtggggcgccgagggcatccccgcccccacctgctggatcggcaccgaccccggcggccccagcagagcccaccagccccaggccagcgacgccaacagagagcccgtggccgagagaagcgagcccgccctgagcggcctgccccccgccaccatgggcagcggcgacctgctgctgagcggcgagagccaggtggagaagaccaagctgagcagcagcgaggagttcccccagaccctgagcctgcccagaaccaccaccatctgcagcggccacgacgccgacaccgaggacgaccccagcctggccgacctgccccaggccctggacctgagccagcagccccacagcagcggcctgagctgcctgagccagtggaagagcgtgctgagccccggcagcgccgcccagcccagcagctgcagcatcagcgccagcagcaccggcagcagcctgcagggccaccaggagagagccgagcccagaggcggcagcctggccaaggtgagcagcagcctggagcccgtggtgccccaggagcccagcagcgtggtgggcctgggccccagaccccagtggagcccccagcccgtgttcagcggcggcgacgccagcggcctgggcagaagaagactgagcttccaggccgagtactgggcctgcgtgctgcccgacagcctgccccccagccccgacagacacagccccctgtggaaccccaacaaggagtacgaggacctgctggactacacctaccccctgagacccggcccccagctgcccaagcacctggacagcagagtgcccgccgaccccgtgctgcaggacagcggcgtggacctggacagcttcagcgtgagccccgccagcaccctgaagagccccaccaacgtgagccccaactgcccccccgccgaggccaccgccctgcccttcagcggccccagagagcccagcctgaagcagtggcccagcagagtgccccagaagcagggcggcatgggcctggccagctggagccagctggccagcacccccagagcccccggcagcagagacgccagatgggagagaagagagcccgccctgagaggcgccaaggacagactgaccatcggcaagcacctggacatgggcagcccccagctgagaaccagagacagaggctggcccagccccagacccgagagagagaagagaaccagccagagcgccagaagacccacctgcaccgagagcagatggaagagcgaggaggaggtggagagcgacgacgagtacctggccctgcccgccagactgacccaggtgagcagcctggtgagctacctgggcagcatcagcaccctggtgaccctgcccaccggcgacatcaagggccagagccccctggaggtgagcgacagcgacggccccgccagcttccccagcagcagcagccagagccagctgccccccggcgccgccctgcagggcagcggcgaccccgagggccagaacccctgcttcctgagaagcttcgtgagagcccacgacagcgccggcgagggcagcctgggcagcagccaggccctgggcgtgagcagcggcctgctgaagaccagacccagcctgcccgccagactggacagatggcccttcagcgaccccgacgtggagggccagctgcccagaaagggcggcgagcagggcaaggagagcctggtgcagtgcgtgaagaccttctgctgccagctggaggagctgatctgctggctgtacaacgtggccgacgtgaccgaccacggcaccgccgccagaagcaacctgaccagcctgaagagcagcctgcagctgtacagacagttcaagaaggacatcgacgagcaccagagcctgaccgagagcgtgctgcagaagggcgagatcctgctgcagtgcctgctggagaacacccccgtgctggaggacgtgctgggcagaatcgccaagcagagcggcgagctggagagccacgccgacagactgtacgacagcatcctggccagcctggacatgctggccggctgcaccctgatccccgacaagaagcccatggccgccatggagcacccctgcgagggcgtgtag

SEQ ID NO: 11050 - DNA, 540 bp, synthetic construct
  source 1..540: mol_type = other DNA; note = Synthetic coding sequence
atgaaccccagcatgaagcagaagcaggaggagatcaaggagaacatcaagaacagcagcgtgcccagaagaaccctgaagatgatccagcccagcgccagcggcagcctggtgggcagagagaacgagctgagcgccggcctgagcaagagaaagcacagaaacgaccacctgaccagcaccaccagcagccccggcgtgatcgtgcccgagagcagcgagaacaagaacctgggcggcgtgacccaggagagcttcgacctgatgatcaaggagaaccccagcagccagtactggaaggaggtggccgagaagagaagaaaggccctgtacgaggccctgaaggagaacgagaagctgcacaaggagatcgagcagaaggacaacgagatcgccagactgaagaaggagaacaaggagctggccgaggtggccgagcacgtgcagtacatggccgagctgatcgagagactgaacggcgagcccctggacaacttcgagagcctggacaaccaggagttcgacagcgaggaggagtag

SEQ ID NO: 11051 - DNA, 309 bp, synthetic construct
  source 1..309: mol_type = other DNA; note = Synthetic coding sequence
atgaaccccagcatgaagcagaagcaggaggagatcaaggagaacatcaagaacagcagcgtgcccagaagaaccctgaagatgatccagcccagcgccagcggcagcctggtgggcagagagaacgagctgagcgccggcctgagcaagagaaagcacagaaacgaccacctgaccagcaccaccagcagccccggcgtgatcgtgcccgagagcagcgagaacaagaacctgggcggcgtgacccaggagagcttcgacctgatgatcaaggagaaccccagcagccagtactggaaggaggtgtag

SEQ ID NO: 11052 - DNA, 2259 bp, synthetic construct
  source 1..2259: mol_type = other DNA; note = Synthetic coding sequence
atggccgagcccgccagcgtgaccgtgaccttcgacgacgtggccctgtacttcagcgagcaggagtgggagatcctggagaagtggcagaagcagatgtacaagcaggagatgaagaccaactacgagaccctggacagcctgggctacgccttcagcaagcccgacctgatcacctggatggagcagggcagaatgctgctgatcagcgagcagggctgcctggacaagaccagaagaaccaccagcccccccaccgacgagcagctgaacatgaagaacaccggcaagctgctgtgcttcgacgacgagggcacccccagaaccaaggaggaggactgcagactgaacggcccccagaagcaggacctgtgcgccgccctgagaggcaaggagagaaagatcctgctggcccagaccgccaccttccagagccccagcctgagagagaccgagatcctgaacaagaaggtgagcatcaccgcctacgaccccgacaagaaggacctgagacacaagcccagagagacccccggcagactggagatccccaccggccccagatgctacagctgctacgtgtgcagaaaggtgttccaggtgagaagagacctgctgaagcacaagagaagccacagcaagagccagctgtgcagataccccaagtacaagaacagcagcagaggcaagagcgagctgagaagaacccagagactgctgtgccagaagaagagattccagtgcagcgagtgcgagaagagctacttcctgaagggcagcctggtgacccaccaggtggtgcacaccggccagagaccctacccctgccccgagtgcgacaagaccttcagatacagagccaacctgaagaagcacctgtgcctgcacagaggcgagagacccttctgctgcggcgagtgcggcagagccttcgtgcagcagtgcgagctgaccgagcacctgagactgcacagcggcgagaagcccttccagtgcccccagtgcgacagatgcttcagactgaagagaggcatgaaggtgcacctgacccagcacagcggcaagagacccttccactgccccgagtgcggcagaagcttcagcagaaaggccgccctgaagacccaccagagaacccacagcgaggagaagcccttcagctgcggcgagtgcggcagaaagttcatctacaagatcaagctggacgagcacatcagagtgcacaccggcgagaagcccttcagctgccccgagtgcaacaagagcttcagactgaagagaagcctgaaggcccacggcctgcagcacatcggcaagagacccttccagtgccccgagtgcagcagaggcttcttctggagaaacgccatgagagcccaccagagactgcacagcgagcagaagcccttcccctgcgccgagtgcggcaagagattcaccagacccagcaagctggcctgccacaccagagtgcacgacagacagaaggagttcccctgcggcgagtgcaagaagaccttcagccagcagagcagactgacccagcacctgaaggtgcacaccaccgagaagcccttcagctgcgccgagtgcggcagaagcttcagaagaagagcccacctgaccgagcacaccagactgcacagcggcgaggagcccttccagtgccccgagtgcgacaagagcttcagctggaaggccagcatgaagttccaccagagaatgcacagagacgagaagcccttcgcctgcggcgagtgcgacaagacctacacccaccagagccagctgaccgagcacctgagactgcacagcggcgagaagccctaccagtgccccgagtgcgagaagaccttcagactgaagggcaacctgaagagccacctgctgcagcacagcggccagaagcccttcagctgcgtgatgtgcggcaagagcttcacccagcagtacagactgaccgagcacatcagagtgcacagcggcgagaagcccttccagtgccccgagtgcgacaagagctactgcatcagaggcagcctgaaggtgcacctgtacaagcacagcggcgagagacccttccagtgccccgagtgcggcaagggcttcctgcagaagagaagcctgaaggcccacctgtgcctgcacagcggcgagagacccttcagctgcgacgagtgcggcagaagcttcacctacgtgggcgccctgaagacccacatcgccgtgcacgccaaggagaagcccagcagcctgtag

SEQ ID NO: 11053 - DNA, 1935 bp, synthetic construct
  source 1..1935: mol_type = other DNA; note = Synthetic coding sequence
atgttcctgacctacatggagaccgtgaccaaggagctggtgagctggatgagaggccacgagagcagcgtgttcagcatcagcgtgcacgccagcggcaagtacgccatcaccaccagcagcgacaccgcccagctgtgggacctggacaccttccagagaaagagaaagctgaacatcagacagagcgtgggcatccagaaggtgttcttcctgcccctgagcaacaccatcctgagctgcttcaaggacaacagcatcttcgcctgggagtgcgacaccctgttctgcaagtaccagctgcccgccccccccgagagcagcagcatcctgtacaaggtgttcgccgtgaccagagacggcagaatcctggccgccggcggcaagagcaaccacctgcacctgtggtgcctggaggccagacagctgttcagaatcatccagatgcccaccaaggtgagagccatcagacacctggagttcctgcccgacagcttcgacgccggcagcaaccaggtgctgggcgtgctgagccaggacggcatcatgagattcatcaacatgcagacctgcaagctgctgttcgagatcggcagcctggacgagggcatcagcagcagcgccatcagcccccacggcagatacatcgccagcatcatggagaacggcagcctgaacatctacagcgtgcaggccctgacccaggagatcaacaagccccccccccccctggtgaaggtgatcgaggacctgcccaagaacaagctgagcagcagcgacctgaagatgaaggtgaccagcggcagagtgcagcagcccgccaagagcagagagagcaagatgcagaccagaatcctgaagcaggacctgaccggcgacttcgagagcaagaagaacgagctgcccgacggcctgaacaagaagagactgcagatcctgctgaagggctacggcgagtaccccaccaagtacagaatgttcatctggagaagcctgctgcagctgcccgagaaccacaccgccttcagcaccctgatcgacaagggcacccacgtggccttcctgaacctgcagaagaagtaccccatcaagagcagaaagctgctgagagtgctgcagagaaccctgagcgccctggcccactggagcgtgatcttcagcgacaccccctacctgcccctgctggccttccccttcgtgaagctgttccagaacaaccagctgatctgcttcgaggtgatcgccaccctgatcatcaactggtgccagcactggttcgagtacttccccaacccccccatcaacatcctgagcatgatcgagaacgtgctggccttccacgacaaggagctgctgcagcacttcatcgaccacgacatcaccagccagctgtacgcctggcccctgctggagaccgtgttcagcgaggtgctgaccagagaggagtggctgaagctgttcgacaacatcttcagcaaccaccccagcttcctgctgatgaccgtggtggcctacaacatctgcagcagaacccccctgctgagctgcaacctgaaggacgacttcgagttcttcttccaccacagaaacaacctggacatcaacgtggtgatcagacaggtgtaccacctgatggagaccacccccaccgacatccaccccgacagcatgctgaacgtgttcgtggccctgaccaagggccagtaccccgtgttcaaccagtaccccaagttcatcgtggactaccagacccaggagagagagagaatcagaaacgacgagctggactacctgagagagagacagctgaagatctgcaagctgaagagcaccagcaaggagctgaagatgaagctgggcaccagaaacagaagctgcttcgtgaagctgaagaagcaggaggagaagtgcagctacaagagaagaagaaagtag

SEQ ID NO: 11054 - DNA, 735 bp, synthetic construct
  source 1..735: mol_type = other DNA; note = Synthetic coding sequence
atgccccacaagatcggcttcgtggtggtgagcagcagcggccacgaggacggcttcagcgccagagagctgatgatccacgcccccaccgtgagcggctggagaagccccagattctgccagttcccccaggagatcgtgctgcagatggtggagagatgcagaatcagaaagctgcagctgctggcccaccagtacatgatcagcagcaagatcgagttctacatcagcgagagcctgcccgagtacttcgccccctaccaggccgagagattcagaagactgggctacgtgagcctgtgcgacaacgagaagaccggctgcaaggccagagagctgaagagcgtgtacgtggacgccgtgggccagttcctgaagctgatcttccaccagaaccacgtgaacaagtacaacatctacaaccaggtggccctggtggccatcaacatcatcggcgaccccgccgacttcagcgacgagagcaacaccgccagcagagagaagctgatcgaccactacctgggccacaacagcgaggaccccgccctggagggcacctacgccagcagcgtgagaaccggcggcgagagcaccttcggcgagctgaagggccccgccgtgcccagcagcgtgaccctgagcgtgctgggcaccagcctgggccagtggttcccctgccacctgcccgccgtggacgacaacgagggcacccccttccagagatgcctggtgtag

SEQ ID NO: 11055 - DNA, 2778 bp, synthetic construct
  source 1..2778: mol_type = other DNA; note = Synthetic coding sequence
atgccccacaagatcggcttcgtggtggtgagcagcagcggccacgaggacggcttcagcgccagagagctgatgatccacgcccccaccgtgagcggctggagaagccccagattctgccagttcccccaggagatcgtgctgcagatggtggagagatgcagaatcagaaagctgcagctgctggcccaccagtacatgatcagcagcaagatcgagttctacatcagcgagagcctgcccgagtacttcgccccctaccaggccgagagattcagaagactgggctacgtgagcctgtgcgacaacgagaagaccggctgcaaggccagagagctgaagagcgtgtacgtggacgccgtgggccagttcctgaagctgatcttccaccagaaccacgtgaacaagtacaacatctacaaccaggtggccctggtggccatcaacatcatcggcgaccccgccgacttcagcgacgagagcaacaccgccagcagagagaagctgatcgaccactacctgggccacaacagcgaggaccccgccctggagggcacctacgccagaaagagcgactacatcagccccctggacgacctggccttcgacatgtaccaggaccccgaggtggcccagatcatcagaaagctggacgagagaaagagagaggccgtgcagaaggagagatacgactacgccaagaagctgaagcaggccatcgccgacctgcagaaggtgggcgagagactgggcagatacgaggtggagaagagatgcgccgtggagaaggaggactacgacctggccaaggagaagaagcagcagatggagcagtacagagccgaggtgtacgagcagctggagctgcacagcctgctggacgccgagctgatgagaagacccttcgacctgcccctgcagcccctggccagaagcggcagcccctgccaccagaagcccatgcccagcctgccccagctggaggagagaggcaccgagaaccagttcgccgagcccttcctgcaggagaagcccagcagctacagcctgaccatcagcccccagcacagcgccgtggaccccctgctgcccgccaccgacccccaccccaagatcaacgccgagagcctgccctacgacgagagacccctgcccgccatcagaaagcactacggcgaggccgtggtggagcccgagatgagcaacgccgacatcagcgacgccagaagaggcggcatgctgggcgagcccgagcccctgaccgagaaggccctgagagaggccagcagcgccatcgacgtgctgggcgagaccctggtggccgaggcctactgcaagacctggagctacagagaggacgccctgctggccctgagcaagaagctgatggagatgcccgtgggcacccccaaggaggacctgaagaacaccctgagagccagcgtgttcctggtgagaagagccatcaaggacatcgtgaccagcgtgttccaggccagcctgaagctgctgaagatgatcatcacccagtacatccccaagcacaagctgagcaagctggagaccgcccactgcgtggagagaaccatccccgtgctgctgaccagaaccggcgacagcagcgccagactgagagtgaccgccgccaacttcatccaggagatggccctgttcaaggaggtgaagagcctgcagatcatccccagctacctggtgcagcccctgaaggccaacagcagcgtgcacctggccatgagccagatgggcctgctggccagactgctgaaggacctgggcaccggcagcagcggcttcaccatcgacaacgtgatgaagttcagcgtgagcgccctggagcacagagtgtacgaggtgagagagaccgccgtgagaatcatcctggacatgtacagacagcaccaggccagcatcctggagtacctgccccccgacgacagcaacaccagaagaaacatcctgtacaagaccatcttcgagggcttcgccaagatcgacggcagagccaccgacgccgagatgagagccagaagaaaggccgccaccgaggaggccgagaagcagaagaaggaggagatcaaggccctgcagggccagctggccgccctgaaggagatccaggccgaggtgcaggagaaggagagcgacgccgtgaagcccaagaaccaggacatccagggcggcaaggccgcccccgccgaggccctgggcatccccgacgagcactacctggacaacctgtgcatcttctgcggcgagagaagcgagagcttcaccgaggagggcctggacctgcactactggaagcactgcctgatgctgaccagatgcgaccactgcaagcaggtggtggagatcagcagcctgaccgagcacctgctgaccgagtgcgacaagaaggacggcttcggcaagtgctacagatgcagcgaggccgtgttcaaggaggagctgcccagacacatcaagcacaaggactgcaaccccgccaagcccgagaagctggccaacagatgccccctgtgccacgagaacttcagccccggcgaggaggcctggaaggcccacctgatgggccccgccggctgcaccatgaacctgagaaagacccacatcctgcagaaggcccccgccctgcagcccggcaagagcagcgccgtggccgccagcggccccctgggcagcaaggccggcagcaagatccccacccccaagggcggcctgagcaagagcagcagcagaacctacgccaagagatag

SEQ ID NO: 11056 - DNA, 2145 bp, synthetic construct
  source 1..2145: mol_type = other DNA; note = Synthetic coding sequence
atggccagagccggcagctgcggcggcgccgccgccggcgccggcagacccgagccctgggagctgagcctggaggaggtgctgaaggcctacgagcagcccctgaacgaggagcaggcctgggccgtgtgcttccagggctgcagaggcctgagaggcagccccggcagaagactgagagacaccggcgacctgctgctgagaggcgacggcagcgtgggcgccagagagcccgaggccgccgagcccgccaccatggtggtgcccctggccagcagcgaggcccagaccgtgcagagcctgggcttcgccatctacagagccctggactggggcctggacgagagcgaggagagagagctgagcccccagctggagagactgatcgacctgatggccaacaacgacagcgaggacagcggctgcggcgccgccgacgagggctacggcggccccgaggaggaggaggaggccgagggcgtgcccagaagcgtgagaaccttcgcccaggccatgagactgtgcgccgccagactgaccgaccccagaggcgcccaggcccactaccaggccgtgtgcagagccctgttcgtggagaccctggagctgagagccttcctggccagagtgagagaggccaaggagatgctgcagaagctgagagaggacgagccccacctggagacccccagagccgagctggacagcctgggccacaccgactgggccagactgtgggtgcagctgatgagagagctgagaagaggcgtgaagctgaagaaggtgcaggagcaggagttcaaccccctgcccaccgagttccagctgacccccttcgagatgctgatgcaggacatcagagccagaaactacaagctgagaaaggtgatggtggacggcgacatcccccccagagtgaagaaggacgcccacgagctgatcctggacttcatcagaagcagaccccccctgaagcaggtgagcgagagaagactgagacccctgccccccaagcagagaagcctgcacgagaagatcctggaggagatcaagcaggagagaagactgagacccgtgagaggcgagggctgggccgccagaggcttcggcagcctgccctgcatcctgaacgcctgcagcggcgacgccaagagcaccagctgcatcaacctgagcgtgaccgacgccggcggcagcgcccagagacccagacccagagtgctgctgaaggcccccaccctggccgagatggaggagatgaacaccagcgaggaggaggagagcccctgcggcgaggtgaccctgaagagagacagaagcttcagcgagcacgacctggcccagctgagaagcgaggtggccagcggcctgcagagcgccacccacccccccggcggcaccgagccccccagacccagagccggcagcgcccacgtgtggagacccggcagcagagaccagggcacctgccccgccagcgtgagcgaccccagccaccccctgctgagcaacagaggcagcagcggcgacagacccgaggccagcatgacccccgacgccaagcacctgtggctggagttcagccaccccgtggagagcctggccctgaccgtggaggaggtgatggacgtgagaagagtgctggtgaaggccgagatggagaagttcctgcagaacaaggagctgttcagcagcctgaagaagggcaagatctgctgctgctgcagagccaagttccccctgttcagctggccccccagctgcctgttctgcaagagagccgtgtgcaccagctgcagcatcaagatgaagatgcccagcaagaagttcggccacatccccgtgtacaccctgggcttcgagagcccccagagagtgagcgccgccaagaccgcccccatccagagaagagacatcttccagagcctgcagggcccccagtggcagagcgtggaggaggccttcccccacatctacagccacggctgcgtgctgaaggacgtgtgcagcgagtgcaccagcttcgtggccgacgtggtgagaagcagcagaaagagcgtggacgtgctgaacaccacccccagaagaagcagacagacccagagcctgtacatccccaacaccagaaccctggacttcaagtag

SEQ ID NO: 11057 - DNA, 1308 bp, synthetic construct
  source 1..1308: mol_type = other DNA; note = Synthetic coding sequence
atgaacttcagcgaggtgttcaagctgagcagcctgctgtgcaagttcagccccgacggcaagtacctggccagctgcgtgcagtacagactggtggtgagagacgtgaacaccctgcagatcctgcagctgtacacctgcctggaccagatccagcacatcgagtggagcgccgacagcctgttcatcctgtgcgccatgtacaagagaggcctggtgcaggtgtggagcctggagcagcccgagtggcactgcaagatcgacgagggcagcgccggcctggtggccagctgctggagccccgacggcagacacatcctgaacaccaccgagttccacctgagaatcaccgtgtggagcctgtgcaccaagagcgtgagctacatcaagtaccccaaggcctgcctgcagggcatcaccttcaccagagacggcagatacatggccctggccgagagaagagactgcaaggactacgtgagcatcttcgtgtgcagcgactggcagctgctgagacacttcgacaccgacacccaggacctgaccggcatcgagtgggcccccaacggctgcgtgctggccgtgtgggacacctgcctggagtacaagatcctgctgtacagcctggacggcagactgctgagcacctacagcgcctacgagtggagcctgggcatcaagagcgtggcctggagccccagcagccagttcctggccgtgggcagctacgacggcaaggtgagaatcctgaaccacgtgacctggaagatgatcaccgagttcggccaccccgccgccatcaacgaccccaagatcgtggtgtacaaggaggccgagaagagcccccagctgggcctgggctgcctgagcttccccccccccagagccggcgccggccccctgcccagcagcgagagcaagtacgagatcgccagcgtgcccgtgagcctgcagaccctgaagcccgtgaccgacagagccaaccccaagatcggcatcggcatgctggccttcagccccgacagctacttcctggccaccagaaacgacaacatccccaacgccgtgtgggtgtgggacatccagaagctgagactgttcgccgtgctggagcagctgagccccgtgagagccttccagtgggacccccagcagcccagactggccatctgcaccggcggcagcagactgtacctgtggagccccgccggctgcatgagcgtgcaggtgcccggcgagggcaagcacatccccgaggccaccgacgtggccgccctgctgtgcgccgtgtggcaccacaccggctag

SEQ ID NO: 11058 - DNA, 819 bp, synthetic construct
  source 1..819: mol_type = other DNA; note = Synthetic coding sequence
atgctgcagctgagagacagcgtggacagcgccggcaccagccccaccgccgtgctggccgccggcgaggaggtgggcgccggcggcggccccggcggcggcagacccggcgccggcacccccctgagacagaccctgtggcccctgagcatccacgaccccaccagaagagccagagtgaaggagtacttcgtgttcagacccggcagcatcgagcaggccgtggaggagatcagagtggtggtgagacccgtggaggacggcgagatccagggcgtgtggctgctgaccgaggtggaccactggaacaacgagaaggagagactggtgctggtgaccgagcagagcctgctgatctgcaagtacgacttcatcagcctgcagtgccagcaggtggtgagaatcgccctgaacgccgtggacaccatcagctacggcgagttccagttcccccccaagagcctgaacaagagagagggcttcggcatcagaatccagtgggacaagcagagcagacccagcttcatcaacagatggaacccctggagcaccaacgtgccctacgccaccttcaccgagcaccccatggccggcgccgacgagaagaccgccagcctgtgccagctggagagcttcaaggccctgctgatccaggccgtgaagaaggcccagaaggagagccccctgcccggccaggccaacggcgtgctgatcctggagagacccctgctgatcgagacctacgtgggcctgatgagcttcatcaacaacgaggccaagctgggctacagcatgaccagaggcaagatcggcttctag

SEQ ID NO: 11059 - DNA, 870 bp, synthetic construct
  source 1..870: mol_type = other DNA; note = Synthetic coding sequence
atgtggcccttccccagcagaagcctgttccccccccccacccaggcctggctgcagaccgtgagcagcgaccccgaggcccagggctggggcgcctggaacgagaccaaggagatcctgggccccgagggcggcgagggcaaggaggagaaggaggaggaggaggacgccgaggaggaccaggacggcgacgccggcttcctgctgagcctgctggagcaggagaacctggccgagtgccccctgcccgaccaggagctggaggccatcaagatgaaggtgtgcgccatggagcaggccgagggcacccccagaccccccggcgtgcagcagcaggccgaggaggaggagggcaccgccgccggccagctgctgagccccgagaccgtgggctgccccctgagcggcacccccgaggagaaggtggaggccgaccacagaagcgtgtacgtgggcaacgtggactacggcggcagcgccgaggagctggaggcccacttcagcagatgcggcgaggtgcacagagtgaccatcctgtgcgacaagttcagcggccaccccaagggctacgcctacatcgagttcgccaccaagggcagcgtgcaggccgccgtggagctggaccagagcctgttcagaggcagagtgatcaaggtgctgcccaagagaaccaacttccccggcatcagcagcaccgacagaggcggcctgagaggccaccccggcagcagaggcgcccccttcccccacagcggcctgcagggcagacccagactgagaccccagggccagaacagaacccccgccgccctgacccccctgtgggccagacccctgccctgggtggtggtgagccacgtgatcaagtag

SEQ ID NO: 11060 - DNA, 1266 bp, synthetic construct
  source 1..1266: mol_type = other DNA; note = Synthetic coding sequence
atgttcgagatcctgaccagcgagttcagctaccagcacagcctgagcatcctggtggaggagttcctgcagagcaaggagctgagagccaccgtgacccagatggagcaccaccacctgttcagcaacatcctggacgtgctgggcgccagccagagattcttcgaggacctggagcagagacacaaggcccaggtgctggtggaggacatcagcgacatcctggaggagcacgccgagaagcacttccacccctacatcgcctactgcagcaacgaggtgtaccagcagagaaccctgcagaagctgatcagcagcaacgccgccttcagagaggccctgagagagatcgagagaagacccgcctgcggcggcctgcccatgctgagcttcctgatcctgcccatgcagagagtgaccagactgcccctgctgatggacaccctgtgcctgaagacccagggccacagcgagagatacaaggccgccagcagagccctgaaggccatcagcaagctggtgagacagtgcaacgagggcgcccacagaatggagagaatggagcagatgtacaccctgcacacccagctggacttcagcaaggtgaagagcctgcccctgatcagcgccagcagatggctgctgaagagaggcgagctgttcctggtggaggagaccggcctgttcagaaagatcgccagcagacccacctgctacctgttcctgttcaacgacgtgctggtggtgaccaagaagaagagcgaggagagctacatggtgcaggactacgcccagatgaaccacatccaggtggagaagatcgagcccagcgagctgcccctgcccggcggcggcaacagaagcagcagcgtgccccaccccttccaggtgaccctgctgagaaacagcgagggcagacaggagcagctgctgctgagcagcgacagcgccagcgacagagccagatggatcgtggccctgacccacagcgagagacagtggcagggcctgagcagcaagggcgacctgccccaggtggagatcaccaaggccttcttcgccaagcaggccgacgaggtgaccctgcagcaggccgacgtggtgctggtgctgcagcaggaggacggctggctgtacggcgagagactgagagacggcgagaccggctggttccccgaggacttcgccagattcatcaccagcagagtggccgtggagggcaacgtgagaagaatggagagactgagagtggagaccgacgtgtag

SEQ ID NO: 11061 - DNA, 1266 bp, synthetic construct; identical to SEQ ID NO: 11060
  source 1..1266: mol_type = other DNA; note = Synthetic coding sequence

SEQ ID NO: 11062 - DNA, 2130 bp, synthetic construct
  source 1..2130: mol_type = other DNA; note = Synthetic coding sequence
atggcccagagacacagcgacagcagcctggaggagaagctgctgggccacagattccacagcgagctgagactggacgccggcggcaaccccgccagcggcctgcccatggtgagaggcagccccagagtgagagacgacgccgccttccagccccaggtgcccgcccccccccagcccagaccccccggccacgaggagccctggcccatcgtgctgagcaccgagagccccgccgccctgaagctgggcacccagcagctgatccccaagagcctggccgtggccagcaaggccaagacccccgccagacaccagagcttcggcgccgccgtgctgagcagagaggccgccagaagagaccccaagctgctgcccgcccccagcttcagcctggacgacatggacgtggacaaggaccccggcggcatgctgagaagaaacctgagaaaccagagctacagagccgccatgaagggcctgggcaagcccggcggccagggcgacgccatccagctgagccccaagctgcaggccctggccgaggagcccagccagccccacaccagaagccccgccaagaacaagaagaccctgggcagaaagagaggccacaagggcagcttcaaggacgacccccagctgtaccaggagatccaggagagaggcctgaacaccagccaggagagcgacgacgacatcctggacgagagcagcagccccgagggcacccagaaggtggacgccaccatcgtggtgaagagctacagacccgcccaggtgacctggagccagctgcccgaggtggtggagctgggcatcctggaccagctgagcaccgaggagagaaagagacaggaggccatgttcgagatcctgaccagcgagttcagctaccagcacagcctgagcatcctggtggaggagttcctgcagagcaaggagctgagagccaccgtgacccagatggagcaccaccacctgttcagcaacatcctggacgtgctgggcgccagccagagattcttcgaggacctggagcagagacacaaggcccaggtgctggtggaggacatcagcgacatcctggaggagcacgccgagaagcacttccacccctacatcgcctactgcagcaacgaggtgtaccagcagagaaccctgcagaagctgatcagcagcaacgccgccttcagagaggccctgagagagatcgagagaagacccgcctgcggcggcctgcccatgctgagcttcctgatcctgcccatgcagagagtgaccagactgcccctgctgatggacaccctgtgcctgaagacccagggccacagcgagagatacaaggccgccagcagagccctgaaggccatcagcaagctggtgagacagtgcaacgagggcgcccacagaatggagagaatggagcagatgtacaccctgcacacccagctggacttcagcaaggtgaagagcctgcccctgatcagcgccagcagatggctgctgaagagaggcgagctgttcctggtggaggagaccggcctgttcagaaagatcgccagcagacccacctgctacctgttcctgttcaacgacgtgctggtggtgaccaagaagaagagcgaggagagctacatggtgcaggactacgcccagatgaaccacatccaggtggagaagatcgagcccagcgagctgcccctgcccggcggcggcaacagaagcagcagcgtgccccaccccttccaggtgaccctgctgagaaacagcgagggcagacaggagcagctgctgctgagcagcgacagcgccagcgacagagccagatggatcgtggccctgacccacagcgagagacagtggcagggcctgagcagcaagggcgacctgccccaggtggagatcaccaaggccttcttcgccaagcaggccgacgaggtgaccctgcagcaggccgacgtggtgctggtgctgcagcaggaggacggctggctgtacggcgagagactgagagacggcgagaccggctggttccccgaggacttcgccagattcatcaccagcagagtggccgtggagggcaacgtgagaagaatggagagactgagagtggagaccgacgtgtag

SEQ ID NO: 11063 - DNA, 1287 bp, synthetic construct
  source 1..1287: mol_type = other DNA; note = Synthetic coding sequence
atggtgtggcaggtgctggagggcctgagccaggacagcgccaagagactgagattcgtggccggcgtgatcttcgtggacgagggcgccgcctgcggccagagcctggaggagagaagcaagaccctggccgaggtgaagcccatcctgcaggccaccggcttcccctggcacgtggtggccctggaggaggtgttcagcctgccccccagcgtgctgtggtgcagcgcccaggagctggtgggcagcgagggcgcctacaaggccgccgtggacagcttcctgcagcagcagcacgtgctgggcgccggcggcggccccggccccacccagggcgaggagcagcccccccagccccccctggacccccagaacctggccagaccccccgcccccgcccagaccgaggccctgagccagctgttctgcagcgtgagaaccctgaccgccaaggaggagctgctgcagaccctgagaacccacctgatcctgcacatggccagagcccacggctacagcaaggtgatgaccggcgacagctgcaccagactggccatcaagctgatgaccaacctggccctgggcagaggcgccttcctggcctgggacaccggcttcagcgacgagagacacggcgacgtggtggtggtgagacccatgagagaccacaccctgaaggaggtggccttctacaacagactgttcagcgtgcccagcgtgttcacccccgccgtggacaccaaggcccccgagaaggccagcatccacagactgatggaggccttcatcctgagactgcagacccagttccccagcaccgtgagcaccgtgtacagaaccagcgagaagctggtgaagggccccagagacggccccgccgccggcgacagcggccccagatgcctgctgtgcatgtgcgccctggacgtggacgccgccgacagcgccaccgccttcggcgcccagaccagcagcagactgagccagatgcagagccccatccccctgaccgagaccagaaccccccccggcccctgctgcagccccggcgtgggctgggcccagagatgcggccagggcgcctgcagaagagaggacccccaggcctgcatcgaggagcagctgtgctacagctgcagagtgaacatgaaggacctgcccagcctggaccccctgcccccctacatcctggccgaggcccagctgagaacccagagagcctggggcctgcaggagatcagagactgcctgatcgaggacagcgacgacgaggccggccagagctag

SEQ ID NO: 11064 - DNA, 417 bp, synthetic construct
  source 1..417: mol_type = other DNA; note = Synthetic coding sequence
atgggcgagcaggccgacggcaaggacagcatcgccagacaggtggcccccgagagccactggcccgagctgagagtgctgatcctggtggtgagcgccgagaagaagctgaccggcagcaccgtgggcatgagagccagcgtggagaccagccccctgctgagattcagagccgagagcgtggtgcccgcccacggcggcgacggccccctgcaccccggcgccagactgccccagctgagacccgccgaccacgagggccagcagcccgtgcccagacacctgcccagacacctgccccccagcctgaccagcatgcccagccccggcgccagcagcacctggtgcaccgccagcacccccaccaccggcacccccagatggagaacccccctgaccagagcccccatgccctag

SEQ ID NO: 11065 - DNA, 597 bp, synthetic construct
  source 1..597: mol_type = other DNA; note = Synthetic coding sequence
atgagcaccgtggacctggccagagtgggcgcctgcatcctgaagcacgccgtgaccggcgaggccgtggagctgagaagcctgtggagagagcacgcctgcgtggtggccggcctgagaagattcggctgcgtggtgtgcagatggatcgcccaggacctgagcagcctggccggcctgctggaccagcacggcgtgagactggtgggcgtgggccccgaggccctgggcctgcaggagttcctggacggcgactacttcgccggcgagctgtacctggacgagagcaagcagctgtacaaggagctgggcttcaagagatacaacagcctgagcatcctgcccgccgccctgggcaagcccgtgagagacgtggccgccaaggccaaggccgtgggcatccagggcaacctgagcggcgacctgctgcagagcggcggcctgctggtggtgagcaagggcggcgacaaggtgctgctgcacttcgtgcagaagagccccggcgactacgtgcccaaggagcacatcctgcaggtgctgggcatcagcgccgaggtgtgcgccagcgaccccccccagtgcgacagagaggtgtag

SEQ ID NO: 11066 - DNA, 642 bp, synthetic construct
  source 1..642: mol_type = other DNA; note = Synthetic coding sequence
tgaagcagagagagaggcagcagaagcgaggagcccggcgccggcaacagagagagcggcagcagagagcccggcctggccgccgccgccatgagcaccgtggacctggccagagtgggcgcctgcatcctgaagcacgccgtgaccggcgaggccgtggagctgagaagcctgtggagagagcacgcctgcgtggtggccggcctgagaagattcggctgcgtggtgtgcagatggatcgcccaggacctgagcagcctggccggcctgctggaccagcacggcgtgagactggtgggcgtgggccccgaggccctgggcctgcaggagttcctggacggcgactacttcgccggcgagctgtacctggacgagagcaagcagctgtacaaggagctgggcttcaagagatacaacagcctgagcatcctgcccgccgccctgggcaagcccgtgagagacgtggccgccaaggccaaggccgtgggcatccagggcaacctgagcggcgacctgctgcagagcggcggcctgctggtggtgagcaaggaggtgcccagaagactgagaccccagggcgcccaccccgccggccccggccacctgtgcggcggcctgtgccagagacccgccagcgtgtag

SEQ ID NO: 11067 - DNA, 2553 bp, synthetic construct
  source 1..2553: mol_type = other DNA; note = Synthetic coding sequence
atggccgaggtggaggccgtgcagctgaaggaggagggcaacagacacttccagctgcaggactacaaggccgccaccaacagctacagccaggccctgaagctgaccaaggacaaggccctgctggccaccctgtacagaaacagagccgcctgcggcctgaagaccgagagctacgtgcaggccgccagcgacgccagcagagccatcgacatcaacagcagcgacatcaaggccctgtacagaagatgccaggccctggagcacctgggcaagctggaccaggccttcaaggacgtgcagagatgcgccaccctggagcccagaaaccagaacttccaggagatgctgagaagactgaacaccagcatccaggagaagctgagagtgcagttcagcaccgacagcagagtgcagaagatgttcgagatcctgctggacgagaacagcgaggccgacaagagagagaaggccgccaacaacctgatcgtgctgggcagagaggaggccggcgccgagaagatcttccagaacaacggcgtggccctgctgctgcagctgctggacaccaagaagcccgagctggtgctggccgccgtgagaaccctgagcggcatgtgcagcggccaccaggccagagccaccgtgatcctgcacgccgtgagaatcgacagaatctgcagcctgatggccgtggagaacgaggagatgagcctggccgtgtgcaacctgctgcaggccatcatcgacagcctgagcggcgaggacaagagagagcacagaggcaaggaggaggccctggtgctggacaccaagaaggacctgaagcagatcaccagccacctgctggacatgctggtgagcaagaaggtgagcggccagggcagagaccaggccctgaacctgctgaacaagaacgtgcccagaaaggacctggccatccacgacaacagcagaaccatctacgtggtggacaacggcctgagaaagatcctgaaggtggtgggccaggtgcccgacctgcccagctgcctgcccctgaccgacaacaccagaatgctggccagcatcctgatcaacaagctgtacgacgacctgagatgcgaccccgagagagaccacttcagaaagatctgcgaggagtacatcaccggcaagttcgacccccaggacatggacaagaacctgaacgccatccagaccgtgagcggcatcctgcagggccccttcgacctgggcaaccagctgctgggcctgaagggcgtgatggagatgatggtggccctgtgcggcagcgagagagagaccgaccagctggtggccgtggaggccctgatccacgccagcaccaagctgagcagagccaccttcatcatcaccaacggcgtgagcctgctgaagcagatctacaagaccaccaagaacgagaagatcaagatcagaaccctggtgaccagcgacaagaccatcctgtacagcgtggccaccaccctggtgaactgcaccaacagctacgacgtgaaggaggtgatccccgagctggtgcagctggccaagttcagcaagcagcacgtgcccgaggagcaccccaaggacaagaaggacttcatcgacatgagagtgaagagactgctgaaggccggcgtgatcagcgccctggcctgcatggtgaaggccgacagcgccatcctgaccgaccagaccaaggagctgctggccagagtgttcctggccctgtgcgacaaccccaaggacagaggcaccatcgtggcccagggcggcggcaaggccctgatccccctggccctggagggcaccgacgtgggcaaggtgaaggccgcccacgccctggccaagatcgccgccgtgagcaaccccgacatcgccttccccggcgagagagtgtacgaggtggtgagacccctggtgagactgctggacacccagagagacggcctgcagaactacgaggccctgctgggcctgaccaacctgagcggcagaagcgacaagctgagacagaagatcttcaaggagagagccctgcccgacatcgagaactacatgttcgagaaccacgaccagctgagacaggccgccaccgagtgcatgtgcaacatggtgctgcacaaggaggtgcaggagagattcctggccgacggcaacgacagactgaagctggtggtgctgctgtgcggcgaggacgacgacaaggtgcagaacgccgccgccggcgccctggccatgctgaccgccgcccacaagaagctgtgcctgaagatgacccaggtgaccacccagtggctggagatcctgcagagactgtgcctgcacgaccagctgagcgtgcagcacagaggcctggtgatcgcctacaacctgctggccgccgacgccgagctggccaagaagctggtggagagcgagctgctggagatcctgaccgtggtgggcaagcaggagcccgacgagaagaaggccgaggtggtgcagaccgccagagagtgcctgatcaagtgcatggactacggcttcatcaagcccgtgagctag

SEQ ID NO: 11068 - DNA, 552 bp, synthetic construct; identical to SEQ ID NO: 10168
  source 1..552: mol_type = other DNA; note = Synthetic coding sequence

SEQ ID NO: 11069 - DNA, 366 bp, synthetic construct
  source 1..366: mol_type = other DNA; note = Synthetic coding sequence
atgttcaacaagtgcagcttccacagcagcatctacagacccgccgccgacaacagcgccagcagcctgtgcgccatcatctgcttcctgaacctggtgatcgagtgcgacctggagaccaacagcgagatcaacaagctgatcatctacctgttcagccagaacaacagaatcagattcagcaagctgctgctgaagatcctgttctacatcagcatcttcagctaccccgagctgatgtgcgagcagtacgtgaccttcatcaagcccggcatccactacggccaggtgagcaagaagcacatcatctacagcaccttcctgagcaagaacttcaagttccagctgctgagagtgtgctggtag

SEQ ID NO: 11070 - DNA, 972 bp, synthetic construct
  source 1..972: mol_type = other DNA; note = Synthetic coding sequence
atggagagcagagtggccgacgccggcaccggcgagaccgccagagccgccggcggcagccccgccgtgggctgcaccaccagaggccccgtggtgagcgcccccctgggcgccgccagatggaagctgctgagacaggtgctgaagcagaagcacctggacgactgcctgagacacgtgagcgtgagaagattcgagagcttcaacctgttcagcgtgaccgagggcaaggagagagagaccgaggaggaggtgggcgcctgggtgcagtacaccagcatcttctgccccgagtacagcatcagcctgagacacaacagcggcagcctgaacgtggaggacgtgctgaccagcttcgacaacaccggcaacgtgtgcatctggcccagcgaggaggtgctggcctactactgcctgaagcacaacaacatcttcagagccctggccgtgtgcgagctgggcggcggcatgacctgcctggccggcctgatggtggccatcagcgccgacgtgaaggaggtgctgctgaccgacggcaacgagaaggccatcagaaacgtgcaggacatcatcaccagaaaccagaaggccggcgtgttcaagacccagaagatcagcagctgcgtgctgagatgggacaacgagaccgacgtgagccagctggagggccacttcgacatcgtgatgtgcgccgactgcctgttcctggaccagtacagagccagcctggtggacgccatcaagagactgctgcagcccagaggcaaggccatggtgttcgcccccagaagaggcaacaccctgaaccagttctgcaacctggccgagaaggccggcttctgcatccagagacacgagaactacgacgagcacatcagcaacttccacagcaagctgaagaaggagaaccccgacatctacgaggagaacctgcactaccccctgctgctgatcctgaccaagcacggctag

SEQ ID NO: 11071 - DNA, 3120 bp, synthetic construct; identical to SEQ ID NO: 10450
  source 1..3120: mol_type = other DNA; note = Synthetic coding sequence

SEQ ID NO: 11072 - DNA, 390 bp, synthetic construct
  source 1..390: mol_type = other DNA; note = Synthetic coding sequence
atgtacagacagagattcctgtacagcctgtacagacacacccactgggtgagatgcgccaagttcagccccgacggcagactgatcgtgagctgcagcgaggacaagaccatcaagatctgggacaccaccaacaagcagtgcgtgaacaacttcagcgacagcgtgggcgacctgagcctgctgttccacttccagaaggtggagagctacctgcaccaggaggtgcagacccacagaagctactacggcggcctgaccctgatgaactgcatcgtgaaggtgctgcccaaggagatcagcaaggactacatcctgatccaccaccacatcttcctgatcagcacccaggagcaccacatccccatgagaaagaagctgagactgtag

SEQ ID NO: 11073 - DNA, 2178 bp, synthetic construct
  source 1..2178: mol_type = other DNA; note = Synthetic coding sequence
atgcaccccgagcccagcgagcccgccaccggcggcgccgccgagctggactgcgcccaggagcccggcgtggaggagagcgccggcgaccacggcagcgccggcagaggcggctgcaaggaggagatcaacgaccccaaggagatctgcgtgggcagcagcgacaccagctaccacagccagcagaagcagagcggcgacaacggcagcggcggccacttcgcccaccccagagaggacagagaggacagaggccccagaatgaccaagagcagcctgcagaagctgtgcaagcagcacaagctgtacatcacccccgccctgaacgacaccctgtacctgcacttcaagggcttcgacagaatcgagaacctggaggagtacaccggcctgagatgcctgtggctgcagagcaacggcatccagaagatcgagaacctggaggcccagaccgagctgagatgcctgttcctgcagatgaacctgctgagaaagatcgagaacctggagcccctgcagaagctggacgccctgaacctgagcaacaactacatcaagaccatcgagaacctgagctgcctgcccgtgctgaacaccctgcagatggcccacaaccacctggagaccgtggaggacatccagcacctgcaggagtgcctgagactgtgcgtgctggacctgagccacaacaagctgagcgaccccgagatcctgagcatcctggagagcatgcccgacctgagagtgctgaacctgatgggcaaccccgtgatcagacagatccccaactacagaagaaccgtgaccgtgagactgaagcacctgacctacctggacgacagacccgtgttccccaaggacagagcctgcgccgaggcctgggccagaggcggctacgccgccgagaaggaggagagacagcagtgggagagcagagagagaaagaagatcaccgacagcatcgaggccctggccatgatcaagcagagagccgaggagagaaagagacagagagagagccaggagagaggcgagatgaccagcagcgacgacggcgagaacgtgcccgccagcgccgagggcaaggaggagccccccggcgacagagagaccagacagaagatggagctgttcgtgaaggagagcttcgaggccaaggacgagctgtgccccgagaagcccagcggcgaggagccccccgtggaggccaagagagaggacggcggccccgagcccgagggcaccctgcccgccgagaccctgctgctgagcagccccgtggaggtgaagggcgaggacggcgacggcgagcccgagggcaccctgcccgccgaggccccccccccccccccccccgtggaggtgaagggcgaggacggcgaccaggagcccgagggcaccctgcccgccgagaccctgctgctgagcccccccgtgaaggtgaagggcgaggacggcgacagagagcccgagggcaccctgcccgccgaggcccccccccccccccccctgggcgccgccagagaggagcccaccccccaggccgtggccaccgagggcgtgttcgtgaccgagctggacggcaccagaaccgaggacctggagaccatcagactggagaccaaggagaccttctgcatcgacgacctgcccgacctggaggacgacgacgagaccggcaagagcctggaggaccagaacatgtgcttccccaagatcgaggtgatcagcagcctgagcgacgacagcgaccccgagctggactacaccagcctgcccgtgctggagaacctgcccaccgacaccctgagcaacatcttcgccgtgagcaaggacaccagcaaggccgccagagtgcccttcaccgacatcttcaagaaggaggccaagagagacctggagatcagaaagcaggacaccaagagccccagacccctgatccaggagctgagcgacgaggaccccagcggccagctgctgatgccccccacctgccagagagacgccgcccccctgaccagcagcggcgacagagacagcgacttcctggccgccagcagccccgtgcccaccgagagcgccgccaccccccccgagacctgcgtgggcgtggcccagcccagccaggccctgcccacctgggacctgaccgccttccccgcccccaaggccagctag

SEQ ID NO: 11074 - DNA, 957 bp, synthetic construct
  source 1..957: mol_type = other DNA; note = Synthetic coding sequence
tgaggcatcaacggcagcgagggcgacggcgccgagatcgccgagaagttcgtgttcttcatcggcagcaagaacggcggcaagaccaccatcatcctgagatgcctggacagagacgagccccccaagcccaccctggccctggagtacacctacggcagaagagccaagggccacaacacccccaaggacatcgcccacttctgggagctgggcggcggcaccagcctgctggacctgatcagcatccccatcaccggcgacaccctgagaaccttcagcctggtgctggtgctggacctgagcaagcccaacgacctgtggcccaccatggagaacctgctgcaggccaccaagagccacgtggacaaggtgatcatgaagctgggcaagaccaacgccaaggccgtgagcgagatgagacagaagatctggaacaacatgcccaaggaccaccccgaccacgagctgatcgaccccttccccgtgcccctggtgatcatcggcagcaagtacgacgtgttccaggacttcgagagcgagaagagaaaggtgatctgcaagaccctgagattcgtggcccactactacggcgccagcctgatgttcaccagcaagagcgaggccctgctgctgaagatcagaggcgtgatcaaccagctggccttcggcatcgacaagagcaagagcatctgcgtggaccagaacaagcccctgttcatcaccgccggcctggacagcttcggccagatcggcagcccccccgtgcccgagaacgacatcggcaagctgcacgcccacagccccatggagctgtggaagaaggtgtacgagaagctgttcccccccaagagcatcaacaccctgaaggacatcaaggaccccgccagagacccccagtacgccgagaacgaggtggacgagatgagaatccagaaggacctggtgctgagctag

SEQ ID NO: 11075 - DNA, 2559 bp, synthetic construct
  source 1..2559: mol_type = other DNA; note = Synthetic coding sequence
atggaggccctgggccccggcggcgacagagccagccccgccagcagcaccagcagcctggacctgtggcacctgagcatgagagccgacagcgcctacagcagcttcagcgccgccagcggcggccccgagcccagaacccagagccccggcaccgacctgctgccctacctggactgggactacgtgagagtggtgtggggcggccccggccccgccccccccgacgccgccctgtgcaccagccccagacccagacccgccgtggccgccagaagcggcccccagcccaccgaggtgcccggcacccccggccccctgaacagacaggccacccccctgctgtacgccctggccgccgaggccgaggccgccgcccaggccgccgagccccccagcccccccgccagcagagccgcctacagacagagactgcagggcgcccagagaagagtgctgagagagaccagcttccagagaaaggagctgagaatgagcctgcccgccagactgagacccaccgtgcccgccagaccccccgccacccaccccagaagcgccagcctgagccaccccggcggcgagggcgagcccgccagaagcagagcccccgcccccggcaccgccggcagaggccccctggccaaccagcagagaaagtggtgcttcagcgagcccggcaagctggacagagtgggcagaggcggcggccccgccagagagtgcctgggcgaggcctgcagcagcagcggcctgcccggccccgagcccctggagttccagcaccccgccctggccaagttcgaggaccacgaggtgggctggctgcccgagacccagccccagggcagcatgaacctggacagcggcagcctgaagctgggcgacgccttcagacccgccagcagaagcagaagcgccagcggcgaggtgctgggcagctggggcggcagcggcggcaccatccccatcgtgcaggccgtgccccagggcgccgagacccccagacccctgttccagaccaagctgagcagattcctgccccagaaggaggccgccgtgatgtaccccgccgagctgccccagagcagccccgccgacagcgagcagagagtgagcgagacctgcatcgtgcccgcctggctgcccagcctgcccgacgaggtgttcctggaggaggcccccctggtgagaatgagaagcccccccgacccccacgccagccagggcccccccgccagcgtgcacgccagcgaccagccctacggcaccggcctgggccagagaaccggccaggtgaccgtgcccaccgagtaccccctgcacgagtgccccggcaccgccggcgccgacgactgctggcagggcgtgaacggcagcgtgggcatcagcagacccaccagccacacccccaccggcaccgccaacgacaacatccccaccatcgaccccaccggcctgaccaccaacccccccaccgccgccgagagcgacctgctgaagcccgtgcccgccgacgccctgggcctgagcggcaacgacacccccggccccagccacaacaccgccctggccagaggcaccggccagcccggcagcagacccacctggcccagccagtgcctggaggagctggtgcaggagctggccagactggaccccagcctgtgcgaccccctggccagccagcccagccccgagccccccctgggcctgctggacggcctgatccccctggccgaggtgagagccgccatgagacccgcctgcggcgaggccggcgaggaggccgccagcaccttcgagcccggcagctaccagttcagcttcacccagctgctgcccgcccccagagaggagaccagactggagaaccccgccacccaccccgtgctggaccagccctgcggccagggcctgcccgcccccaacaacagcatccagggcaagaaggtggagctggccgccagactgcagaagatgctgcaggacctgcacaccgagcaggagagactgcagggcgaggcccaggcctgggccagaagacaggccgccctggaggccgccgtgagacaggcctgcgccccccaggagctggagagattcagcagattcatggccgacctggagagagtgctgggcctgctgctgctgctgggcagcagactggccagagtgagaagagccctggccagagccgccagcgacagcgaccccgacgagcaggccagcctgctgcagagactgagactgctgcagagacaggaggaggacgccaaggagctgaaggagcacgtggccagaagagagagagccgtgagagaggtgctggtgagagccctgcccgtggaggagctgagagtgtactgcgccctgctggccggcaaggccgccgtgctggcccagcagagaaacctggacgagagaatcagactgctgcaggaccagctggacgccatcagagacgacctgggccaccacgcccccagccccagccccgccagaccccccggcacctgcccccccgtgcagccccccttccccctgctgctgacctag

SEQ ID NO: 11076 - DNA, 1776 bp, synthetic construct
  source 1..1776: mol_type = other DNA; note = Synthetic coding sequence
atggcccagggcagcgtgagcttcaacgacgtgaccgtggacttcacccaggaggagtggcagcacctggaccacgcccagaagaccctgtacatggacgtgatgctggagaactactgccacctgatcagcgtgggctgccacatgaccaagcccgacgtgatcctgaagctggagagaggcgaggagccctggaccagcttcgccggccacacctgcctggaggagaactggaaggccgaggacttcctggtgaagttcaaggagcaccaggagaagtacagcagaagcgtggtgagcatcaaccacaagaagctggtgaaggagaagagcaagatctacgagaagaccttcaccctgggcaagaaccccgtgaacagcaagaacctgccccccgagtacgacacccacggcagaatcctgaagaacgtgagcgagctgatcatcagcaacctgaaccccgccagaaagagactgagcgagtacaacggctacggcaagagcctgctgagcaccaagcaggagaccacccaccccgaggtgaagagccacaaccagagcgccagagccttcagccacaacgaggtgctgatgcagtaccagaagaccgagacccccgcccagagcttcggctacaacgactgcgagaagagcttcctgcagagaggcggcctgatcacccacagcagaccctacaagggcgagaaccccagcgtgtacaacaagaagagaagagccaccaacatcgagaagaagcacacctgcaacgagtgcggcaagagcttctgcagaaagagcgtgctgatcctgcaccagggcatccacagcgaggagaagccctaccagtgccaccagtgcggcaacgccttcagaagaaagagctacctgatcgaccaccagagaacccacaccggcgagaagccctacgagtgcaacgactgcggcaagagcttcagacagaagaccaccctgagcctgcaccagagaatccacaccggcgagaagccctacatctgcaaggagtgcggcaagagcttccaccagaaggccaacctgaccgtgcaccagagaacccacaccggcgagaagccctacatctgcaacgagtgcggcaagagcttcagccagaagaccaccctggccctgcacgagaagacccacaacgaggagaagccctacatctgcagcgagtgcggcaagagcttcagacagaagaccaccctggtggcccaccagagaacccacaccggcgagaagagctacgagtgcccccactgcggcaaggccttcagaatgaagagctacctgatcgaccaccacagaacccacaccggcgagaagccctacgagtgcaacgagtgcggcaagagcttcagccagaagaccaacctgaacctgcaccagagaatccacaccggcgagaagccctacgtgtgcaacgagtgcggcaagagcttcagacagaaggccaccctgaccgtgcaccagaagatccacaccggccagaagagctacgagtgcccccagtgcggcaaggccttcagcagaaagagctacctgatccaccaccagagaacccacaccggcgagaagccctacaagtgcagcgagtgcggcaagtgcttcagacagaagaccaacctgatcgtgcaccagagaacccacaccggcgagaagccctacgtgtgcaacgagtgcggcaagagcttcagctacaagagaaacctgatcgtgcaccagagaacccacaagggcgagaacatcgagatgcagtag

SEQ ID NO: 11077 - DNA, 2934 bp, synthetic construct
  source 1..2934: mol_type = other DNA; note = Synthetic coding sequence
atgggctggaagcccagcgaggccagaggccagagccagagcttccaggccagcggcctgcagcccagaagcctgaaggccgccagaagagccaccggcagacccgacagaagcagagccgccagacccaccatggaccccagcgcccacagaagcagagccgccccccccaacatggaccccgacccccaggccggcgtgcaggtgggcatgagagtggtgagaggcgtggactggaagtggggccagcaggacggcggcgagggcggcgtgggcaccgtggtggagctgggcagacacggcagccccagcacccccgacagaaccgtggtggtgcagtgggaccagggcaccagaaccaactacagagccggctaccagggcgcccacgacctgctgctgtacgacaacgcccagatcggcgtgagacaccccaacatcatctgcgactgctgcaagaagcacggcctgagaggcatgagatggaagtgcagagtgtgcctggactacgacctgtgcacccagtgctacatgcacaacaagcacgagctggcccacgccttcgacagatacgagaccgcccacagcagacccgtgaccctgagccccagacagggcctgcccagaatccccctgagaggcatcttccagggcgccaaggtggtgagaggccccgactgggagtggggcagccaggacggcggcgagggcaagcccggcagagtggtggacatcagaggctgggacgtggagaccggcagaagcgtggccagcgtgacctgggccgacggcaccaccaacgtgtacagagtgggccacaagggcaaggtggacctgaagtgcgtgggcgaggccgccggcggcttctactacaaggaccacctgcccagactgggcaagcccgccgagctgcagagaagagtgagcgccgacagccagcccttccagcacggcgacaaggtgaagtgcctgctggacaccgacgtgctgagagagatgcaggagggccacggcggctggaaccccagaatggccgagcaccacagcttctgggtgggcgacgtggtgagagtgatcggcgacctggacaccgtgaagagactgcaggccggccacggcgagtggaccgacgacatggcccccgccctgggcagagtgggcaaggtggtgaaggtgttcggcgacggcaacctgagagtggccgtggccggccagagatggaccttcagccccagctgcctggtggcctacagacccgaggaggacgccaacctggacgtggccgagagagccagagagaacaagagcagcctgagcgtggccctggacaagctgagagcccagaagagcgaccccgagcaccccggcagactggtggtggaggtggccctgggcaacgccgccagagccctggacctgctgagaagaagacccgagcaggtggacaccaagaaccagggcagaaccgccctgcaggtggccgcctacctgggccaggtggagctgatcagactgctgctgcaggccagagccggcgtggacctgcccgacgacgagggcaacaccgccctgcactacgccgccctgggcaaccagcccgaggccaccagagtgctgctgagcgccggctgcagagccgacgccatcaacagcacccagagcaccgccctgcacgtggccgtgcagagaggcttcctggaggtggtgagagccctgtgcgagagaggctgcgacgtgaacctgcccgacgcccacagcgacacccccctgcacagcgccatcagcgccggcaccggcgccagcggcatcgtggaggtgctgaccgaggtgcccaacatcgacgtgaccgccaccaacagccagggcttcaccctgctgcaccacgccagcctgaagggccacgccctggccgtgagaaagatcctggccagagccagacagctggtggacgccaagaaggaggacggcttcaccgccctgcacctggccgccctgaacaaccacagagaggtggcccagatcctgatcagagagggcagatgcgacgtgaacgtgagaaacagaaagctgcagagccccctgcacctggccgtgcagcaggcccacgtgggcctggtgcccctgctggtggacgccggctgcagcgtgaacgccgaggacgaggagggcgacaccgccctgcacgtggccctgcagagacaccagctgctgcccctggtggccgacggcgccggcggcgaccccggccccctgcagctgctgagcagactgcaggccagcggcctgcccggcagcgccgagctgaccgtgggcgccgccgtggcctgcttcctggccctggagggcgccgacgtgagctacaccaaccacagaggcagaagccccctggacctggccgccgagggcagagtgctgaaggccctgcagggctgcgcccagagattcagagagagacaggccggcggcggcgccgcccccggccccagacagaccctgggcacccccaacaccgtgaccaacctgcacgtgggcgccgcccccggccccgaggccgccgagtgcctggtgtgcagcgagctggccctgctggtgctgttcagcccctgccagcacagaaccgtgtgcgaggagtgcgccagaagaatgaagaagtgcatcagatgccaggtggtggtgagcaagaagctgagacccgacggcagcgaggtggccagcgccgcccccgcccccggcccccccagacagctggtggaggagctgcagagcagatacagacagatggaggagagaatcacctgccccatctgcatcgacagccacatcagactggtgttccagtgcggccacggcgcctgcgccccctgcggcagcgccctgagcgcctgccccatctgcagacagcccatcagagacagaatccagatcttcgtgtag

SEQ ID NO: 11078 - DNA, 2262 bp, synthetic construct
  source 1..2262: mol_type = other DNA; note = Synthetic coding sequence
atggaccccgacccccaggccggcgtgcaggtgggcatgagagtggtgagaggcgtggactggaagtggggccagcaggacggcggcgagggcggcgtgggcaccgtggtggagctgggcagacacggcagccccagcacccccgacagaaccgtggtggtgcagtgggaccagggcaccagaaccaactacagagccggctaccagggcgcccacgacctgctgctgtacgacaacgcccagatcggcgtgagacaccccaacatcatctgcgactgctgcaagaagcacggcctgagaggcatgagatggaagtgcagagtgtgcctggactacgacctgtgcacccagtgctacatgcacaacaagcacgagctggcccacgccttcgacagatacgagaccgcccacagcagacccgtgaccctgagccccagacagggcctgcccagaatccccctgagaggcatcttccagggcgccaaggtggtgagaggccccgactgggagtggggcagccaggacggcaagcccgccgagctgcagagaagagtgagcgccgacagccagcccttccagcacggcgacaaggtgaagtgcctgctggacaccgacgtgctgagagagatgcaggagggccacggcggctggaaccccagaatggccgagttcatcggccagaccggcaccgtgcacagaatcaccgacagaggcgacgtgagagtgcagttcaaccacgagaccagatggaccttccaccccggcgccctgaccaagcaccacagcttctgggtgggcgacgtggtgagagtgatcggcgacctggacaccgtgaagagactgcaggccggccacggcgagtggaccgacgacatggcccccgccctgggcagagtgggcaaggtggtgaaggtgttcggcgacggcaacctgagagtggccgtggccggccagagatggaccttcagccccagctgcctggtggcctacagacccgaggaggacgccaacctggacgtggccgagagagccagagagaacaagagcagcctgagcgtggccctggacaagctgagagcccagaagagcgaccccgagcaccccggcagactggtggtggaggtggccctgggcaacgccgccagagccctggacctgctgagaagaagacccgagcaggtggacaccaagaaccagggcagaaccgccctgcaggtggccgcctacctgggccaggtggagctgatcagactgctgctgcaggccagagccggcgtggacctgcccgacgacgagggcaacaccgccctgcactacgccgccctgggcaaccagcccgaggccaccagagtgctgctgagcgccggctgcagagccgacgccatcaacagcacccagagcaccgccctgcacgtggccgtgcagagaggcttcctggaggtggtgagagccctgtgcgagagaggctgcgacgtgaacctgcccgacgcccacagcgacacccccctgcacagcgccatcagcgccggcaccggcgccagcggcatcgtggaggtgctgaccgaggtgcccaacatcgacgtgaccgccaccaacagccagggcttcaccctgctgcaccacgccagcctgaagggccacgccctggccgtgagaaagatcctggccagagccagacagctggtggacgccaagaaggaggacggcttcaccgccctgcacctggccgccctgaacaaccacagagaggtggcccagatcctgatcagagagggcagatgcgacgtgaacgtgagaaacagaaagctgcagagccccctgcacctggccgtgcagcaggcccacgtgggcctggtgcccctgctggtggacgccggctgcagcgtgaacgccgaggacgaggagggcgacaccgccctgcacgtggccctgcagagacaccagctgctgcccctggtggccgacggcgccggcggcgaccccggccccctgcagctgctgagcagactgcaggccagcggcctgcccggcagcgccgagctgaccgtgggcgccgccgtggcctgcttcctggccctggagggcgccgacgtgagctacaccaaccacagaggcagaagccccctggacctggccgccgagggcagagtgctgaaggccctgcagggctgcgcccagagattcagagtgagagcccaggacgaggaggtgcaccaggtgcccggcggcagacagcaggagaccgcccccagaagactgtag

SEQ ID NO: 11079 - DNA, 1161 bp, synthetic construct
  source 1..1161: mol_type = other DNA; note = Synthetic coding sequence
atgggcaaggactactacaagatcctgggcatccccagcggcgccaacgaggacgagatcaagaaggcctacagaaagatggccctgaagtaccaccccgacaagaacaaggagcccaacgccgaggagaagttcaaggagatcgccgaggcctacgacgtgctgagcgaccccaagaagagaggcctgtacgaccagtacggcgaggagggcctgaagaccggcggcggcaccagcggcggcagcagcggcagcttccactacaccttccacggcgacccccacgccaccttcgccagcttcttcggcggcagcaaccccttcgacatcttcttcgccagcagcagaagcaccagacccttcagcggcttcgaccccgacgacatggacgtggacgaggacgaggaccccttcggcgccttcggcagattcggcttcaacggcctgagcagaggccccagaagagcccccgagcccctgtaccccagaagaaaggtgcaggacccccccgtggtgcacgagctgagagtgagcctggaggagatctaccacggcagcaccaagagaatgaagatcaccagaagaagactgaaccccgacggcagaaccgtgagaaccgaggacaagatcctgcacatcgtgatcaagagaggctggaaggagggcaccaagatcaccttccccaaggagggcgacgccacccccgacaacatccccgccgacatcgtgttcgtgctgaaggacaagccccacgcccacttcagaagagacggcaccaacgtgctgtacagcgccctgatcagcctgaaggaggccctgtgcggctgcaccgtgaacatccccaccatcgacggcagagtgatccccctgccctgcaacgacgtgatcaagcccggcaccgtgaagagactgagaggcgagggcctgcccttccccaaggtgcccacccagagaggcgacctgatcgtggagttcaaggtgagattccccgacagactgaccccccagaccagacagatcctgaagcagcagtacccccagcacagcctgcacagcatgtgcacccagctggacgtgcactggaccctggccaccttcagcaagatgcagaagaaggccaccggcttccaggagaacgtgcccgtgcccgaccccttctag

SEQ ID NO: 11080 - DNA, 1008 bp, synthetic construct
  source 1..1008: mol_type = other DNA; note = Synthetic coding sequence
atgctgggcagcggcttcaaggccgagagactgagagtgaacctgagactggtgatcaacagactgaagctgctggagaagaagaagaccgagctggcccagaaggccagaaaggagatcgccgactacctggccgccggcaaggacgagagagccagaatcagagtggagcacatcatcagagaggactacctggtggaggccatggagatcctggagctgtactgcgacctgctgctggccagattcggcctgatccagagcatgaaggagctggacagcggcctggccgagagcgtgagcaccctgatctgggccgcccccagactgcagagcgaggtggccgagctgaagatcgtggccgaccagctgtgcgccaagtacagcaaggagtacggcaagctgtgcagaaccaaccagatcggcaccgtgaacgacagactgatgcacaagctgagcgtggaggccccccccaagatcctggtggagagatacctgatcgagatcgccaagaactacaacgtgccctacgagcccgacagcgtggtgatggccgaggccccccccggcgtggagaccgacctgatcgacgtgggcttcaccgacgacgtgaagaagggcggccccggcagaggcggcagcggcggcttcaccgcccccgtgggcggccccgacggcaccgtgcccatgcccatgcccatgcccatgcccatgcccagcgccaacacccccttcagctaccccctgcccaagggccccgtggacgacatcaacgccgacaagaacatcagcagcgcccagatcgtgggccccggccccaagcccgaggccagcgccaagctgcccagcagacccgccgacaactacgacaacttcgtgctgcccgagctgcccagcgtgcccgacaccctgcccaccgccagcgccggcgccagcaccagcgccagcgaggacatcgacttcgacgacctgagcagaagattcgaggagctgaagaagaagacctag

SEQ ID NO: 11081 - DNA, 1101 bp, synthetic construct
  source 1..1101: mol_type = other DNA; note = Synthetic coding sequence
atgctgggcagcggcttcaaggccgagagactgagagtgaacctgagactggtgatcaacagactgaagctgctggagaagaagaagaccgagctggcccagaaggccagaaaggagatcgccgactacctggccgccggcaaggacgagagagccagaatcagagtggagcacatcatcagagaggactacctggtggaggccatggagatcctggagctgtactgcgacctgctgctggccagattcggcctgatccagagcatgaaggagctggacagcggcctggccgagagcgtgagcaccctgatctgggccgcccccagactgcagagcgaggtggccgagctgaagatcgtggccgaccagctgtgcgccaagtacagcaaggagtacggcaagctgtgcagaaccaaccagatcggcaccgtgaacgacagactgatgcacaagctgagcgtggaggccccccccaagatcctggtggagagatacctgatcgagatcgccaagaactacaacgtgccctacgagcccgacagcgtggtgatggccgaggccccccccggcgtggagaccgacctgatcgacgtgggcttcaccgacgacgtgaagaagggcggccccggcagaggcggcagcggcggcttcaccgcccccgtgggcggccccgacggcaccgtgcccatgcccatgcccatgcccatgcccatgcccagcgccaacacccccttcagctaccccctgcccaagggccccagcgacttcaacggcctgcccatgggcacctaccaggccttccccaacatccaccccccccagatccccgccaccccccccagctacgagagcgtggacgacatcaacgccgacaagaacatcagcagcgcccagatcgtgggccccggccccaagcccgaggccagcgccaagctgcccagcagacccgccgacaactacgacaacttcgtgctgcccgagctgcccagcgtgcccgacaccctgcccaccgccagcgccggcgccagcaccagcgccagcgaggacatcgacttcgacgacctgagcagaagattcgaggagctgaagaagaagacctag

SEQ ID NO: 11082 - DNA, 948 bp, synthetic construct
  source 1..948: mol_type = other DNA; note = Synthetic coding sequence
atggagaagtacgagaagctggccaagaccggcgagggcagctacggcgtggtgttcaagtgcagaaacaagaccagcggccaggtggtggccgtgaagaagttcgtggagagcgaggacgaccccgtggtgaagaagatcgccctgagagagatcagaatgctgaagcagctgaagcaccccaacctggtgaacctgatcgaggtgttcagaagaaagagaaagatgcacctggtgttcgagtactgcgaccacaccctgctgaacgagctggagagaaaccccaacggcgtggccgacggcgtgatcaagagcgtgctgtggcagaccctgcaggccctgaacttctgccacatccacaactgcatccacagagacatcaagcccgagaacatcctgatcaccaagcagggcatcatcaagatctgcgacttcggcttcgcccagatcctgatccccggcgacgcctacaccgactacgtggccaccagatggtacagagcccccgagctgctggtgggcgacacccagtacggcagcagcgtggacatctgggccatcggctgcgtgttcgccgagctgctgaccggccagcccctgtggcccggcaagagcgacgtggaccagctgtacctgatcatcagaaccctgggcaagctgatccccagacaccagagcatcttcaagagcaacggcttcttccacggcatcagcatccccgagcccgaggacatggagaccctggaggagaagttcagcgacgtgcaccccgtggccctgaacttcatgaagggctgcctgaagatgaaccccgacgacagactgacctgcagccagctgctggagagcagctacttcgacagcttccaggaggcccagatcaagagaaaggccagaaacgagggcagaaacagaagaagacagcaggtgctgcccctgaagagctag

SEQ ID NO: 11083 - DNA, 948 bp, synthetic construct
  source 1..948: mol_type = other DNA; note = Synthetic coding sequence
atggccaacgaccccctggagggcttccacgaggtgaacctggccagccccaccagccccgacctgctgggcgtgtacgagagcggcacccaggagcagaccaccagccccagcgtgatctacagaccccaccccagcgccctgagcagcgtgcccatccaggccaacgccctggacgtgagcgagctgcccacccagcccgtgtacagcagccccagaagactgaactgcgccgagatcagcagcatcagcttccacgtgaccgaccccgccccctgcagcaccagcggcgtgaccgccggcctgaccaagctgaccaccagaaaggacaactacaacgccgagagagagttcctgcagggcgccaccatcaccgaggcctgcgacggcagcgacgacatcttcggcctgagcaccgacagcctgagcagactgagaagccccagcgtgctggaggtgagagagaagggctacgagagactgaaggaggagctggccaaggcccagagagagctgaagctgaaggacgaggagtgcgagagactgagcaaggtgagagaccagctgggccaggagctggaggagctgaccgccagcctgttcgaggaggcccacaagatggtgagagaggccaacatcaagcaggccaccgccgagaagcagctgaaggaggcccagggcaagatcgacgtgctgcaggccgaggtggccgccctgaagaccctggtgctgagcagcagccccaccagccccacccaggagcccctgcccggcggcaagacccccttcaagaagggccacaccagaaacaagagcaccagcagcgccatgagcggcagccaccaggacctgagcgtgatccagcccatcgtgaaggactgcaaggaggtgacccaccagggcctgagccccctgaccctgctgatcctggtgagcagccaccactag

SEQ ID NO: 11084 - DNA, 1074 bp, synthetic construct
  source 1..1074: mol_type = other DNA; note = Synthetic coding sequence
atggccagagagaacggcgagagcagcagcagctggaagaagcaggccgaggacatcaagaagatcttcgagttcaaggagaccctgggcaccggcgccttcagcgaggtggtgctggccgaggagaaggccaccggcaagctgttcgccgtgaagtgcatccccaagaaggccctgaagggcaaggagagcagcatcgagaacgagatcgccgtgctgagaaagatcaagcacgagaacatcgtggccctggaggacatctacgagagccccaaccacctgtacctggtgatgcagctggtgagcggcggcgagctgttcgacagaatcgtggagaagggcttctacaccgagaaggacgccagcaccctgatcagacaggtgctggacgccgtgtactacctgcacagaatgggcatcgtgcacagagacctgaagcccgagaacctgctgtactacagccaggacgaggagagcaagatcatgatcagcgacttcggcctgagcaagatggagggcaagggcgacgtgatgagcaccgcctgcggcacccccggctacgtggcccccgaggtgctggcccagaagccctacagcaaggccgtggactgctggagcatcggcgtgatcgcctacatcctgctgtgcggctacccccccttctacgacgagaacgacagcaagctgttcgagcagatcctgaaggccgagtacgagttcgacagcccctactgggacgacatcagcgacagcgccaaggacttcatcagaaacctgatggagaaggaccccaacaagagatacacctgcgagcaggccgccagacacccctggatcgccggcgacaccgccctgaacaagaacatccacgagagcgtgagcgcccagatcagaaagaacttcgccaagagcaagtggagacaggccttcaacgccaccgccgtggtgagacacatgagaaagctgcacctgggcagcagcctggacagcagcaacgccagcgtgagcagcagcctgagcctggccagccagaaggactgcgcctacgtggccaagcccgagagcctgagctag

SEQ ID NO: 11085 - DNA, 1158 bp, synthetic construct
  source 1..1158: mol_type = other DNA; note = Synthetic coding sequence
atggccagagagaacggcgagagcagcagcagctggaagaagcaggccgaggacatcaagaagatcttcgagttcaaggagaccctgggcaccggcgccttcagcgaggtggtgctggccgaggagaaggccaccggcaagctgttcgccgtgaagtgcatccccaagaaggccctgaagggcaaggagagcagcatcgagaacgagatcgccgtgctgagaaagatcaagcacgagaacatcgtggccctggaggacatctacgagagccccaaccacctgtacctggtgatgcagctggtgagcggcggcgagctgttcgacagaatcgtggagaagggcttctacaccgagaaggacgccagcaccctgatcagacaggtgctggacgccgtgtactacctgcacagaatgggcatcgtgcacagagacctgaagcccgagaacctgctgtactacagccaggacgaggagagcaagatcatgatcagcgacttcggcctgagcaagatggagggcaagggcgacgtgatgagcaccgcctgcggcacccccggctacgtggcccccgaggtgctggcccagaagccctacagcaaggccgtggactgctggagcatcggcgtgatcgcctacatcctgctgtgcggctacccccccttctacgacgagaacgacagcaagctgttcgagcagatcctgaaggccgagtacgagttcgacagcccctactgggacgacatcagcgacagcgccaaggacttcatcagaaacctgatggagaaggaccccaacaagagatacacctgcgagcaggccgccagacacccctggatcgccggcgacaccgccctgaacaagaacatccacgagagcgtgagcgcccagatcagaaagaacttcgccaagagcaagtggagacaggccttcaacgccaccgccgtggtgagacacatgagaaagctgcacctgggcagcagcctggacagcagcaacgccagcgtgagcagcagcctgagcctggccagccagaaggactgcctggcccccagcaccctgtgcagcttcatcagcagcagcagcggcgtgagcggcgtgggcgccgagagaagacccagacccaccaccgtgaccgccgtgcacagcggcagcaagtag

SEQ ID NO: 11086 - DNA, 888 bp, synthetic construct
  source 1..888: mol_type = other DNA; note = Synthetic coding sequence
atgaagaaggagcacgtgctgcactgccagttcagcgcctggtaccccttcttcagaggcgtgaccatcaagagcgtgatcctgcccctgccccagaacgtgaaggactacctgctggacgacggcaccctggtggtgagcggcagagacgacccccccacccacagccagcccgacagcgacgacgaggccgaggagatccagtggagcgacgacgagaacaccgccaccctgaccgcccccgagttccccgagttcgccaccaaggtgcaggaggccatcaacagcctgggcggcagcgtgttccccaagctgaactggagcgcccccagagacgcctactggatcgccatgaacagcagcctgaagtgcaagaccctgagcgacatcttcctgctgttcaagagcagcgacttcatcaccagagacttcacccagcccttcatccactgcaccgacgacagccccgacccctgcatcgagtacgagctggtgctgagaaagtggtgcgagctgatccccggcgccgagttcagatgcttcgtgaaggagaacaagctgatcgtggtgttcgacatctacagagacagcagaggcaaggtgtggctgatcgacttcaaccccttcggcgaggtgaccgacagcctgctgttcacctgggaggagctgatcagcgagaacaacctgaacggcgacttcagcgaggtggacgcccaggagcaggacagccccgccttcagatgcaccaacagcgaggtgaccgtgcagcccagcccctacctgagctacagactgcccaaggacttcgtggacctgagcaccggcgaggacgcccacaagctgatcgacttcctgaagctgaagagaaaccagcaggaggacgactag

SEQ ID NO: 11087 - DNA, 3273 bp, synthetic construct
  source 1..3273: mol_type = other DNA; note = Synthetic coding sequence
atggagcagcccaagggcgtggactggaccgtgatcatcctgacctgccagtacaaggacagcgtgcaggtgttccagagagagctggaggtgagacagaagagagagcagatccccgccggcaccctgctgctggccgtggaggaccccgagaagagagtgggcagcggcggcgccaccctgaacgccctgctggtggccgccgagcacctgagcgccagagccggcttcacctggatctgcgtgggcgtgagcctgtggatcagaggctgccacccccccggcagactgcccgaggccagcgtgcacagagccttccccctgctgcaggtggtgaccagcgacgtgctgcacagcgcctggatcctgatcctgcacatgggcagagacttccccttcgacgactgcggcagagccttcacctgcctgcccgtggagaaccccgaggcccccgtggaggccctggtgtgcaacctggactgcctgctggacatcatgacctacagactgggccccggcagcccccccggcgtgtgggtgtgcagcaccgacatgctgctgagcgtgcccgccaaccccggcatcagctgggacagcttcagaggcgccagagtgatcgccctgcccggcagccccgcctacgcccagaaccacggcgtgtacctgaccgacccccagggcctggtgctggacatctactaccagggcaccgaggccgagatccagagatgcgtgagacccgacggcagagtgcccctggtgagcggcgtggtgttcttcagcgtggagaccgccgagagactgctggccacccacgtgagcccccccctggacgcctgcacctacctgggcctggacagcggcgccagacccgtgcagctgagcctgttcttcgacatcctgcactgcatggccgagaacgtgaccagagaggacttcctggtgggcagaccccccgagctgggccagggcgacgccgacgtggccggctacctgcagagcgccagagcccagctgtggagagagctgagagaccagcccctgaccatggcctacgtgagcagcggcagctacagctacatgaccagcagcgccagcgagttcctgctgagcctgaccctgcccggcgcccccggcgcccagatcgtgcacagccaggtggaggagcagcagctgctggccgccggcagcagcgtggtgagctgcctgctggagggccccgtgcagctgggccccggcagcgtgctgcagcactgccacctgcagggccccatccacatcggcgccggctgcctggtgaccggcctggacaccgcccacagcaaggccctgcacggcagagagctgagagacctggtgctgcagggccaccacaccagactgcacggcagccccggccacgccttcaccctggtgggcagactggacagctgggagagacagggcgccggcacctacctgaacgtgccctggagcgagttcttcaagagaaccggcgtgagagcctgggacctgtgggaccccgagaccctgcccgccgagtactgcctgcccagcgccagactgttccccgtgctgcaccccagcagagagctgggcccccaggacctgctgtggatgctggaccaccaggaggacggcggcgaggccctgagagcctggagagccagctggagactgagctgggagcagctgcagccctgcctggacagagccgccaccctggccagcagaagagacctgttcttcagacaggccctgcacaaggccagacacgtgctggaggccagacaggacctgagcctgagacccctgatctgggccgccgtgagagagggctgccccggccccctgctggccaccctggaccaggtggccgccggcgccggcgaccccggcgtggccgccagagccctggcctgcgtggccgacgtgctgggctgcatggccgagggcagaggcggcctgagaagcggccccgccgccaaccccgagtggatgagacccttcagctacctggagtgcggcgacctggccgccggcgtggaggccctggcccaggagagagacaagtggctgagcagacccgccctgctggtgagagccgccagacactacgagggcgccggccagatcctgatcagacaggccgtgatgagcgcccagcacttcgtgagcaccgagcaggtggagctgcccggccccggccagtgggtggtggccgagtgccccgccagagtggacttcagcggcggctggagcgacaccccccccctggcctacgagctgggcggcgccgtgctgggcctggccgtgagagtggacggcagaagacccatcggcgccagagccagaagaatccccgagcccgagctgtggctggccgtgggccccagacaggacgagatgaccgtgaagatcgtgtgcagatgcctggccgacctgagagactactgccagccccacgcccccggcgccctgctgaaggccgccttcatctgcgccggcatcgtgcacgtgcacagcgagctgcagctgagcaccagcagcatcctggccggcaccgccctggccgccctgcagagagccgccggcagagtggtgggcaccgaggccctgatccacgccgtgctgcacctggagcaggtgctgaccaccggcggcggctggcaggaccaggtgggcggcctgatgcccggcatcaaggtgggcagaagcagagcccagctgcccctgaaggtggaggtggaggaggtgaccgtgcccgagggcttcgtgcagaagctgaacgaccacctgctgctggtgtacaccggcaagaccagactggccagaaacctgctgcaggacgtgctgagaagctggtacgccagactgcccgccgtggtgcagaacgcccacagcctggtgagacagaccgaggagtgcgccgagggcttcagacagggcagcctgcccctgctgggccagtgcctgaccagctactgggagcagaagaagctgatggcccccggctgcgagcccctgaccgtgagaagaatgatggacgtgctggccccccacgtgcacggccagagcctggccggcgccggcggcggcggcttcctgtacctgctgaccaaggagccccagcagaaggaggccctggaggccgtgctggccaagaccgagggcctgggcaactacagcatccacctggtggaggtggacacccagggcctgagcctgaagctgctgggcaccgaggccagcacctgctgccccttcccctag

SEQ ID NO: 11088 - DNA, 318 bp, synthetic construct
  source 1..318: mol_type = other DNA; note = Synthetic coding sequence
atgctggagctggcccaggacagactgcagttcgagaccgtggaggtgagcgagcccagcatgctgcagaagatcctgaccaccagaagaagagagaccggcggcaacgagcccctgcccgtgcccaccctgcagcaccacctggccccccccgccgaggccagaaaggtgcccagcgccagccaggtgcaggccatcaagtgcttcctgagcaagtgctggagcctgaacatcagcaccaaggagtacgcctacctgaagggcaccgtgctgttcaaccccggcaagggcaaggagaacgactgcaaccaccactag

SEQ ID NO: 11089 - DNA, 1413 bp, synthetic construct
  source 1..1413: mol_type = other DNA; note = Synthetic coding sequence
atggccggcgagaaccaccagtggcagggcagcatcctgtacaacatgctgatgagcgccaagcagaccagagccgcccccgaggcccccgagaccagactggtggaccagtgctggggctgcagctgcggcgacgagcccggcgtgggcagagagggcctgctgggcggcagaaacgtggccctgctgtacagatgctgcttctgcggcaaggaccaccccagacagggcagcatcctgtacagcatgctgaccagcgccaagcagacctacgccgcccccaaggcccccgaggccaccctgggcccctgctggggctgcagctgcggcagcgaccccggcgtgggcagagccggcctgcccggcggcagacccgtggccctgctgtacagatgctgcttctgcggcgaggaccaccccagacagggcagcatcctgtacagcctgctgaccagcagcaagcagacccacgtggcccccgccgcccccgaggccagacccggcggcgcctggtgggacagaagctacttcgcccagagacccggcggcaaggaggccctgcccggcggcagagccaccgccctgctgtacagatgctgcttctgcggcgaggaccacccccagcagggcagcaccctgtactgcgtgcccaccagcaccaaccaggcccaggccgcccccgaggagagacccagagccccctggtgggacaccagcagcggcgccctgagacccgtggccctgaagagcccccaggtggtgtgcgaggccgccagcgccggcctgctgaagaccctgagattcgtgaagtacctgccctgcttccaggtgctgcccctggaccagcagctggtgctggtgagaaactgctgggccagcctgctgatgctggagctggcccaggacagactgcagttcgagaccgtggaggtgagcgagcccagcatgctgcagaagatcctgaccaccagaagaagagagaccggcggcaacgagcccctgcccgtgcccaccctgcagcaccacctggccccccccgccgaggccagaaaggtgcccagcgccagccaggtgcaggccatcaagtgcttcctgagcaagtgctggagcctgaacatcagcaccaaggagtacgcctacctgaagggcaccgtgctgttcaaccccgacgtgcccggcctgcagtgcgtgaagtacatccagggcctgcagtggggcacccagcagatcctgagcgagcacaccagaatgacccaccagggcccccacgacagattcatcgagctgaacagcaccctgttcctgctgagattcatcaacgccaacgtgatcgccgagctgttcttcagacccatcatcggcaccgtgagcatggacgacatgatgctggagatgctgtgcaccaagatctag

SEQ ID NO: 11090 - DNA, 2028 bp, synthetic construct
  source 1..2028: mol_type = other DNA; note = Synthetic coding sequence
atgctgagagccaccgccccctgctggttcccccccggctaccccgaggccaagaaggtggccgaggaggccgccctggaggccagcagacacctgggcggcgagcagagccaggccggcgcccccgagggcagcaagatgctgagagccaccgccccctgctggttcagacccggctaccccgaggccaagaaggtggccaaggaggccgcccccgaggccagcagacacctgggcgccgagcagagccccgccggcgcccccgagggcagcaagatgctgagagccaccgccccctgctggttcccccccggctaccccgaggccaagaaggtggccgaggaggccgccctggaggcccccgagttccccctgcccagccaccagcccgcccagagcttcggcctgtgggtgccccagatgcacaagcaggccagcgccttcgtggacatccaggccgagccccagaacagaggccccgccgtgccccccgcctggcccaagatggtgaccgagagctgctacttccccgcccagagaggcagcgcctgcagactgcccgccgcccccagactgaccgagagacccagcggcgtgagaatcagcgcccccagaaagagaaagaccatcgcccacagcagcagcccctgcctggtgaccggctacaccgacgccaagagaaccagagtggccagcagcagccagagaagcagaggcagcaaggtgggcagacagcccggcaagaccagaaacagaagcggcatggcctgcaagaccaccgccaccaccagcagcaagagaatcgtgagaagagccagcctgcccagcctgagcctgaagaagcccatcatcctgagaagcagcggctgccaggtgcccaccgtgctgagaagaggctacctgcagctgttcaccgaggagtgcctgaagttctgcgccagcaagcaggaggccgaggagaaggccctgaacgaggagaaggtggcctacgactgcagccccaacaagaacagatacctgaacgtggtgctgaacaccctgaagagactgaagggcctgacccccagcagcatgcccggcctgagcagagccgccctgtacagcagactgcaggagttcctgctgacccaggaccagctgaaggagaacggctaccccttcccccaccccgagagacccggcggcgccgtgctgttcaccggccagggcaagggccccggcgacagcagctgcagagtgtgctgcagatgcggcaccgagtacctggtgagcagcagcggcagatgcgtgagagaccagctgtgctactaccactggggcagagtgagaagcagccaggtggccggcggcagagtgagccagtacacctgctgcgccgccgcccccggcagcgtgggctgccaggtggccaagcagcacgtgagagacggcagaaaggagagcctggacggcttcgtggagaccttcaagaaggagctgagcagagacgcctaccccggcatctacgccctggactgcgagatgtgctacaccacccacggcctggagctgaccagagtgaccgtggtggacgccgacatgagagtggtgtacgacaccttcgtgaagcccgacaacgagatcgtggactacaacaccagattcagcggcgtgaccgaggccgacgtggccaagaccagcatcaccctgccccaggtgcaggccatcctgctgagcttcttcagcgcccagaccatcctgatcggccacagcctggagagcgacctgctggccctgaagctgatccacagcaccgtggtggacaccgccgtgctgttcccccactacctgggcttcccctacaagagaagcctgagaaacctggccgccgactacctggcccagatcatccaggacagccaggacggccacaacagcagcgaggacgccagcgcctgcctgcagctggtgatgtggaaggtgagacagagagcccagatccagcccagacacagaagcgccagccccgccgccctggcctgcccctag

SEQ ID NO: 11091 - DNA, 711 bp, synthetic construct
  source 1..711: mol_type = other DNA; note = Synthetic coding sequence
atgcacaccacccagaaggacaccacctacaccaagatcttcgtgggcggcctgccctaccacaccaccgacgccagcctgagaaagtacttcgaggtgttcggcgagatcgaggaggccgtggtgatcaccgacagacagaccggcaagagcagaggctacggcttcgtgaccatggccgacagagccgccgccgagagagcctgcaaggaccccaaccccatcatcgacggcagaaaggccaacgtgaacctggcctacctgggcgccaagcccagaatcatgcagcccggcttcgccttcggcgtgcagcagctgcaccccgccctgatccagagacccttcggcatccccgcccactacgtgtacccccaggccttcgtgcagcccggcgtggtgatcccccacgtgcagcccaccgccgccgccgccagcaccaccccctacatcgactacaccggcgccgcctacgcccagtacagcgccgccgccgccgccgccgccgccgccgccgcctacgaccagtacccctacgccgccagccccgccgccgccggctacgtgaccgccggcggctacggctacgccgtgcagcagcccatcaccgccgccgcccccggcaccgccgccgccgccgccgccgccgccgccgccgccgccgccttcggccagtaccagccccagcagctgcagaccgacagaatgcagtag

SEQ ID NO: 11092 - DNA, 4389 bp, synthetic construct
  source 1..4389: mol_type = other DNA; note = Synthetic coding sequence
atggcccccgtgcacggcgacgacagcctgagcgacagcggcagcttcgtgagcagcagagccagaagagagaagaagagcaagaagggcagacaggaggccctggagagactgaagaaggccaaggccggcgagaagtacaagtacgaggtggaggacttcaccggcgtgtacgaggaggtggacgaggagcagtacagcaagctggtgcaggccagacaggacgacgactggatcgtggacgacgacggcatcggctacgtggaggacggcagagagatcttcgacgacgacctggaggacgacgccctggacgccgacgagaagggcaaggacggcaaggccagaaacaaggacaagagaaacgtgaagaagctggccgtgaccaagcccaacaacatcaagagcatgttcatcgcctgcgccggcaagaagaccgccgacaaggccgtggacctgagcaaggacggcctgctgggcgacatcctgcaggacctgaacaccgagaccccccagatcacccccccccccgtgatgatcctgaagaagaagagaagcatcggcgccagccccaaccccttcagcgtgcacaccgccaccgccgtgcccagcggcaagatcgccagccccgtgagcagaaaggagccccccctgacccccgtgcccctgaagagagccgagttcgccggcgacgacgtgcaggtggagagcaccgaggaggagcaggagagcggcgccatggagttcgaggacggcgacttcgacgagcccatggaggtggaggaggtggacctggagcccatggccgccaaggcctgggacaaggagagcgagcccgccgaggaggtgaagcaggaggccgacagcggcaagggcaccgtgagctacctgggcagcttcctgcccgacgtgagctgctgggacatcgaccaggagggcgacagcagcttcagcgtgcaggaggtgcaggtggacagcagccacctgcccctggtgaagggcgccgacgaggagcaggtgttccacttctactggctggacgcctacgaggaccagtacaaccagcccggcgtggtgttcctgttcggcaaggtgtggatcgagagcgccgagacccacgtgagctgctgcgtgatggtgaagaacatcgagagaaccctgtacttcctgcccagagagatgaagatcgacctgaacaccggcaaggagaccggcacccccatcagcatgaaggacgtgtacgaggagttcgacgagaagatcgccaccaagtacaagatcatgaagttcaagagcaagcccgtggagaagaactacgccttcgagatccccgacgtgcccgagaagagcgagtacctggaggtgaagtacagcgccgagatgccccagctgccccaggacctgaagggcgagaccttcagccacgtgttcggcaccaacaccagcagcctggagctgttcctgatgaacagaaagatcaagggcccctgctggctggaggtgaagagcccccagctgctgaaccagcccgtgagctggtgcaaggtggaggccatggccctgaagcccgacctggtgaacgtgatcaaggacgtgagccccccccccctggtggtgatggccttcagcatgaagaccatgcagaacgccaagaaccaccagaacgagatcatcgccatggccgccctggtgcaccacagcttcgccctggacaaggccgcccccaagccccccttccagagccacttctgcgtggtgagcaagcccaaggactgcatcttcccctacgccttcaaggaggtgatcgagaagaagaacgtgaaggtggaggtggccgccaccgagagaaccctgctgggcttcttcctggccaaggtgcacaagatcgaccccgacatcatcgtgggccacaacatctacggcttcgagctggaggtgctgctgcagagaatcaacgtgtgcaaggccccccactggagcaagatcggcagactgaagagaagcaacatgcccaagctgggcggcagaagcggcttcggcgagagaaacgccacctgcggcagaatgatctgcgacgtggagatcagcgccaaggagctgatcagatgcaagagctaccacctgagcgagctggtgcagcagatcctgaagaccgagagagtggtgatccccatggagaacatccagaacatgtacagcgagagcagccagctgctgtacctgctggagcacacctggaaggacgccaagttcatcctgcagatcatgtgcgagctgaacgtgctgcccctggccctgcagatcaccaacatcgccggcaacatcatgagcagaaccctgatgggcggcagaagcgagagaaacgagttcctgctgctgcacgccttctacgagaacaactacatcgtgcccgacaagcagatcttcagaaagccccagcagaagctgggcgacgaggacgaggagatcgacggcgacaccaacaagtacaagaagggcagaaagaaggccgcctacgccggcggcctggtgctggaccccaaggtgggcttctacgacaagttcatcctgctgctggacttcaacagcctgtaccccagcatcatccaggagttcaacatctgcttcaccaccgtgcagagagtggccagcgaggcccagaaggtgaccgaggacggcgagcaggagcagatccccgagctgcccgaccccagcctggagatgggcatcctgcccagagagatcagaaagctggtggagagaagaaagcaggtgaagcagctgatgaagcagcaggacctgaaccccgacctgatcctgcagtacgacatcagacagaaggccctgaagctgaccgccaacagcatgtacggctgcctgggcttcagctacagcagattctacgccaagcccctggccgccctggtgacctacaagggcagagagatcctgatgcacaccaaggagatggtgcagaagatgaacctggaggtgatctacggcgacaccgacagcatcatgatcaacaccaacagcaccaacctggaggaggtgttcaagctgggcaacaaggtgaagagcgaggtgaacaagctgtacaagctgctggagatcgacatcgacggcgtgttcaagagcctgctgctgctgaagaagaagaagtacgccgccctggtggtggagcccaccagcgacggcaactacgtgaccaagcaggagctgaagggcctggacatcgtgagaagagactggtgcgacctggccaaggacaccggcaacttcgtgatcggccagatcctgagcgaccagagcagagacaccatcgtggagaacatccagaagagactgatcgagatcggcgagaacgtgctgaacggcagcgtgcccgtgagccagttcgagatcaacaaggccctgaccaaggacccccaggactaccccgacaagaagagcctgccccacgtgcacgtggccctgtggatcaacagccagggcggcagaaaggtgaaggccggcgacaccgtgagctacgtgatctgccaggacggcagcaacctgaccgccagccagagagcctacgcccccgagcagctgcagaagcaggacaacctgaccatcgacacccagtactacctggcccagcagatccaccccgtggtggccagaatctgcgagcccatcgacggcatcgacgccgtgctgatcgccacctggctgggcctggaccccacccagttcagagtgcaccactaccacaaggacgaggagaacgacgccctgctgggcggccccgcccagctgaccgacgaggagaagtacagagactgcgagagattcaagtgcccctgccccacctgcggcaccgagaacatctacgacaacgtgttcgacggcagcggcaccgacatggagcccagcctgtacagatgcagcaacatcgactgcaaggccagccccctgaccttcaccgtgcagctgagcaacaagctgatcatggacatcagaagattcatcaagaagtactacgacggctggctgatctgcgaggagcccacctgcagaaacagaaccagacacctgcccctgcagttcagcagaaccggccccctgtgccccgcctgcatgaaggccaccctgcagcccgagtacagcgacaagagcctgtacacccagctgtgcttctacagatacatcttcgacgccgagtgcgccctggagaagctgaccaccgaccacgagaaggacaagctgaagaagcagttcttcacccccaaggtgctgcaggactacagaaagctgaagaacaccgccgagcagttcctgagcagaagcggctacagcgaggtgaacctgagcaagctgttcgccggctgcgccgtgaagagctag

SEQ ID NO: 11093 - DNA, 2673 bp, synthetic construct
  source 1..2673: mol_type = other DNA; note = Synthetic coding sequence
atgagcgccaacaacagcccccccagcgcccagaagagcgtgctgcccaccgccatccccgccgtgctgcccgccgccagcccctgcagcagccccaagaccggcctgagcgccagactgagcaacggcagcttcagcgcccccagcctgaccaacagcagaggcagcgtgcacaccgtgagcttcctgctgcagatcggcctgaccagagagagcgtgaccatcgaggcccaggagctgagcctgagcgccgtgaaggacctggtgtgcagcatcgtgtaccagaagttccccgagtgcggcttcttcggcatgtacgacaagatcctgctgttcagacacgacatgaacagcgagaacatcctgcagctgatcaccagcgccgacgagatccacgagggcgacctggtggaggtggtgctgagcgccctggccaccgtggaggacttccagatcagaccccacaccctgtacgtgcacagctacaaggcccccaccttctgcgactactgcggcgagatgctgtggggcctggtgagacagggcctgaagtgcgagggctgcggcctgaactaccacaagagatgcgccttcaagatccccaacaactgcagcggcgtgagaaagagaagactgagcaacgtgagcctgcccggccccggcctgagcgtgcccagacccctgcagcccgagtacgtggccctgcccagcgaggagagccacgtgcaccaggagcccagcaagagaatccccagctggagcggcagacccatctggatggagaagatggtgatgtgcagagtgaaggtgccccacaccttcgccgtgcacagctacaccagacccaccatctgccagtactgcaagagactgctgaagggcctgttcagacagggcatgcagtgcaaggactgcaagttcaactgccacaagagatgcgccagcaaggtgcccagagactgcctgggcgaggtgaccttcaacggcgagcccagcagcctgggcaccgacaccgacatccccatggacatcgacaacaacgacatcaacagcgacagcagcagaggcctggacgacaccgaggagcccagcccccccgaggacaagatgttcttcctggaccccagcgacctggacgtggagagagacgaggaggccgtgaagaccatcagccccagcaccagcaacaacatccccctgatgagagtggtgcagagcatcaagcacaccaagagaaagagcagcaccatggtgaaggagggctggatggtgcactacaccagcagagacaacctgagaaagagacactactggagactggacagcaagtgcctgaccctgttccagaacgagagcggcagcaagtactacaaggagatccccctgagcgagatcctgagaatcagcagccccagagacttcaccaacatcagccagggcagcaacccccactgcttcgagatcatcaccgacaccatggtgtacttcgtgggcgagaacaacggcgacagcagccacaaccccgtgctggccgccaccggcgtgggcctggacgtggcccagagctgggagaaggccatcagacaggccctgatgcccgtgaccccccaggccagcgtgtgcaccagccccggccagggcaaggaccacaaggacctgagcaccagcatcagcgtgagcaactgccagatccaggagaacgtggacatcagcaccgtgtaccagatcttcgccgacgaggtgctgggcagcggccagttcggcatcgtgtacggcggcaagcacagaaagaccggcagagacgtggccatcaaggtgatcgacaagatgagattccccaccaagcaggagagccagctgagaaacgaggtggccatcctgcagaacctgcaccaccccggcatcgtgaacctggagtgcatgttcgagacccccgagagagtgttcgtggtgatggagaagctgcacggcgacatgctggagatgatcctgagcagcgagaagagcagactgcccgagagaatcaccaagttcatggtgacccagatcctggtggccctgagaaacctgcacttcaagaacatcgtgcactgcgacctgaagcccgagaacgtgctgctggccagcgccgagcccttcccccaggtgaagctgtgcgacttcggcttcgccagaatcatcggcgagaagagcttcagaagaagcgtggtgggcacccccgcctacctggcccccgaggtgctgagaagcaagggctacaacagaagcctggacatgtggagcgtgggcgtgatcatctacgtgagcctgagcggcaccttccccttcaacgaggacgaggacatcaacgaccagatccagaacgccgccttcatgtacccccccaacccctggagagagatcagcggcgaggccatcgacctgatcaacaacctgctgcaggtgaagatgagaaagagatacagcgtggacaagagcctgagccacccctggctgcaggactaccagacctggctggacctgagagagttcgagaccagaatcggcgagagatacatcacccacgagagcgacgacgccagatgggagatccacgcctacacccacaacctggtgtaccccaagcacttcatcatggcccccaaccccgacgacatggaggaggacccctag

SEQ ID NO: 11094 - DNA, 4407 bp, synthetic construct
  source 1..4407: mol_type = other DNA; note = Synthetic coding sequence
atggcccccgtgcacggcgacgactgcgagatcggcgccagcgccctgagcgacagcggcagcttcgtgagcagcagagccagaagagagaagaagagcaagaagggcagacaggaggccctggagagactgaagaaggccaaggccggcgagaagtacaagtacgaggtggaggacttcaccggcgtgtacgaggaggtggacgaggagcagtacagcaagctggtgcaggccagacaggacgacgactggatcgtggacgacgacggcatcggctacgtggaggacggcagagagatcttcgacgacgacctggaggacgacgccctggacgccgacgagaagggcaaggacggcaaggccagaaacaaggacaagagaaacgtgaagaagctggccgtgaccaagcccaacaacatcaagagcatgttcatcgcctgcgccggcaagaagaccgccgacaaggccgtggacctgagcaaggacggcctgctgggcgacatcctgcaggacctgaacaccgagaccccccagatcacccccccccccgtgatgatcctgaagaagaagagaagcatcggcgccagccccaaccccttcagcgtgcacaccgccaccgccgtgcccagcggcaagatcgccagccccgtgagcagaaaggagccccccctgacccccgtgcccctgaagagagccgagttcgccggcgacgacgtgcaggtggagagcaccgaggaggagcaggagagcggcgccatggagttcgaggacggcgacttcgacgagcccatggaggtggaggaggtggacctggagcccatggccgccaaggcctgggacaaggagagcgagcccgccgaggaggtgaagcaggaggccgacagcggcaagggcaccgtgagctacctgggcagcttcctgcccgacgtgagctgctgggacatcgaccaggagggcgacagcagcttcagcgtgcaggaggtgcaggtggacagcagccacctgcccctggtgaagggcgccgacgaggagcaggtgttccacttctactggctggacgcctacgaggaccagtacaaccagcccggcgtggtgttcctgttcggcaaggtgtggatcgagagcgccgagacccacgtgagctgctgcgtgatggtgaagaacatcgagagaaccctgtacttcctgcccagagagatgaagatcgacctgaacaccggcaaggagaccggcacccccatcagcatgaaggacgtgtacgaggagttcgacgagaagatcgccaccaagtacaagatcatgaagttcaagagcaagcccgtggagaagaactacgccttcgagatccccgacgtgcccgagaagagcgagtacctggaggtgaagtacagcgccgagatgccccagctgccccaggacctgaagggcgagaccttcagccacgtgttcggcaccaacaccagcagcctggagctgttcctgatgaacagaaagatcaagggcccctgctggctggaggtgaagagcccccagctgctgaaccagcccgtgagctggtgcaaggtggaggccatggccctgaagcccgacctggtgaacgtgatcaaggacgtgagccccccccccctggtggtgatggccttcagcatgaagaccatgcagaacgccaagaaccaccagaacgagatcatcgccatggccgccctggtgcaccacagcttcgccctggacaaggccgcccccaagccccccttccagagccacttctgcgtggtgagcaagcccaaggactgcatcttcccctacgccttcaaggaggtgatcgagaagaagaacgtgaaggtggaggtggccgccaccgagagaaccctgctgggcttcttcctggccaaggtgcacaagatcgaccccgacatcatcgtgggccacaacatctacggcttcgagctggaggtgctgctgcagagaatcaacgtgtgcaaggccccccactggagcaagatcggcagactgaagagaagcaacatgcccaagctgggcggcagaagcggcttcggcgagagaaacgccacctgcggcagaatgatctgcgacgtggagatcagcgccaaggagctgatcagatgcaagagctaccacctgagcgagctggtgcagcagatcctgaagaccgagagagtggtgatccccatggagaacatccagaacatgtacagcgagagcagccagctgctgtacctgctggagcacacctggaaggacgccaagttcatcctgcagatcatgtgcgagctgaacgtgctgcccctggccctgcagatcaccaacatcgccggcaacatcatgagcagaaccctgatgggcggcagaagcgagagaaacgagttcctgctgctgcacgccttctacgagaacaactacatcgtgcccgacaagcagatcttcagaaagccccagcagaagctgggcgacgaggacgaggagatcgacggcgacaccaacaagtacaagaagggcagaaagaaggccgcctacgccggcggcctggtgctggaccccaaggtgggcttctacgacaagttcatcctgctgctggacttcaacagcctgtaccccagcatcatccaggagttcaacatctgcttcaccaccgtgcagagagtggccagcgaggcccagaaggtgaccgaggacggcgagcaggagcagatccccgagctgcccgaccccagcctggagatgggcatcctgcccagagagatcagaaagctggtggagagaagaaagcaggtgaagcagctgatgaagcagcaggacctgaaccccgacctgatcctgcagtacgacatcagacagaaggccctgaagctgaccgccaacagcatgtacggctgcctgggcttcagctacagcagattctacgccaagcccctggccgccctggtgacctacaagggcagagagatcctgatgcacaccaaggagatggtgcagaagatgaacctggaggtgatctacggcgacaccgacagcatcatgatcaacaccaacagcaccaacctggaggaggtgttcaagctgggcaacaaggtgaagagcgaggtgaacaagctgtacaagctgctggagatcgacatcgacggcgtgttcaagagcctgctgctgctgaagaagaagaagtacgccgccctggtggtggagcccaccagcgacggcaactacgtgaccaagcaggagctgaagggcctggacatcgtgagaagagactggtgcgacctggccaaggacaccggcaacttcgtgatcggccagatcctgagcgaccagagcagagacaccatcgtggagaacatccagaagagactgatcgagatcggcgagaacgtgctgaacggcagcgtgcccgtgagccagttcgagatcaacaaggccctgaccaaggacccccaggactaccccgacaagaagagcctgccccacgtgcacgtggccctgtggatcaacagccagggcggcagaaaggtgaaggccggcgacaccgtgagctacgtgatctgccaggacggcagcaacctgaccgccagccagagagcctacgcccccgagcagctgcagaagcaggacaacctgaccatcgacacccagtactacctggcccagcagatccaccccgtggtggccagaatctgcgagcccatcgacggcatcgacgccgtgctgatcgccacctggctgggcctggaccccacccagttcagagtgcaccactaccacaaggacgaggagaacgacgccctgctgggcggccccgcccagctgaccgacgaggagaagtacagagactgcgagagattcaagtgcccctgccccacctgcggcaccgagaacatctacgacaacgtgttcgacggcagcggcaccgacatggagcccagcctgtacagatgcagcaacatcgactgcaaggccagccccctgaccttcaccgtgcagctgagcaacaagctgatcatggacatcagaagattcatcaagaagtactacgacggctggctgatctgcgaggagcccacctgcagaaacagaaccagacacctgcccctgcagttcagcagaaccggccccctgtgccccgcctgcatgaaggccaccctgcagcccgagtacagcgacaagagcctgtacacccagctgtgcttctacagatacatcttcgacgccgagtgcgccctggagaagctgaccaccgaccacgagaaggacaagctgaagaagcagttcttcacccccaaggtgctgcaggactacagaaagctgaagaacaccgccgagcagttcctgagcagaagcggctacagcgaggtgaacctgagcaagctgttcgccggctgcgccgtgaagagctag

SEQ ID NO: 11095 - DNA, 399 bp, synthetic construct
  source 1..399: mol_type = other DNA; note = Synthetic coding sequence
atggtggagcccttcctgggcacctggaagctggtgagcagcgagaacttcgaggactacatgaaggagctgggcgtgaacttcgccgccagaaacatggccggcctggtgaagcccaccgtgaccatcagcgtggacggcaagatgatgaccatcagaaccgagagcagcttccaggacaccaagatcagcttcaagctgggcgaggagttcgacgagaccaccgccgacaacagaaaggtgaagagcaccatcaccctggagaacggcagcatgatccacgtgcagaagtggctgggcaaggagaccaccatcaagagaaagatcgtggacgagaagatggtggtggagtgcaagatgaacaacatcgtgagcaccagaatctacgagaaggtgtag

SEQ ID NO: 11096 - DNA, 555 bp, synthetic construct
  source 1..555: mol_type = other DNA; note = Synthetic coding sequence
atggacagaggcgagcagggcctgctgagaaccgaccccgtgcccgaggagggcgaggacgtggccgccaccatcagcgccaccgagaccctgagcgaggaggagcaggaggagctgagaagagagctggccaaggtggaggaggagatccagaccctgagccaggtgctggccgccaaggagaagcacctggccgagatcaagagaaagctgggcatcaacagcctgcaggagctgaagcagaacatcgccaagggctggcaggacgtgaccgccaccagcgcctacaagaagaccagcgagaccctgagccaggccggccagaaggccagcgccgccttcagcagcgtgggcagcgtgatcaccaagaagctggaggacgtgaagaacagccccaccttcaagagcttcgaggagaaggtggagaacctgaagagcaaggtgggcggcaccaagcccgccggcggcgacttcggcgaggtgctgaacagcgccgccaacgccagcgccaccaccaccgagcccctgcccgagaagacccaggagagcctgtag

SEQ ID NO: 11097 - DNA, 675 bp, synthetic construct
  source 1..675: mol_type = other DNA; note = Synthetic coding sequence
atggactgcagagagatggacctgtacgaggactaccagagccccttcgacttcgacgccggcgtgaacaagagctacctgtacctgagccccagcggcaacagcagcccccccggcagccccaccctgcagaagttcggcctgctgagaaccgaccccgtgcccgaggagggcgaggacgtggccgccaccatcagcgccaccgagaccctgagcgaggaggagcaggaggagctgagaagagagctggccaaggtggaggaggagatccagaccctgagccaggtgctggccgccaaggagaagcacctggccgagatcaagagaaagctgggcatcaacagcctgcaggagctgaagcagaacatcgccaagggctggcaggacgtgaccgccaccagcgcctacaagaagaccagcgagaccctgagccaggccggccagaaggccagcgccgccttcagcagcgtgggcagcgtgatcaccaagaagctggaggacgtgaagaacagccccaccttcaagagcttcgaggagaaggtggagaacctgaagagcaaggtgggcggcaccaagcccgccggcggcgacttcggcgaggtgctgaacagcgccgccaacgccagcgccaccaccaccgagcccctgcccgagaagacccaggagagcctgtag

SEQ ID NO: 11098 - DNA, 285 bp, synthetic construct
  source 1..285: mol_type = other DNA; note = Synthetic coding sequence
cccagagccgccagaagcagaggccccgccgtgagcagacccagagcccccagacccgagctgaccaccgaggccggcgagcccgccagaagatgcgtgcccccctacgagcacagacccggcatgcagtgcgccgtgaccacccccccccccagctactacccctaccccaacctgagatgggacaccagccacttcaagaagagcggcggcccccagagaaacaactacgtgatccaccccgagttcgtgagcgagacctaccccgactacagatgctggtag

SEQ ID NO: 11099 - DNA, 1110 bp, synthetic construct
  source 1..1110: mol_type = other DNA; note = Synthetic coding sequence
atgcccgtggtgaccaccgacgccgagagcgagaccggcatccccaagagcctgagcaacgagccccccagcgagaccatggaggagatcgagcacacctgcccccagcccagactgaccctgaccgcccccgcccccttcgccgacgagaccaactgccagtgccaggccccccacgagaagctgaccatcgcccaggccagactgggcacccccgccgacagacccgtgagagtgtacgccgacggcatcttcgacctgttccacagcggccacgccagagccctgatgcaggccaagaccctgttccccaacagctacctgctggtgggcgtgtgcagcgacgacctgacccacaagttcaagggcttcaccgtgatgaacgaggccgagagatacgaggccctgagacactgcagatacgtggacgaggtgatcagagacgccccctggaccctgacccccgagttcctggagaagcacaagatcgacttcgtggcccacgacgacatcccctacagcagcgccggcagcgacgacgtgtacaagcacatcaaggaggccggcatgttcgtgcccacccagagaaccgagggcatcagcaccagcgacatcatcaccagaatcgtgagagactacgacgtgtacgccagaagaaacctgcagagaggctacaccgccaaggagctgaacgtgagcttcatcaacgagaagagatacagattccagaaccaggtggacaagatgaaggagaaggtgaagaacgtggaggagagaagcaaggagttcgtgaacagagtggaggagaagagccacgacctgatccagaagtgggaggagaagagcagagagttcatcggcaacttcctggagctgttcggccccgacggcgcctggaagcagatgttccaggagagaagcagcagaatgctgcaggccctgagccccaagcagagccccgtgagcagccccaccagaagcagaagccccagcagaagccccagccccaccttcagctggctgcccctgaagaccagcccccccagcagccccaaggccgccagcgccagcatcagcagcatgagcgagggcgacgaggacgagaagtag

SEQ ID NO: 11100 - DNA, 1056 bp, synthetic construct
  source 1..1056: mol_type = other DNA; note = Synthetic coding sequence
atggtgggccaccaggagtgcatcatggaggaggacaacagagccccccagctgtggagaaagaccctgaccgcccccgcccccttcgccgacgagaccaactgccagtgccaggccccccacgagaagctgaccatcgcccaggccagactgggcacccccgccgacagacccgtgagagtgtacgccgacggcatcttcgacctgttccacagcggccacgccagagccctgatgcaggccaagaccctgttccccaacagctacctgctggtgggcgtgtgcagcgacgacctgacccacaagttcaagggcttcaccgtgatgaacgaggccgagagatacgaggccctgagacactgcagatacgtggacgaggtgatcagagacgccccctggaccctgacccccgagttcctggagaagcacaagatcgacttcgtggcccacgacgacatcccctacagcagcgccggcagcgacgacgtgtacaagcacatcaaggaggccggcatgttcgtgcccacccagagaaccgagggcatcagcaccagcgacatcatcaccagaatcgtgagagactacgacgtgtacgccagaagaaacctgcagagaggctacaccgccaaggagctgaacgtgagcttcatcaacgagaagagatacagattccagaaccaggtggacaagatgaaggagaaggtgaagaacgtggaggagagaagcaaggagttcgtgaacagagtggaggagaagagccacgacctgatccagaagtgggaggagaagagcagagagttcatcggcaacttcctggagctgttcggccccgacggcgcctggaagcagatgttccaggagagaagcagcagaatgctgcaggccctgagccccaagcagagccccgtgagcagccccaccagaagcagaagccccagcagaagccccagccccaccttcagctggctgcccctgaagaccagcccccccagcagccccaaggccgccagcgccagcatcagcagcatgagcgagggcgacgaggacgagaagtag

SEQ ID NO: 11101 - DNA, 600 bp, synthetic construct
  source 1..600: mol_type = other DNA; note = Synthetic coding sequence
atggccgacaagagcaagttcatcgagtacatcgacgaggccctggagaagagcaaggagaccgccctgagccacctgttcttcacctaccagggcatcccctaccccatcaccatgtgcaccagcgagaccttccaggccctggacaccttcgaggccagacacgacgacatcgtgctggccagctaccccaagtgcggcagcaactggatcctgcacatcgtgagcgagctgatctacgccgtgagcaagaagaagtacaagtaccccgagttccccgtgctggagtgcggcgacagcgagaagtaccagaacctggccgccggcatcaagcagatcgccgagttcctgggcttcttcctgaccggcgagcagatccagaccatcagcgtgcagagcaccttccaggccatgagagccaagagccaggacacccacggcgccgtgggccccttcctgttcagaaagggcgaggtgggcgactggaagaacctgttcagcgagatccagaaccaggagatggacgagaagttcaaggagtgcctggccggcaccagcctgggcgccaagctgaagtacgagagctactgccagggctag

SEQ ID NO: 11102 - DNA, 1527 bp, synthetic construct
  source 1..1527: mol_type = other DNA; note = Synthetic coding sequence
atgagatgccccaagagcgccgtgaccatgagaaacgaggagctgctgctgagcaacggcaccgccaacaagatgaacggcgccctggaccacagcgaccagcccgaccccgacgccatcaagatgttcgtgggccagatccccagaagctggagcgagaaggagctgaaggagctgttcgagccctacggcgccgtgtaccagatcaacgtgctgagagacagaagccagaaccccccccagagcaagggctgctgcttcgtgaccttctacaccagaaaggccgccctggaggcccagaacgccctgcacaacatcaagaccctgcccggcatgcaccaccccatccagatgaagcccgccgacagcgagaagagcaacgccgtggaggacagaaagctgttcatcggcatggtgagcaagaagtgcaacgagaacgacatcagagtgatgttcagccccttcggccagatcgaggagtgcagaatcctgagaggccccgacggcctgagcagaggctgcgccttcgtgaccttcagcaccagagccatggcccagaacgccatcaaggccatgcaccagagccagaccatggagggctgcagcagccccatcgtggtgaagttcgccgacacccagaaggacaaggagcagagaagactgcagcagcagctggcccagcagatgcagcagctgaacaccgccacctggggcaacctgaccggcctgggcggcctgaccccccagtacctggccctgctgcagcaggccaccagcagcagcaacctgggcgccttcagcggcatccagcagatggccggcatgaacgccctgcagctgcagaacctggccaccctggccgccgccgccgccgccgcccagaccagcgccaccagcaccaacgccaaccccctgagcaccaccagcagcgccctgggcgccctgaccagccccgtggccgccagcacccccaacagcaccgccggcgccgccatgaacagcctgaccagcctgggcaccctgcagggcctggccggcgccaccgtgggcctgaacaacatcaacgccctggccggcatggccgccctgaacggcggcctgggcgccaccggcctgaccaacggcaccgccggcaccatggacgccctgacccaggcctacagcggcatccagcagtacgccgccgccgccctgcccaccctgtacagccagagcctgctgcagcagcagagcgccgccggcagccagaaggagggccccgagggcgccaacctgttcatctaccacctgccccaggagttcggcgaccaggacatcctgcagatgttcatgcccttcggcaacgtgatcagcgccaaggtgttcatcgacaagcagaccaacctgagcaagtgcttcggcttcgtgagctacgacaaccccgtgagcgcccaggccgccatccaggccatgaacggcttccagatcggcatgaagagactgaaggtgcagctgaagagaagcaagaacgacagcaagccctactag

SEQ ID NO: 11103 - DNA, 1215 bp, synthetic construct
  source 1..1215: mol_type = other DNA; note = Synthetic coding sequence
atgggcagcagccaggaggagggcctgagatgccagcccagccagcccgaccacgacgccgacggccactgcggccccgacctggagggcgccgagagagccagcgccacccccggcccccccggcctgctgaacagccacagacccgccgacagcgacgacaccaacgccgccggccccagcgccgccctgctggagggcctgctgctgggcggcggcaagcccagcccccacagcaccagacccggccccttcttctacatcggcggcagcaacggcgccaccatcatcagcagctactgcaagagcaagggctggcagagaatccacgacagcagaagagacgactacaccctgaagtggtgcgaggtgaagagcagagacagctacggcagcttcagagagggcgagcagctgctgtaccagctgcccaacaacaagctgctgaccaccaagatcggcctgctgagcaccctgagaggcagagccagagccatgagcaaggccagcaaggtgcccggcggcgtgcaggccagactggagaaggacgccgccgcccccgccctggaggacctgccctggaccagccccggctacctgagaccccagagagtgctgagaatggaggagttcttccccgagacctacagactggacctgaagcacgagagagaggccttcttcaccctgttcgacgagacccagatctggatctgcaagcccaccgccagcaaccagggcaagggcatcttcctgctgagaaaccaggaggaggtggccgccctgcaggccaagaccagaagcatggaggacgaccccatccaccacaagacccccttcagaggcccccaggccagagtggtgcagagatacatccagaaccccctgctggtggacggcagaaagttcgacgtgagaagctacctgctgatcgcctgcaccaccccctacatgatcttcttcggccacggctacgccagactgaccctgagcctgtacgacccccacagcagcgacctgggcggccacctgaccaaccagttcatgcagaagaagagccccctgtacatgctgctgaaggagcacaccgtgtggagcatggagcacctgaacagatacatcagcgacaccttctggaaggccagaggcctggccaaggactgggtgttcaccaccctgaaggtgagacccctgtgcccccccgtgtgggagtag

SEQ ID NO: 11104 - DNA, 2022 bp, synthetic construct
  source 1..2022: mol_type = other DNA; note = Synthetic coding sequence
atggaccacagctgcaccagattcatccacagaagaggcccccccaccagaaccagagccggcttcaagagaggcaagagacccagaatccagcagagacccagagccagagtgagcggcaccatccccgccagcagactgcaccccgcccccgccagccagcccggcccctgccccgcccccggccactgccccgtgggccccgcccacgagagacccatgggcagcagccaggaggagggcctgagatgccagcccagccagcccgaccacgacgccgacggccactgcggccccgacctggagggcgccgagagagccagcgccacccccggcccccccggcctgctgaacagccacagacccgccgacagcgacgacaccaacgccgccggccccagcgccgccctgctggagggcctgctgctgggcggcggcaagcccagcccccacagcaccagacccggccccttcttctacatcggcggcagcaacggcgccaccatcatcagcagctactgcaagagcaagggctggcagagaatccacgacagcagaagagacgactacaccctgaagtggtgcgaggtgaagagcagagacagctacggcagcttcagagagggcgagcagctgctgtaccagctgcccaacaacaagctgctgaccaccaagatcggcctgctgagcaccctgagaggcagagccagagccatgagcaaggccagcaaggtgcccggcggcgtgcaggccagactggagaaggacgccgccgcccccgccctggaggacctgccctggaccagccccggctacctgagaccccagagagtgctgagaatggaggagttcttccccgagacctacagactggacctgaagcacgagagagaggccttcttcaccctgttcgacgagacccagatctggatctgcaagcccaccgccagcaaccagggcaagggcatcttcctgctgagaaaccaggaggaggtggccgccctgcaggccaagaccagaagcatggaggacgaccccatccaccacaagacccccttcagaggcccccaggccagagtggtgcagagatacatccagaaccccctgctggtggacggcagaaagttcgacgtgagaagctacctgctgatcgcctgcaccaccccctacatgatcttcttcggccacggctacgccagactgaccctgagcctgtacgacccccacagcagcgacctgggcggccacctgaccaaccagttcatgcagaagaagagccccctgtacatgctgctgaaggagcacaccgtgtggagcatggagcacctgaacagatacatcagcgacaccttctggaaggccagaggcctggccaaggactgggtgttcaccaccctgaagaagagaatgcagcagatcatggcccactgcttcctggccgccaagcccaagctggactgcaagctgggctacttcgacctgatcggctgcgacttcctgatcgacgacaacttcaaggtgtggctgctggagatgaacagcaaccccgccctgcacaccaactgcgaggtgctgaaggaggtgatccccggcgtggtgatcgagaccctggacctggtgctggagaccttcagaaagagcctgagaggccagaagatgctgcccctgctgagccagagaagattcgtgctgctgcacaacggcgaggccgaccccagaccccacctgggcggcagctgcagcctgagaagatggccccccctgcccaccagacaggccaagagcagcggcccccccatgccccacgcccccgaccagcccggcgccagaagacccgcccccccccccctggtgccccagagacccagaccccccggccccgacctggacagcgcccacgacggcgagccccaggcccccggcaccgagcagagcggcaccggcaacagacaccccgcccaggagcccagccccggcaccgccaaggaggagagagaggagcccgagaacgccagaccctag

SEQ ID NO: 11105 - DNA, 2022 bp, synthetic construct; identical to SEQ ID NO: 11104
  source 1..2022: mol_type = other DNA; note = Synthetic coding sequence

SEQ ID NO: 11106 - DNA, 393 bp, synthetic construct
  source 1..393: mol_type = other DNA; note = Synthetic coding sequence
atgaccgaggacagccagagaaacttcagaagcgtgtactacgagaaggtgggcttcagaggcgtggaggagaagaagagcctggagatcctgctgaaggacgacagactggacaccgagaagctgtgcaccttcagccagagattccccctgcccagcatgtacagagccctggtgtggaaggtgctgctgggcatcctgcccccccaccacgagagccacgccaaggtgatgatgtacagaaaggagcagtacctggacgtgctgcacgccctgaaggtggtgagattcgtgagcgacgccaccccccaggccgaggtgtacctgagaatgtaccagctggagagcggcaagctgcccagaagccccagcttccccctggagcccgactag

SEQ ID NO: 11107 - DNA, 882 bp, synthetic construct; identical to SEQ ID NO: 10415
  source 1..882: mol_type = other DNA; note = Synthetic coding sequence

SEQ ID NO: 11108 - DNA, 801 bp, synthetic construct
  source 1..801: mol_type = other DNA; note = Synthetic coding sequence
atgaccgaggacagccagagaaacttcagaagcgtgtactacgagaaggtgggcttcagaggcgtggaggagaagaagagcctggagatcctgctgaaggacgacagactgggcatcctgcccccccaccacgagagccacgccaaggtgatgatgtacagaaaggagcagtacctggacgtgctgcacgccctgaaggtggtgagattcgtgagcgacgccaccccccaggccgaggtgtacctgagaatgtaccagctggagagcggcaagctgcccagaagccccagcttccccctggagcccgacgacgaggtgttcctggccatcgccaaggccatggaggagatggtggaggacagcgtggactgctactggatcaccagaagattcgtgaaccagctgaacaccaagtacagagacagcctgccccagctgcccaaggccttcgagcagtacctgaacctggaggacggcagactgctgacccacctgagaatgtgcagcgccgcccccaagctgccctacgacctgtggttcaagagatgcttcgccggctgcctgcccgagagcagcctgcagagagtgtgggacaaggtggtgagcggcagctgcaagatcctggtgttcgtggccgtggagatcctgctgaccttcaagatcaaggtgatggccctgaacagcgccgagaagatcaccaagttcctggagaacatcccccaggacagcagcgacgccatcgtgagcaaggccatcgacctgtggcacaagcactgcggcacccccgtgcacagcagctag

SEQ ID NO: 11109 - DNA, 3672 bp, synthetic construct
  source 1..3672: mol_type = other DNA; note = Synthetic coding sequence
atgatgagcctgagcgtgagaccccagagaagactgctgagcgccagagtgaacagaagccagagcttcgccggcgtgctgggcagccacgagagaggccccagcctgagcttcagaagcttccccgtgttcagcccccccggcccccccagaaagccccccgccctgagcagagtgagcagaatgttcagcgtggcccaccccgccgccaaggtgccccagcccgagagactggacctggtgtacaccgccctgaagagaggcctgaccgcctacctggaggtgcaccagcaggagcaggagaagctgcagggccagatcagagagagcaagagaaacagcagactgggcttcctgtacgacctggacaagcaggtgaagagcatcgagagattcctgagaagactggagttccacgccagcaagatcgacgagctgtacgaggcctactgcgtgcagagaagactgagagacggcgcctacaacatggtgagagcctacaccaccggcagccccggcagcagagaggccagagacagcctggccgaggccaccagaggccacagagagtacaccgagagcatgtgcctgctggagagcgagctggaggcccagctgggcgagttccacctgagaatgaagggcctggccggcttcgccagactgtgcgtgggcgaccagtacgagatctgcatgaagtacggcagacagagatggaagctgagaggcagaatcgagggcagcggcaagcaggtgtgggacagcgaggagaccatcttcctgcccctgctgaccgagttcctgagcatcaaggtgaccgagctgaagggcctggccaaccacgtggtggtgggcagcgtgagctgcgagaccaaggacctgttcgccgccctgccccaggtggtggccgtggacatcaacgacctgggcaccatcaagctgagcctggaggtgacctggagccccttcgacaaggacgaccagcccagcgccgccagcagcgtgaacaaggccagcaccgtgaccaagagattcagcacctacagccagagcccccccgacacccccagcctgagagagcaggccttctacaacatgctgagaagacaggaggagctggagaacggcaccgcctggagcctgagcagcgagagcagcgacgacagcagcagcccccagctgagcggcaccgccagacacagccccgcccccagacccctggtgcagcagcccgagcccctgcccatccaggtggccttcagaagacccgagacccccagcagcggccccctggacgaggagggcgccgtggcccccgtgctggccaacggccacgccccctacagcagaaccctgagccacatcagcgaggccagcgtggacgccgccctggccgaggccagcgtggaggccgtgggccccgagagcctggcctggggccccagcccccccacccaccccgcccccacccacggcgagcaccccagccccgtgccccccgccctggaccccggccacagcgccaccagcagcaccctgggcaccaccggcagcgtgcccaccagcaccgaccccgcccccagcgcccacctggacagcgtgcacaagagcaccgacagcggccccagcgagctgcccggccccacccacaccaccaccggcagcacctacagcgccatcaccaccacccacagcgcccccagccccctgacccacaccaccaccggcagcacccacaagcccatcatcagcaccctgaccaccaccggccccaccctgaacatcatcggccccgtgcagaccaccaccagccccacccacaccatgcccagccccacccacaccaccgccagccccacccacaccagcaccagccccacccacacccccaccagccccacccacaagaccagcatgagcccccccaccaccaccagccccacccccagcggcatgggcctggtgcagaccgccaccagccccacccaccccaccaccagccccacccaccccaccaccagccccatcctgatcaacgtgagccccagcaccagcctggagctggccaccctgagcagccccagcaagcacagcgaccccaccctgcccggcaccgacagcctgccctgcagcccccccgtgagcaacagctacacccaggccgaccccatggcccccagaaccccccaccccagccccgcccacagcagcagaaagcccctgaccagccccgcccccgaccccagcgagagcaccgtgcagagcctgagccccacccccagcccccccacccccgccccccagcacagcgacctgtgcctggccatggccgtgcagacccccgtgcccaccgccgccggcggcagcggcgacagaagcctggaggaggccctgggcgccctgatggccgccctggacgactacagaggccagttccccgagctgcagggcctggagcaggaggtgaccagactggagagcctgctgatgcagagacagggcctgaccagaagcagagccagcagcctgagcatcaccgtggagcacgccctggagagcttcagcttcctgaacgaggacgaggacgaggacaacgacgtgcccggcgacagaccccccagcagccccgaggccggcgccgaggacagcatcgacagccccagcgccagacccctgagcaccggctgccccgccctggacgccgccctggtgagacacctgtaccactgcagcagactgctgctgaagctgggcaccttcggccccctgagatgccaggaggcctgggccctggagagactgctgagagaggccagagtgctggaggccgtgtgcgagttcagcagaagatgggagatccccgccagcagcgcccaggaggtggtgcagttcagcgccagcagacccggcttcctgaccttctgggaccagtgcaccgagagactgagctgcttcctgtgccccgtggagagagtgctgctgaccttctgcaaccagtacggcgccagactgagcctgagacagcccggcctggccgaggccgtgtgcgtgaagttcctggaggacgccctgggccagaagctgcccagaagaccccagcccggccccggcgagcagctgaccgtgttccagttctggagcttcgtggagaccctggacagccccaccatggaggcctacgtgaccgagaccgccgaggaggtgctgctggtgagaaacctgaacagcgacgaccaggccgtggtgctgaaggccctgagactggcccccgagggcagactgagaagagacggcctgagagccctgagcagcctgctggtgcacggcaacaacaaggtgatggccgccgtgagcacccagctgagaagcctgagcctgggccccaccttcagagagagagccctgctgtgcttcctggaccagctggaggacgaggacgtgcagaccagagtggccggctgcctggccctgggctgcatcaaggcccccgagggcatcgagcccctggtgtacctgtgccagaccgacaccgaggccgtgagagaggccgccagacagagcctgcagcagtgcggcgaggagggccagagcgcccacagaagactggaggagagcctggacgccctgcccagaatcttcggccccggcagcatggccagcaccgccttctag

SEQ ID NO: 11110 - DNA, 123 bp, synthetic construct
  source 1..123: mol_type = other DNA; note = Synthetic coding sequence
atggccgacgaggagctggaggccctgagaagacagagactggccgagctgcaggccaagcacggcgaccccggcgacgccgcccagcaggaggccaagcacagcagcaccgaggagaagtag

SEQ ID NO: 11111 - DNA, 414 bp, synthetic construct
  source 1..414: mol_type = other DNA; note = Synthetic coding sequence
atgaagccccccgccgcccagggcagccccgccgccgccgccgccgccgcccccgccctggacagcgccgccgccgaggacctgagcgacgccctgtgcgagttcgacgccgtgctggccgacttcgccagccccttccacgagagacacttccactacgaggagcacctggagagaatgaagagaagaagcagcgccagcgtgagcgacagcagcggcttcagcgacagcgagagcgccgacagcctgtacagaaacagcttcagcttcagcgacgagaagctgaacagccccaccgacagcacccccgccctgctgagcgccaccgtgaccccccagaaggccaagctgggcgacaccaaggagctggaggccttcatcgccgacctggacaagaccctggccagcatgtag

SEQ ID NO: 11112 - DNA, 1593 bp, synthetic construct
  source 1..1593: mol_type = other DNA; note = Synthetic coding sequence
atgcccaacgtgctgctgccccccaaggagagcaacctgttcaagagaatcctgaagtgctacgagcagaagcagtacaagaacggcctgaagttctgcaagatgatcctgagcaaccccaagttcgccgagcacggcgagaccctggccatgaagggcctgaccctgaactgcctgggcaagaaggaggaggcctacgagttcgtgagaaagggcctgagaaacgacgtgaagagccacgtgtgctggcacgtgtacggcctgctgcagagaagcgacaagaagtacgacgaggccatcaagtgctacagaaacgccctgaagctggacaaggacaacctgcagatcctgagagacctgagcctgctgcagatccagatgagagacctggagggctacagagagaccagataccagctgctgcagctgagacccacccagagagccagctggatcggctacgccatcgcctaccacctgctgaaggactacgacatggccctgaagctgctggaggagttcagacagacccagcaggtgccccccaacaagatcgactacgagtacagcgagctgatcctgtaccagaaccaggtgatgagagaggccgacctgctgcaggagagcctggagcacatcgagatgtacgagaagcagatctgcgacaagctgctggtggaggagatcaagggcgagatcctgctgaagctgggcagactgaaggaggccagcgaggtgttcaagaacctgatcgacagaaacgccgagaactggtgctactacgagggcctggagaaggccctgcagatcagcaccctggaggagagactgcagatctacgaggagatcagcaagcagcaccccaaggccatcacccccagaagactgcccctgaccctggtgcccggcgagagattcagagagctgatggacaagttcctgagagtgaacttcagcaagggctgcccccccctgttcaccaccctgaagagcctgtactacaacaccgagaaggtgagcatcatccaggagctggtgaccaactacgaggccagcctgaagacctgcgacttcttcagcccctacgagaacggcgagaaggagccccccaccaccctgctgtgggtgcagtacttcctggcccagcacttcgacaagctgggccagtacagcctggccctggactacatcaacgccgccatcgccagcacccccaccctgatcgagctgttctacatgaaggccaagatctacaagcacatcggcaacctgaaggaggccgccaagtggatggacgaggcccagagcctggacaccgccgacagattcatcaacagcaagtgcgccaagtacatgctgagagccaacatgatcaaggaggccgaggagatgtgcagcaagttcaccagagagggcaccagcgccatggagaacctgaacgagatgcagtgcatgtggttccagaccgagtgcatcagcgcctaccagagactgggcagatacggcgacgccctgaagaagtgccacgaggtggagagacacagccccagcacctggaccaccggcggcaaggagccccagatgcacccctag

SEQ ID NO: 11113 - DNA, 2595 bp, synthetic construct
  source 1..2595: mol_type = other DNA; note = Synthetic coding sequence
atgcccaacgtgctgctgccccccaaggagagcaacctgttcaagagaatcctgaagtgctacgagcagaagcagtacaagaacggcctgaagttctgcaagatgatcctgagcaaccccaagttcgccgagcacggcgagaccctggccatgaagggcctgaccctgaactgcctgggcaagaaggaggaggcctacgagttcgtgagaaagggcctgagaaacgacgtgaagagccacgtgtgctggcacgtgtacggcctgctgcagagaagcgacaagaagtacgacgaggccatcaagtgctacagaaacgccctgaagctggacaaggacaacctgcagatcctgagagacctgagcctgctgcagatccagatgagagacctggagggctacagagagaccagataccagctgctgcagctgagacccacccagagagccagctggatcggctacgccatcgcctaccacctgctgaaggactacgacatggccctgaagctgctggaggagttcagacagacccagcaggtgccccccaacaagatcgactacgagtacagcgagctgatcctgtaccagaaccaggtgatgagagaggccgacctgctgcaggagagcctggagcacatcgagatgtacgagaagcagatctgcgacaagctgctggtggaggagatcaagggcgagatcctgctgaagctgggcagactgaaggaggccagcgaggtgttcaagaacctgatcgacagaaacgccgagaactggtgctactacgagggcctggagaaggccctgcagatcagcaccctggaggagagactgcagatctacgaggagatcagcaagcagcaccccaaggccatcacccccagaagactgcccctgaccctggtgcccggcgagagattcagagagctgatggacaagttcctgagagtgaacttcagcaagggctgcccccccctgttcaccaccctgaagagcctgtactacaacaccgagaaggtgagcatcatccaggagctggtgaccaactacgaggccagcctgaagacctgcgacttcttcagcccctacgagaacggcgagaaggagccccccaccaccctgctgtgggtgcagtacttcctggcccagcacttcgacaagctgggccagtacagcctggccctggactacatcaacgccgccatcgccagcacccccaccctgatcgagctgttctacatgaaggccaagatctacaagcacatcggcaacctgaaggaggccgccaagtggatggacgaggcccagagcctggacaccgccgacagattcatcaacagcaagtgcgccaagtacatgctgagagccaacatgatcaaggaggccgaggagatgtgcagcaagttcaccagagagggcaccagcgccatggagaacctgaacgagatgcagtgcatgtggttccagaccgagtgcatcagcgcctaccagagactgggcagatacggcgacgccctgaagaagtgccacgaggtggagagacacttcttcgagatcaccgacgaccagttcgacttccacacctactgcatgagaaagatgaccctgagagcctacgtggacctgctgagactggaggacatcctgagaagacacgccttctacttcaaggccgccagaagcgccatcgagatctacctgaagctgtacgacaaccccctgaccaacgagagcaagcagcaggagatcaacagcgagaacctgagcgccaaggagctgaagaagatgctgagcaagcagagaagagcccagaagaaggccaagctggaggaggagagaaagcacgccgagagagagagacagcagaagaaccagaagaagaagagagacgaggaggaggaggaggccagcggcctgaaggaggagctgatccccgagaagctggagagagtggagaaccccctggaggaggccgtgaagttcctgatccccctgaagaacctggtggccgacaacatcgacacccacctgctggccttcgagatctacttcagaaagggcaagttcctgctgatgctgcagagcgtgaagagagccttcgccatcaacagcaacaacccctggctgcacgagtgcctgatcagattcagcaagagcgtgagcaaccacagcaacctgcccgacatcgtgagcaaggtgctgagccaggagatgcagaagatcttcgtgaagaaggacctggagagcttcaacgaggacttcctgaagagaaacgccaccagcctgcagcacctgctgagcggcgccaagatgatgtacttcctggacaagagcagacaggagaaggccatcgccatcgccaccagactggacgagaccatcaaggacaaggacgtgaagaccctgatcaaggtgagcgaggccctgctggacggcagcttcggcaactgcagcagccagtacgaggagtacagaatggcctgccacaacctgctgcccttcaccagcgccttcctgcccgccgtgaacgaggtggacaaccccaacgtggccctgaaccacaccgccaactacgacgtgctggccaacgagatctag

SEQ ID NO: 11114 - DNA, 1668 bp, synthetic construct; identical to SEQ ID NO: 9775
  source 1..1668: mol_type = other DNA; note = Synthetic coding sequence

SEQ ID NO: 11115 - DNA, 630 bp, synthetic construct
  source 1..630: mol_type = other DNA; note = Synthetic coding sequence
atggcccccgtgggcgtggagaagaagctgctgctgggccccaacggccccgccgtggccgccgccggcgacctgaccagcgaggaggaggagggccagagcctgtggagcagcatcctgagcgaggtgagcaccagagccagaagcaagctgcccagcggcaagaacatcctggtgttcggcgaggacggcagcggcaagaccaccctgatgaccaagctgcagggcgccgagcacggcaagaagggcagaggcctggagtacctgtacctgagcgtgcacgacgaggacagagacgaccacaccagatgcaacgtgtggatcctggacggcgacctgtaccacaagggcctgctgaagttcgccgtgagcgccgagagcctgcccgagaccctggtgatcttcgtggccgacatgagcagaccctggaccgtgatggagagcctgcagaagtgggccagcgtgctgagagagcacatcgacaagatgaagatcccccccgagaagatgagagagctggagagaaagttcgtgaaggacttccaggactacatggagcccgaggagggctgccaggagggccccctgagcaacagagtggagcagatgagacccagaaaccactggtag

SEQ ID NO: 11116 - DNA, 858 bp, synthetic construct
  source 1..858: mol_type = other DNA; note = Synthetic coding sequence
aactggaacctggccagctggaaccccagcaaccccgagtgcctgctgctggtggtgaaggagctggtgcagcagtaccaccagttccagtgcagcagactgagagagagcagcagactgatgttcgagtaccagaccctgctggaggagccccagtacggcgagaacatggagatctacgccggcaagaagaacaactggaccggcgagttcagcgccagattcctgctgaagctgcccgtggacttcagcaacatccccacctacctgctgaaggacgtgaacgaggaccccggcgaggacgtggccctgctgagcgtgagcttcgaggacaccgaggccacccaggtgtaccccaagctgtacctgagccccagaatcgagcacgccctgggcggcagcagcgccctgcacatccccgccttccccggcggcggctgcctgatcgactacgtgccccaggtgtgccacctgctgaccaacaaggtgcagtacgtgatccagggctaccacaagagaagagagtacatcgccgccttcctgagccacttcggcaccggcgtggtggagtacgacgccgagggcttcaccaagctgaccctgctgctgatgtggaaggacttctgcttcctggtgcacatcgacctgcccctgttcttccccagagaccagcccaccctgaccttccagagcgtgtaccacttcaccaacagcggccagctgtacagccaggcccagaagaactacccctacagccccagatgggacggcaacgagatggccaagagagccaaggcctacttcaagaccttcgtgccccagttccaggaggccgccttcgccaacggcaagctgtag

SEQ ID NO: 11117 - DNA, 1152 bp, synthetic construct; identical to SEQ ID NO: 10250
  source 1..1152: mol_type = other DNA; note = Synthetic coding sequence

SEQ ID NO: 11118 - DNA, 1131 bp, synthetic construct; identical to SEQ ID NO: 10569
  source 1..1131: mol_type = other DNA; note = Synthetic coding sequence

SEQ ID NO: 11119 - DNA, 312 bp, synthetic construct
  source 1..312: mol_type = other DNA; note = Synthetic coding sequence
atgatcagagccttccccaccaccacccccagaagcctgcacctgttcaccagcagcaccttcctggccagagccctgcccggcgccttccccaccggcgcctgcgaggagagactgagcgtgcccgagagcacccccttcaccgccgtgctgaagttcgccgccgaggagttcaaggtgcccgccgccaccagcgccatcatcaccaacgacggcatcggcatcaaccccgcccagaccgccggcaacgtgttcctgaagcacggcagcgagctgagaatcatccccagagacagagtgggcagctgctag

SEQ ID NO: 11120 - DNA, 1968 bp, synthetic construct
  source 1..1968: mol_type = other DNA; note = Synthetic coding sequence
atggccacccccgtggtgaccaagaccgcctggaagctgcaggagatcgtggcccacgccagcaacgtgagcagcctggtgctgggcaaggccagcggcagactgctggccaccggcggcgacgactgcagagtgaacctgtggagcatcaacaagcccaactgcatcatgagcctgaccggccacaccagccccgtggagagcgtgagactgaacacccccgaggagctgatcgtggccggcagccagagcggcagcatcagagtgtgggacctggaggccgccaagatcctgagaaccctgatgggccacaaggccaacatctgcagcctggacttccacccctacggcgagttcgtggccagcggcagccaggacaccaacatcaagctgtgggacatcagaagaaagggctgcgtgttcagatacagaggccacagccaggccgtgagatgcctgagattcagccccgacggcaagtggctggccagcgccgccgacgaccacaccgtgaagctgtgggacctgaccgccggcaagatgatgagcgagttccccggccacaccggccccgtgaacgtggtggagttccaccccaacgagtacctgctggccagcggcagcagcgacagaaccatcagattctgggacctggagaagttccaggtggtgagctgcatcgagggcgagcccggccccgtgagaagcgtgctgttcaaccccgacggctgctgcctgtacagcggctgccaggacagcctgagagtgtacggctgggagcccgagagatgcttcgacgtggtgctggtgaactggggcaaggtggccgacctggccatctgcaacgaccagctgatcggcgtggccttcagccagagcaacgtgagcagctacgtggtggacctgaccagagtgaccagaaccggcaccgtggccagagaccccgtgcaggaccacagacccctggcccagcccctgcccaaccccagcgcccccctgagaagaatctacgagagacccagcaccacctgcagcaagccccagagagtgaagcagaacagcgagagcgagagaagaagccccagcagcgaggacgacagagacgagagagagagcagagccgagatccagaacgccgaggactacaacgagatcttccagcccaagaacagcatcagcagaaccccccccagaagaagcgagcccttccccgccccccccgaggacgacgccgccaccgccaaggaggccgccaagcccagccccgccatggacgtgcagttccccgtgcccaacctggaggtgctgcccagaccccccgtggtggccagcacccccgcccccaaggccgagcccgccatcatccccgccaccagaaacgagcccatcggcctgaaggccagcgacttcctgcccgccgtgaagatcccccagcaggccgagctggtggacgaggacgccatgagccagatcagaaagggccacgacaccatgtgcgtggtgctgaccagcagacacaagaacctggacaccgtgagagccgtgtggaccatgggcgacatcaagaccagcgtggacagcgccgtggccatcaacgacctgagcgtggtggtggacctgctgaacatcgtgaaccagaaggccagcctgtggaagctggacctgtgcaccaccgtgctgccccagatcgagaagctgctgcagagcaagtacgagagctacgtgcagaccggctgcaccagcctgaagctgatcctgcagagattcctgcccctgatcaccgacatgctggccgccccccccagcgtgggcgtggacatcagcagagaggagagactgcacaagtgcagactgtgctacaagcagctgaagagcatcagcggcctggtgaagagcaagagcggcctgagcggcagacacggcagcaccttcagagagctgcacctgctgatggccagcctggactag

SEQ ID NO: 11121 - DNA, 165 bp, synthetic construct
  source 1..165: mol_type = other DNA; note = Synthetic coding sequence
atgttcctgagcgccgtgttcttcgccaagagcaagagcaacgagaccaagagccccctgagaggcaaggagaagaacaccctgcccctgaacggcggcctgaagatgaccctgatctacaaggagaagaccgagggcggcgacaccgacagcgagatcctgtag

SEQ ID NO: 11122 - DNA, 2457 bp, synthetic construct
  source 1..2457: mol_type = other DNA; note = Synthetic coding sequence
atgaagaagcagttcaacagaatgagacagctggccaaccagaccgtgggcagagccgagaagaccgaggtgctgagcgaggacctgctgcaggtggagaagagactggagctggtgaagcaggtgagccacagcacccacaagaagctgaccgcctgcctgcagggccagcagggcgccgaggccgacaagagaagcaagaagctgcccctgaccaccctggcccagtgcctgatggagggcagcgccatcctgggcgacgacaccctgctgggcaagatgctgaagctgtgcggcgagaccgaggacaagctggcccaggagctgatccacttcgagctgcaggtggagagagacgtgatcgagcccctgttcctgctggccgaggtggagatccccaacatccagaagcagagaaagcacctggccaagctggtgctggacatggacagcagcagaaccagatggcagcagaccagcaagagcagcggcctgagcagcagcctgcagcccgccggcgccaaggccgacgccctgagagaggagatggaggaggccgccaacagagtggagatctgcagagaccagctgagcgccgacatgtacagcttcgtggccaaggagatcgactacgccaactacttccagaccctgatcgaggtgcaggccgagtaccacagaaagagcctgaccctgctgcaggccgtgctgccccagatcaaggcccagcaggaggcctgggtggagaagcccagcttcggcaagcccctggaggagcacctgaccatcagcggcagagagatcgccttccccatcgaggcctgcgtgaccatgctgctggagtgcggcatgcaggaggagggcctgttcagagtggcccccagcgccagcaagctgaagaagctgaaggccgccctggactgctgcgtggtggacgtgcaggagtacagcgccgacccccacgccatcgccggcgccctgaagagctacctgagagagctgcccgagcccctgatgaccttcgagctgtacgacgagtggatccaggccagcaacgtgcaggagcaggacaagaagctgcaggccctgtggaacgcctgcgagaagctgcccaaggccaaccacaacaacatcagatacctgatcaagttcctgagcaagctgagcgagtaccaggacgtgaacaagatgacccccagcaacatggccatcgtgctgggccccaacctgctgtggccccaggccgagggcaacatcaccgagatgatgaccaccgtgagcctgcagatcgtgggcatcatcgagcccatcatccagcacgccgactggttcttccccggcgagatcgagttcaacatcaccggcaactacggcagccccgtgcacgtgaaccacaacgccaactacagcagcatgcccagccccgacatggaccccgccgacagaagacagcccgagcaggccagaagacccctgagcgtggccaccgacaacatgatgctggagttctacaagaaggacggcctgagaaagatccagagcatgggcgtgagagtgatggacaccaactgggtggccagaagaggcagcagcgccggcagaaaggtgagctgcgccccccccagcatgcagccccccgccccccccgccgagctggccgcccccctgcccagccccctgcccgagcagcccctggacagccccgccgcccccgccctgagccccagcggcctgggcctgcagcccggccccgagagaaccagcaccaccaagagcaaggagctgagccccggcagcgcccagaagggcagccccggcagcagccagggcaccgcctgcgccggcacccagcccggcgcccagcccggcgcccagcccggcgccagccccagccccagccagccccccgccgaccagagcccccacaccctgagaaaggtgagcaagaagctggcccccatcccccccaaggtgcccttcggccagcccggcgccatggccgaccagagcgccggccagcccagccccgtgagcctgagccccaccccccccagcacccccagcccctacggcctgagctacccccagggctacagcctggccagcggccagctgagccccgccgccgccccccccctggccagccccagcgtgttcaccagcaccctgagcaagagcagacccacccccaagcccagacagagacccaccctgccccccccccagccccccaccgtgaacctgagcgccagcagcccccagagcaccgaggcccccatgctggacggcatgagccccggcgagagcatgagcaccgacctggtgcacttcgacatccccagcatccacatcgagctgggcagcaccctgagactgagccccctggagcacatgagaagacacagcgtgaccgacaagagagacagcgaggaggagagcgagagcaccgccctgtag

SEQ ID NO: 11123 - DNA, 1014 bp, synthetic construct
  source 1..1014: mol_type = other DNA; note = Synthetic coding sequence
atgaccaacaacagcggcagcaaggccgagctggtggtgggcggcaagtacaagctggtgagaaagatcggcagcggcagcttcggcgacgtgtacctgggcatcaccaccaccaacggcgaggacgtggccgtgaagctggagagccagaaggtgaagcacccccagctgctgtacgagagcaagctgtacaccatcctgcagggcggcgtgggcatcccccacatgcactggtacggccaggagaaggacaacaacgtgctggtgatggacctgctgggccccagcctggaggacctgttcaacttctgcagcagaagattcaccatgaagaccgtgctgatgctggccgaccagatgatcagcagaatcgagtacgtgcacaccaagaacttcctgcacagagacatcaagcccgacaacttcctgatgggcaccggcagacactgcaacaagctgttcctgatcgacttcggcctggccaagaagtacagagacaacagaaccagacagcacatcccctacagagaggacaagcacctgatcggcaccgtgagatacgccagcatcaacgcccacctgggcatcgagcagagcagaagagacgacatggagagcctgggctacgtgttcatgtacttcaacagaaccagcctgccctggcagggcctgagagccatgaccaagaagcagaagtacgagaagatcagcgagaagaagatgagcacccccgtggaggtgctgtgcaagggcttccccgccgagttcgccatgtacctgaactactgcagaggcctgagattcgaggaggtgcccgactacatgtacctgagacagctgttcagaatcctgttcagaaccctgaaccaccagtacgactacaccttcgactggaccatgctgaagcagaaggccgcccagcaggccgccagcagcagcggccagggccagcaggcccagacccagaccggcaagcagaccgagaagaacaagaacaacgtgaaggacaactag

SEQ ID NO: 11124 - DNA, 1608 bp, synthetic construct
  source 1..1608: mol_type = other DNA; note = Synthetic coding sequence
atgagcgagggcgagagccagaccgtgctgagcagcggcagcgaccccaaggtggagagcagcagcagcgcccccggcctgaccagcgtgagcccccccgtgaccagcaccaccagcgccgccagccccgaggaggaggaggagagcgaggacgagagcgagatcctggaggagagcccctgcggcagatggcagaagagaagagaggaggtgaaccagagaaacgtgcccggcatcgacagcgcctacctggccatggacaccgaggagggcgtggaggtggtgtggaacgaggtgcagttcagcgagagaaagaactacaagctgcaggaggagaaggtgagagccgtgttcgacaacctgatccagctggagcacctgaacatcgtgaagttccacaagtactgggccgacatcaaggagaacaaggccagagtgatcttcatcaccgagtacatgagcagcggcagcctgaagcagttcctgaagaagaccaagaagaaccacaagaccatgaacgagaaggcctggaagagatggtgcacccagatcctgagcgccctgagctacctgcacagctgcgacccccccatcatccacggcaacctgacctgcgacaccatcttcatccagcacaacggcctgatcaagatcggcagcgtggcccccgacaccatcaacaaccacgtgaagacctgcagagaggagcagaagaacctgcacttcttcgcccccgagtacggcgaggtgaccaacgtgaccaccgccgtggacatctacagcttcggcatgtgcgccctggagatggccgtgctggagatccagggcaacggcgagagcagctacgtgccccaggaggccatcagcagcgccatccagctgctggaggaccccctgcagagagagttcatccagaagtgcctgcagagcgagcccgccagaagacccaccgccagagagctgctgttccaccccgccctgttcgaggtgcccagcctgaagctgctggccgcccactgcatcgtgggccaccagcacatgatccccgagaacgccctggaggagatcaccaagaacatggacaccagcgccgtgctggccgagatccccgccggccccggcagagagcccgtgcagaccctgtacagccagagccccgccctggagctggacaagttcctggaggacgtgagaaacggcatctaccccctgaccgccttcggcctgcccagaccccagcagccccagcaggaggaggtgaccagccccgtggtgccccccagcgtgaagacccccacccccgagcccgccgaggtggagaccagaaaggtggtgctgatgcagtgcaacatcgagagcgtggaggagggcgtgaagcaccacctgaccctgctgctgaagctggaggacaagctgaacagacacctgagctgcgacctgatgcccaacgagaacatccccgagctggccgccgagctggtgcagctgggcttcatcagcgaggccgaccagagcagactgaccagcctgctggaggagaccctgaacaagttcaacttcgccagaaacagcaccctgaacagcgccgccgtgaccgtgagcagctag

SEQ ID NO: 11125 - DNA, 2169 bp, synthetic construct
  source 1..2169: mol_type = other DNA; note = Synthetic coding sequence
atggagaccagcgacatccagatcttctaccaggaggaccccgagtgccagaacctgagcgagaacagctgcccccccagcgaggtgagcgacaccaacctgtacagccccttcaagcccagaaactaccagctggagctggccctgcccgccatgaagggcaagaacaccatcatctgcgcccccaccggctgcggcaagaccttcgtgagcctgctgatctgcgagcaccacctgaagaagttcccccagggccagaagggcaaggtggtgttcttcgccaaccagatccccgtgtacgagcagcagaagagcgtgttcagcaagtacttcgagagacacggctacagagtgaccggcatcagcggcgccaccgccgagaacgtgcccgtggagcagatcgtggagaacaacgacatcatcatcctgaccccccagatcctggtgaacaacctgaagaagggcaccatccccagcctgagcatcttcaccctgatgatcttcgacgagtgccacaacaccagcaagcagcacccctacaacatgatcatgttcaactacctggaccagaagctgggcggcagcagcggccccctgccccaggtgatcggcctgaccgccagcgtgggcgtgggcgacgccaagaacaccgacgaggccctggactacatctgcaagctgtgcgccagcctggacgccagcgtgatcgccaccgtgaagcacaacctggaggagctggagcaggtggtgtacaagccccagaagttcttcagaaaggtggagagcagaatcagcgacaagttcaagtacatcatcgcccagctgatgagagacaccgagagcctggccaagagaatctgcaaggacctggagaacctgagccagatccagaacagagagttcggcacccagaagtacgagcagtggatcgtgaccgtgcagaaggcctgcatggtgttccagatgcccgacaaggacgaggagagcagaatctgcaaggccctgttcctgtacaccagccacctgagaaagtacaacgacgccctgatcatcagcgagcacgccagaatgaaggacgccctggactacctgaaggacttcttcagcaacgtgagagccgccggcttcgacgagatcgagcaggacctgacccagagattcgaggagaagctgcaggagctggagagcgtgagcagagaccccagcaacgagaaccccaagctggaggacctgtgcttcatcctgcaggaggagtaccacctgaaccccgagaccatcaccatcctgttcgtgaagaccagagccctggtggacgccctgaagaactggatcgagggcaaccccaagctgagcttcctgaagcccggcatcctgaccggcagaggcaagaccaaccagaacaccggcatgaccctgcccgcccagaagtgcatcctggacgccttcaaggccagcggcgaccacaacatcctgatcgccaccagcgtggccgacgagggcatcgacatcgcccagtgcaacctggtgatcctgtacgagtacgtgggcaacgtgatcaagatgatccagaccagaggcagaggcagagccagaggcagcaagtgcttcctgctgaccagcaacgccggcgtgatcgagaaggagcagatcaacatgtacaaggagaagatgatgaacgacagcatcctgagactgcagacctgggacgaggccgtgttcagagagaagatcctgcacatccagacccacgagaagttcatcagagacagccaggagaagcccaagcccgtgcccgacaaggagaacaagaagctgctgtgcagaaagtgcaaggccctggcctgctacaccgccgacgtgagagtgatcgaggagtgccactacaccgtgctgggcgacgccttcaaggagtgcttcgtgagcagaccccaccccaagcccaagcagttcagcagcttcgagaagagagccaagatcttctgcgccagacagaactgcagccacgactggggcatccacgtgaagtacaagaccttcgagatccccgtgatcaagatcgagagcttcgtggtggaggacatcgccaccggcgtgcagaccctgtacagcaagtggaaggacttccacttcgagaagatccccttcgaccccgccgagatgagcaagtag

SEQ ID NO: 11126 - DNA, 2643 bp, synthetic construct
  source 1..2643: mol_type = other DNA; note = Synthetic coding sequence
atgaccaccgagcagagaagaagcctgcaggccttccaggactacatcagaaagaccctggaccccacctacatcctgagctacatggccccctggttcagagagggctacagcggcctgtacgaggccatcgagagctgggacttcaagaagatcgagaagctggaggagtacagactgctgctgaagagactgcagcccgagttcaagaccagaatcatccccaccgacatcatcagcgacctgagcgagtgcctgatcaaccaggagtgcgaggagatcctgcagatctgcagcaccaagggcatgatggccggcgccgagaagctggtggagtgcctgctgagaagcgacaaggagaactggcccaagaccctgaagctggccctggagaaggagagaaacaagttcagcgagctgtggatcgtggagaagggcatcaaggacgtggagaccgaggacctggaggacaagatggagaccagcgacatccagatcttctaccaggaggaccccgagtgccagaacctgagcgagaacagctgcccccccagcgaggtgagcgacaccaacctgtacagccccttcaagcccagaaactaccagctggagctggccctgcccgccatgaagggcaagaacaccatcatctgcgcccccaccggctgcggcaagaccttcgtgagcctgctgatctgcgagcaccacctgaagaagttcccccagggccagaagggcaaggtggtgttcttcgccaaccagatccccgtgtacgagcagcagaagagcgtgttcagcaagtacttcgagagacacggctacagagtgaccggcatcagcggcgccaccgccgagaacgtgcccgtggagcagatcgtggagaacaacgacatcatcatcctgaccccccagatcctggtgaacaacctgaagaagggcaccatccccagcctgagcatcttcaccctgatgatcttcgacgagtgccacaacaccagcaagcagcacccctacaacatgatcatgttcaactacctggaccagaagctgggcggcagcagcggccccctgccccaggtgatcggcctgaccgccagcgtgggcgtgggcgacgccaagaacaccgacgaggccctggactacatctgcaagctgtgcgccagcctggacgccagcgtgatcgccaccgtgaagcacaacctggaggagctggagcaggtggtgtacaagccccagaagttcttcagaaaggtggagagcagaatcagcgacaagttcaagtacatcatcgcccagctgatgagagacaccgagagcctggccaagagaatctgcaaggacctggagaacctgagccagatccagaacagagagttcggcacccagaagtacgagcagtggatcgtgaccgtgcagaaggcctgcatggtgttccagatgcccgacaaggacgaggagagcagaatctgcaaggccctgttcctgtacaccagccacctgagaaagtacaacgacgccctgatcatcagcgagcacgccagaatgaaggacgccctggactacctgaaggacttcttcagcaacgtgagagccgccggcttcgacgagatcgagcaggacctgacccagagattcgaggagaagctgcaggagctggagagcgtgagcagagaccccagcaacgagaaccccaagctggaggacctgtgcttcatcctgcaggaggagtaccacctgaaccccgagaccatcaccatcctgttcgtgaagaccagagccctggtggacgccctgaagaactggatcgagggcaaccccaagctgagcttcctgaagcccggcatcctgaccggcagaggcaagaccaaccagaacaccggcatgaccctgcccgcccagaagtgcatcctggacgccttcaaggccagcggcgaccacaacatcctgatcgccaccagcgtggccgacgagggcatcgacatcgcccagtgcaacctggtgatcctgtacgagtacgtgggcaacgtgatcaagatgatccagaccagaggcagaggcagagccagaggcagcaagtgcttcctgctgaccagcaacgccggcgtgatcgagaaggagcagatcaacatgtacaaggagaagatgatgaacgacagcatcctgagactgcagacctgggacgaggccgtgttcagagagaagatcctgcacatccagacccacgagaagttcatcagagacagccaggagaagcccaagcccgtgcccgacaaggagaacaagaagctgctgtgcagaaagtgcaaggccctggcctgctacaccgccgacgtgagagtgatcgaggagtgccactacaccgtgctgggcgacgccttcaaggagtgcttcgtgagcagaccccaccccaagcccaagcagttcagcagcttcgagaagagagccaagatcttctgcgccagacagaactgcagccacgactggggcatccacgtgaagtacaagaccttcgagatccccgtgatcaagatcgagagcttcgtggtggaggacatcgccaccggcgtgcagaccctgtacagcaagtggaaggacttccacttcgagaagatccccttcgaccccgccgagatgagcaagtag

SEQ ID NO: 11127 - DNA, 2778 bp, synthetic construct
  source 1..2778: mol_type = other DNA; note = Synthetic coding sequence
atgaccaccgagcagagaagaagcctgcaggccttccaggactacatcagaaagaccctggaccccacctacatcctgagctacatggccccctggttcagagaggaggaggtgcagtacatccaggccgagaagaacaacaagggccccatggaggccgccaccctgttcctgaagttcctgctggagctgcaggaggagggctggttcagaggcttcctggacgccctggaccacgccggctacagcggcctgtacgaggccatcgagagctgggacttcaagaagatcgagaagctggaggagtacagactgctgctgaagagactgcagcccgagttcaagaccagaatcatccccaccgacatcatcagcgacctgagcgagtgcctgatcaaccaggagtgcgaggagatcctgcagatctgcagcaccaagggcatgatggccggcgccgagaagctggtggagtgcctgctgagaagcgacaaggagaactggcccaagaccctgaagctggccctggagaaggagagaaacaagttcagcgagctgtggatcgtggagaagggcatcaaggacgtggagaccgaggacctggaggacaagatggagaccagcgacatccagatcttctaccaggaggaccccgagtgccagaacctgagcgagaacagctgcccccccagcgaggtgagcgacaccaacctgtacagccccttcaagcccagaaactaccagctggagctggccctgcccgccatgaagggcaagaacaccatcatctgcgcccccaccggctgcggcaagaccttcgtgagcctgctgatctgcgagcaccacctgaagaagttcccccagggccagaagggcaaggtggtgttcttcgccaaccagatccccgtgtacgagcagcagaagagcgtgttcagcaagtacttcgagagacacggctacagagtgaccggcatcagcggcgccaccgccgagaacgtgcccgtggagcagatcgtggagaacaacgacatcatcatcctgaccccccagatcctggtgaacaacctgaagaagggcaccatccccagcctgagcatcttcaccctgatgatcttcgacgagtgccacaacaccagcaagcagcacccctacaacatgatcatgttcaactacctggaccagaagctgggcggcagcagcggccccctgccccaggtgatcggcctgaccgccagcgtgggcgtgggcgacgccaagaacaccgacgaggccctggactacatctgcaagctgtgcgccagcctggacgccagcgtgatcgccaccgtgaagcacaacctggaggagctggagcaggtggtgtacaagccccagaagttcttcagaaaggtggagagcagaatcagcgacaagttcaagtacatcatcgcccagctgatgagagacaccgagagcctggccaagagaatctgcaaggacctggagaacctgagccagatccagaacagagagttcggcacccagaagtacgagcagtggatcgtgaccgtgcagaaggcctgcatggtgttccagatgcccgacaaggacgaggagagcagaatctgcaaggccctgttcctgtacaccagccacctgagaaagtacaacgacgccctgatcatcagcgagcacgccagaatgaaggacgccctggactacctgaaggacttcttcagcaacgtgagagccgccggcttcgacgagatcgagcaggacctgacccagagattcgaggagaagctgcaggagctggagagcgtgagcagagaccccagcaacgagaaccccaagctggaggacctgtgcttcatcctgcaggaggagtaccacctgaaccccgagaccatcaccatcctgttcgtgaagaccagagccctggtggacgccctgaagaactggatcgagggcaaccccaagctgagcttcctgaagcccggcatcctgaccggcagaggcaagaccaaccagaacaccggcatgaccctgcccgcccagaagtgcatcctggacgccttcaaggccagcggcgaccacaacatcctgatcgccaccagcgtggccgacgagggcatcgacatcgcccagtgcaacctggtgatcctgtacgagtacgtgggcaacgtgatcaagatgatccagaccagaggcagaggcagagccagaggcagcaagtgcttcctgctgaccagcaacgccggcgtgatcgagaaggagcagatcaacatgtacaaggagaagatgatgaacgacagcatcctgagactgcagacctgggacgaggccgtgttcagagagaagatcctgcacatccagacccacgagaagttcatcagagacagccaggagaagcccaagcccgtgcccgacaaggagaacaagaagctgctgtgcagaaagtgcaaggccctggcctgctacaccgccgacgtgagagtgatcgaggagtgccactacaccgtgctgggcgacgccttcaaggagtgcttcgtgagcagaccccaccccaagcccaagcagttcagcagcttcgagaagagagccaagatcttctgcgccagacagaactgcagccacgactggggcatccacgtgaagtacaagaccttcgagatccccgtgatcaagatcgagagcttcgtggtggaggacatcgccaccggcgtgcagaccctgtacagcaagtggaaggacttccacttcgagaagatccccttcgaccccgccgagatgagcaagtag

SEQ ID NO: 11128 - DNA, 987 bp, synthetic construct
  source 1..987: mol_type = other DNA; note = Synthetic coding sequence
atggacggcgaggacatccccgacttcagcagcctgaaggaggagaccgcctactggaaggagctgagcctgaagtacaagcagagcttccaggaggccagagacgagctggtggagttccaggagggcagcagagagctggaggccgagctggaggcccagctggtgcaggccgagcagagaaacagagacctgcaggccgacaaccagagactgaagtacgaggtggaggccctgaaggagaagctggagcaccagtacgcccagagctacaagcaggtgagcgtgctggaggacgacctgagccagaccagagccatcaaggagcagctgcacaagtacgtgagagagctggagcaggccaacgacgacctggagagagccaagagagccaccatcgtgagcctggaggacttcgagcagagactgaaccaggccatcgagagaaacgccttcctggagagcgagctggacgagaaggagagcctgctggtgagcgtgcagagactgaaggacgaggccagagacctgagacaggagctggccgtgagagagagacagcaggaggtgaccagaaagagcgcccccagcagccccaccctggactgcgagaagatggacagcgccgtgcaggccagcctgagcctgcccgccacccccgtgggcaagggcaccgagaacaccttccccagccccaaggccatccccaacggcttcggcaccagccccctgacccccagcgccagaatcagcgccctgaacatcgtgggcgacctgctgagaaaggtgggcgccctggagagcaagctggccgcctgcagaaacttcgccaaggaccaggccagcagaaagagctacatcagcggcaacgtgaactgcggcgtgctgaacggcaacggcaccaagttcagcagaagcggccacaccagcttcttcgacaagggccaggagaaggtgatcttccccaccctgttcatgggccagtag

SEQ ID NO: 11129 - DNA, 2898 bp, synthetic construct
  source 1..2898: mol_type = other DNA; note = Synthetic coding sequence
atggccctgctgtgcggcctgggccaggtgaccctgagaatctgggtgagcctgcccagccagagcgagaacggcatcggcttcctggccgccagagccttcctgagaagcggcggcatggaggccctgaccacccagctgggccccggcagagagggcagcagcagccccaacagcaagcaggagctgcagccctacagcggcagcagcgccctgaagcccaaccaggtgggcgagaccagcctgtacggcgtgcccatcgtgagcctggtgatcgacggccaggagagactgtgcctggcccagatcagcaacaccctgctgaagaactacagctacaacgagatccacaacagaagagtggccctgggcatcacctgcgtgcagtgcacccccgtgcagctggagatcctgagaagagccggcgccatgcccatcagcagcagaagatgcggcatgatcaccaagagagaggccgagagactgtgcaagagcttcctgggcgagcacaagccccccaagctgcccgagaacttcgccttcgacgtggtgcacgagtgcgcctggggcagcagaggcagcttcatccccgccagatacaacagcagcagagccaagtgcatcaagtgcggctactgcagcatgtacttcagccccaacaagttcatcttccacagccacagaacccccgacgccaagtacacccagcccgacgccgccaacttcaacagctggagaagacacctgaagctgagcgacaagagcgccaccgacgagctgagccacgcctgggaggacgtgaaggccatgttcaacggcggcaccagaaagagaaccttcagcctgcagggcggcggcggcggcggcgccaacggcggcagcggcggccagggcaagggcggcgccggcggcggcggcggcggcggccccggctgcggcgccgagatggcccccggcccccccccccacaagagcctgagatgcggcgaggacgaggccgccggcccccccggccccccccccccccacccccagagaggcctgggcctggccaccggcgccagcggccccgccggccccggcggccccggcggcggcgccggcgtgagaagctaccccgtgatccccgtgcccagcaagggcttcggcctgctgcagaagctgcccccccccctgttcccccacccctacggcttccccaccgccttcggcctgtgccccaagaaggacgaccccgtgctgggcgccggcgagcccaagggcggccccggcaccggcagcggcggcggcggcgccggcaccggcggcggcgccggcggccccggcgccagccacctgccccccggcgccggcgccggccccggcggcggcgccatgttctggggccaccagcccagcggcgccgccaaggacgccgccgccgtggccgccgccgccgccgccgccaccgtgtaccccaccttccccatgttctggcccgccgccggcagcctgcccgtgcccagctaccccgccgcccagagccaggccaaggccgtggccgccgccgtggccgccgccgccgccgccgccgccgccgccgccggcagcggcgcccccgagcccctggacggcgccgagcccgccaaggagagcggcctgggcgccgaggagagatgccccagcgccctgagcagaggccccctggacgaggacggcaccgacgaggccctgcccccccccctggcccccctgcccccccccccccccccccccgccagaaagggcagctacgtgagcgccttcagacccgtggtgaaggacaccgagagcatcgccaagctgtacggcagcgccagagaggcctacggcgccggccccgccagaggccccggccccggcgccggcagcggcggctacgtgagccccgacttcctgagcgagggcagcagcagctacaacagcgccagccccgacgtggacaccgccgacgagcccgaggtggacgtggagagcaacagattccccgacgacgaggacgcccaggaggagaccgagcccagcgcccccagcgccggcggcggccccgacggcgagcagcccaccggcccccccagcgccaccagcagcggcgccgacggccccgccaacagccccgacggcggcagccccagacccagaagaagactgggccccccccccgccggcagacccgccttcggcgacctggccgccgaggacctggtgagaagacccgagagaagcccccccagcggcggcggcggctacgagctgagagagccctgcggccccctgggcggccccgcccccgccaaggtgttcgcccccgagagagacgagcacgtgaagagcgccgccgtggccctgggccccgccgccagctacgtgtgcacccccgaggcccacgagcccgacaaggaggacaaccacagccccgccgacgacctggagaccagaaagagctaccccgaccagagaagcatcagccagcccagccccgccaacaccgacagaggcgaggacggcctgaccctggacgtgaccggcacccacctggtggagaaggacatcgagaacctggccagagaggagctgcagaagctgctgctggagcagatggagctgagaaagaagctggagagagagttccagagcctgaaggacaacttccaggaccagatgaagagagagctggcctacagagaggagatggtgcagcagctgcagatcgtgagagacaccctgtgcaacgagctggaccaggagagaaaggccagatacgccatccagcagaagctgaaggaggcccacgacgccctgcaccacttcagctgcaagatgctgacccccagacactgcaccggcaactgcagcttcaagccccccctgctgccctag

SEQ ID NO: 11130 - DNA, 1803 bp, synthetic construct
  source 1..1803: mol_type = other DNA; note = Synthetic coding sequence
atggccagcaaccacaagagcagcgccgccagacccgtgagcagaggcggcgtgggcctgaccggcagaccccccagcggcatcagacccctgagcggcaacatcagagtggccaccgccatgccccccggcaccgccagacccggcagcagaggctgccccatcggcaccggcggcgtgctgagcagccagatcaaggtggcccacagacccgtgacccagcagggcctgaccggcatgaagaccggcaccaagggcccccagagacagatcctggacaagagctactacctgggcctgctgagaagcaagatcagcgagctgaccaccgaggtgaacaagctgcagaagggcatcgagatgtacaaccaggagaacagcgtgtacctgagctacgagaagagagccgagaccctggccgtggagatcaaggagctgcagggccagctggccgactacaacatgctggtggacaagctgaacaccaacaccgagatggaggaggtgatgaacgactacaacatgctgaaggcccagaacgacagagagacccagagcctggacgtgatcttcaccgagagacaggccaaggagaagcagatcagaagcgtggaggaggagatcgagcaggagaagcaggccaccgacgacatcatcaagaacatgagcttcgagaaccaggtgaagtacctggagatgaagaccaccaacgagaagctgctgcaggagctggacaccctgcagcagcagctggacagccagaacatgaagaaggagagcctggaggccgagatcgcccacagccaggtgaagcaggaggccgtgctgctgcacgagaagctgtacgagctggagagccacagagaccagatgatcgccgaggacaagagcatcggcagccccatggaggagagagagaagctgctgaagcagatcaaggacgacaaccaggagatcgccagcatggagagacagctgaccgacaccaaggagaagatcaaccagttcatcgaggagatcagacagctggacatggacctggaggagcaccagggcgagatgaaccagaagtacaaggagctgaagaagagagaggagcacatggacaccttcatcgagaccttcgaggagaccaagaaccaggagctgaagagaaaggcccagatcgaggccaacatcgtggccctgctggagcactgcagcagaaacatcaacagaatcgagcagatcagcagcatcaccaaccaggagctgaagatgatgcaggacgacctgaacttcaagagcaccgaggtgcagaagagccagagcaccgcccagaacctgaccagcgacatccagagactgcagctggacctgcagaagatggagctgctggagagcaagatgaccgaggagcagcacagcctgaagagcaagatcaagcagatgaccaccgacctggagatctacaacgacctgcccgccctgaagagcagcggcgaggagaagatcaagaagctgcaccaggagagaatgatcctgagcacccacagaaacgccttcaagaagatcatggagaagcagaacatcgagtacgaggccctgaagacccagctgcaggagaacgagacccacagccagctgaccaacctggagagaaagtggcagcacctggagcagaacaacttcgccatgaaggagttcatcgccaccaagagccaggagagcgactaccagcccatcaagaagaacgtgaccaagcagatcgccgagtacaacaagaccatcgtggacgccctgcacagcaccagcggcaactag

SEQ ID NO: 11131 - DNA, 582 bp, synthetic construct
  source 1..582: mol_type = other DNA; note = Synthetic coding sequence
atgctggtggccggcaacgacagagtgcaggccgtgatcacccagatggaggaggtgtgccagaccatcgaggacaacagcagaagacagaagcagctgctgaaccagagattcgagagcctgtgcgccgtgctggaggagagaaagggcgagctgctgcaggccctggccagagagcaggaggagaagctgcagagagtgagaggcctgatcagacagtacggcgaccacctggaggccagcagcaagctggtggagagcgccatccagagcatggaggagccccagatggccctgtacctgcagcaggccaaggagctgatcaacaaggtgggcgccatgagcaaggtggagctggccggcagacccgagcccggctacgagagcatggagcagttcaccgtgagagtggagcacgtggccgagatgctgagaaccatcgacttccagcccggcgccagcggcgaggaggaggaggtggcccccgacggcgaggagggcagcgccggccccgaggaggagagacccgacggccccctgggcccctacagcgcctacgtgagcctgtgcggcgccccctag

SEQ ID NO: 11132 - DNA, 1077 bp, synthetic construct
  source 1..1077: mol_type = other DNA; note = Synthetic coding sequence
atgaacttcaccgtgggcttcaagcccctgctgggcgacgcccacagcatggacaacctggagaagcagctgatctgccccatctgcctggagatgttcagcaagcccgtggtgatcctgccctgccagcacaacctgtgcagaaagtgcgccaacgacgtgttccaggccagcaaccccctgtggcagagcagaggcagcaccaccgtgagcagcggcggcagattcagatgccccagctgcagacacgaggtggtgctggacagacacggcgtgtacggcctgcagagaaacctgctggtggagaacatcatcgacatctacaagcaggagagcagcagacccctgcacagcaaggccgagcagcacctgatgtgcgaggagcacgaggaggagaagatcaacatctactgcctgagctgcgaggtgcccacctgcagcctgtgcaaggtgttcggcgcccacaaggactgcgaggtggcccccctgcccaccatctacaagagacagaagagcgagctgagcgacggcatcgccatgctggtggccggcaacgacagagtgcaggccgtgatcacccagatggaggaggtgtgccagaccatcgaggacaacagcagaagacagaagcagctgctgaaccagagattcgagagcctgtgcgccgtgctggaggagagaaagggcgagctgctgcaggccctggccagagagcaggaggagaagctgcagagagtgagaggcctgatcagacagtacggcgaccacctggaggccagcagcaagctggtggagagcgccatccagagcatggaggagccccagatggccctgtacctgcagcaggccaaggagctgatcaacaaggtgggcgccatgagcaaggtggagctggccggcagacccgagcccggctacgagagcatggagcagttcaccgtgagagtggagcacgtggccgagatgctgagaaccatcgacttccagcccggcgccagcggcgaggaggaggaggtggcccccgacggcgaggagggcagcgccggccccgaggaggagagacccgacggcccctag

SEQ ID NO: 11133 - DNA, 756 bp, synthetic construct
  source 1..756: mol_type = other DNA; note = Synthetic coding sequence
atggccgccagcaccatgagcatctgcagcagcgcctgcaccgacagctggagagtggtggactgccccgagagctgctgcgagccctgctgctgcgcccccgcccccagcctgaccctggtgtgcacccccgtgagctgcgtgagcagcccctgctgccagaccgcctgcgagcccagcgcctgccagagcggctacaccagcagctgcaccaccccctgctaccagcagagcagctgccagcccgactgctgcaccagcagcccctgccagcaggcctgctgcgtgcccgtgtgctgcgtgcccgtgtgctgcgtgcccgtgtgcaacaagcccgtgtgcttcgtgcccacctgcagcgagagcagccccagctgctgccagcagagcagctgccagcccacctgctgcaccagcagcccctgccagcaggcctgctgcgtgcccgtgtgcagcaagagcgtgtgctacgtgcccgtgtgcagcggcgccagcaccagctgctgccagcagagcagctgccagcccgcctgctgcaccgccagctgctgcagacccagcagcagcgtgagcctgctgtgccaccccgtgtgcaagagcacctgctgcgtgcccgtgcccagctgcggcgccagcgccagcagctgccagcccagctgctgcagaaccgccagctgcgtgagcctgctgtgcagacccgtgtgcagcagacccgcctgctacagcctgtgcagcggccagaagagcagctgctag

SEQ ID NO: 11134 - DNA, 1128 bp, synthetic construct
  source 1..1128: mol_type = other DNA; note = Synthetic coding sequence
atggccgccagcaccatgagcgtgtgcagcagcgacctgagctacggcagcagagtgtgcctgcccggcagctgcgacagctgcagcgacagctggcaggtggacgactgccccgagagctgctgcgagcccccctgctgcgcccccagctgctgcgcccccgccccctgcctgagcctggtgtgcacccccgtgagcagagtgagcagcccctgctgccccgtgacctgcgagcccagcccctgccagagcggctgcaccagcagctgcacccccagctgctgccagcagagcagctgccagctggcctgctgcgccagcagcccctgccagcaggcctgctgcatgcccgtgtgctgcaagaccgtgtgctgcaagcccgtgtactgcgtgcccgtgtgcagcggcgacagcagctgctgccagcagagcagctgccagagcgcctgctgcaccagcagcccctgccagcaggcctgctgcgtgcccatctgctgcaagcccgtgtgcagcggcatcagcagcagctgctgccagcagagcagctgcgtgagctgcgtgagcagcccctgctgccaggccgtgtgcgagcccagcccctgccagagcggctgcatcagcagctgcacccccagctgctgccagcagagcagctgccagcccgcctgctgcaccagcagcccctgccagcaggcctgctgcgtgcccgtgtgctgcaagcccgtgtgctgcgtgcccacctgcagcgacgacagcggcagctgctgccagcccgcctgctgcaccagcagccagagccagcagggctgctgcgtgcccgtgtgctgcaagcccgtgtgctgcgtgcccgtgtgcagcggcgccagcagcagctgctgccagcagagcagctgccagcccgcctgctgcaccaccagctgctgcagacccagcagcagcgtgagcctgctgtgcagacccgtgtgcagacccacctgctgcgtgcccgtgcccagctgctgcgcccccaccagcagctgccaggccagctgctgcagacccgccagctgcgtgagcctgctgtgcagacccgcctgcagcagacccgcctgctgcggccccaccagcacccagaagagcagctgctag

SEQ ID NO: 11135 - DNA, 1587 bp, synthetic construct
  source 1..1587: mol_type = other DNA; note = Synthetic coding sequence
atggccaccagagtggaggaggccgccagaggcagaggcggcggcgccgaggaggccaccgaggccggcagaggcggcagaagaagaagccccagacagaagttcgagatcggcaccatggaggaggccggcatctgcggcctgggcgtgaaggccgacatgctgtgcaacagccagagcaacgacatcctgcagcaccagggcagcaactgcggcggcaccagcaacaagcacagcctggaggaggacgagggcagcgacttcatcaccgagaacagaaacctggtgagccccgcctactgcacccaggagagcagagaggagatccccggcggcgaggccagaaccgacccccccgacggccagcaggacagcgagtgcaacagaaacaaggagaagaccctgggcaaggaggtgctgctgctgatgcaggccctgaacaccctgagcacccccgaggagaagctggccgccctgtgcaagaagtacgccgacctgctggaggagagcagaagcgtgcagaagcagatgaagatcctgcagaagaagcaggcccagatcgtgaaggagaaggtgcacctgcagagcgagcacagcaaggccatcctggccagaagcaagctggagagcctgtgcagagagctgcagagacacaacaagaccctgaaggaggagaacatgcagcaggccagagaggaggaggagagaagaaaggaggccaccgcccacttccagatcaccctgaacgagatccaggcccagctggagcagcacgacatccacaacgccaagctgagacaggagaacatcgagctgggcgagaagctgaagaagctgatcgagcagtacgccctgagagaggagcacatcgacaaggtgttcaagcacaaggagctgcagcagcagctggtggacgccaagctgcagcagaccacccagctgatcaaggaggccgacgagaagcaccagagagagagagagttcctgctgaaggaggccaccgagagcagacacaagtacgagcagatgaagcagcaggaggtgcagctgaagcagcagctgagcctgtacatggacaagttcgaggagttccagaccaccatggccaagagcaacgagctgttcaccaccttcagacaggagatggagaagatgaccaagaagatcaagaagctggagaaggagaccatcatctggagaaccaagtgggagaacaacaacaaggccctgctgcagatggccgaggagaagaccgtgagagacaaggagtacaaggccctgcagatcaagctggagagactggagaagctgtgcagagccctgcagaccgagagaaacgagctgaacgagaaggtggaggtgctgaaggagcaggtgagcatcaaggccgccatcaaggccgccaacagagacctggccacccccgtgatgcagccctgcaccgccctggacagccacaaggagctgaacaccagcagcaagagagccctgggcgcccacctggaggccgagcccaagagccagagaagcgccgtgcagaagccccccagcaccggcagcgcccccgccatcgagagcgtggactag

SEQ ID NO: 11136 - DNA, 399 bp, synthetic construct
  source 1..399: mol_type = other DNA; note = Synthetic coding sequence
atgagagccagcccctgcatcagccagcccgccgccagctggcaccccagacccagcgccctgagacccaccgccggcagcggccccgacaccagaacccccggcaccgtggaggacggcagcgccccctgccccgccttcagaagccccgccgtgagcccctgcggcgaggagccctgctgcttccagatcagccccgccgaggagaccctggagctgggcagactggtgagccccggcaactgcgacaccctgagccccagagccgccggcttctacgcctgccacgtgagaagcctgatcccctgcagaagcaccaagggcagatggcccctgaccgccagcgccgccggcctgagcagacacgcccagtgcggccccagcctgggcctgggctag

SEQ ID NO: 11137 - DNA, 1944 bp, synthetic construct
  source 1..1944: mol_type = other DNA; note = Synthetic coding sequence
atggccgagttcagagtgagagtgagcaccggcgaggccttcggcgccggcacctgggacaaggtgagcgtgagcatcgtgggcaccagaggcgagagcccccccctgcccctggacaacctgggcaaggagttcaccgccggcgccgaggaggacttccaggtgaccctgcccgaggacgtgggcagagtgctgctgctgagagtgcacaaggccccccccgtgctgcccctgctgggccccctggcccccgacgcctggttctgcagatggttccagctgaccccccccagaggcggccacctgctgttcccctgctaccagtggctggagggcgccggcaccctggtgctgcaggagggcaccgccaaggtgagctgggccgaccaccaccccgtgctgcagcagcagagacaggaggagctgcaggccagacaggagatgtaccagtggaaggcctacaaccccggctggccccactgcctggacgagaagaccgtggaggacctggagctgaacatcaagtacagcaccgccaagaacgccaacttctacctgcaggccggcagcgccttcgccgagatgaagatcaagggcctgctggacagaaagggcctgtggagaagcctgaacgagatgaagagaatcttcaacttcagaagaacccccgccgccgagcacgccttcgagcactggcaggaggacgccttcttcgccagccagttcctgaacggcctgaaccccgtgctgatcagaagatgccactacctgcccaagaacttccccgtgaccgacgccatggtggccagcgtgctgggccccggcaccagcctgcaggccgagctggagaagggcagcctgttcctggtggaccacggcatcctgagcggcatccagaccaacgtgatcaacggcaagccccagttcagcgccgcccccatgaccctgctgtaccagagccccggctgcggccccctgctgcccctggccatccagctgagccagacccccggccccaacagccccatcttcctgcccaccgacgacaagtgggactggctgctggccaagacctgggtgagaaacgccgagttcagcttccacgaggccctgacccacctgctgcacagccacctgctgcccgaggtgttcaccctggccaccctgagacagctgccccactgccaccccctgttcaagagcaccggcatcggcatcgagggcttcagcgagctgatccagagaaacatgaagcagctgaactacagcctgctgtgcctgcccgaggacatcagaaccagaggcgtggaggacatccccggctactactacagagacgacggcatgcagatctggggcgccgtggagagattcgtgagcgagatcatcggcatctactaccccagcgacgagagcgtgcaggacgacagagagctgcaggcctgggtgagagagatcttcagcaagggcttcctgaaccaggagagcagcggcatccccagcagcctggagaccagagaggccctggtgcagtacgtgaccatggtgatcttcacctgcagcgccaagcacgccgccgtgagcgccggccagttcgacagctgcgcctggatgcccaacctgccccccagcatgcagctgcccccccccaccagcaagggcctggccacctgcgagggcttcatcgccaccctgccccccgtgaacgccacctgcgacgtgatcctggccctgtggctgctgagcaaggagcccggcgaccagagacccctgggcacctaccccgacgagcacttcaccgaggaggcccccagaagaagcatcgccaccttccagagcagactggcccagatcagcagaggcatccaggagagaaaccagggcctggtgctgccctacacctacctggacccccccctgatcgagaacagcgtgagcatctag

SEQ ID NO: 11138 - DNA, 2031 bp, synthetic construct
  source 1..2031: mol_type = other DNA; note = Synthetic coding sequence
atggccgagttcagagtgagagtgagcaccggcgaggccttcggcgccggcacctgggacaaggtgagcgtgagcatcgtgggcaccagaggcgagagcccccccctgcccctggacaacctgggcaaggagttcaccgccggcgccgaggaggacttccaggtgaccctgcccgaggacgtgggcagagtgctgctgctgagagtgcacaaggccccccccgtgctgcccctgctgggccccctggcccccgacgcctggttctgcagatggttccagctgaccccccccagaggcggccacctgctgttcccctgctaccagtggctggagggcgccggcaccctggtgctgcaggagggcaccgccaaggtgagctgggccgaccaccaccccgtgctgcagcagcagagacaggaggagctgcaggccagacaggagatgtaccagtggaaggcctacaaccccggctggccccactgcctggacgagaagaccgtggaggacctggagctgaacatcaagtacagcaccgccaagaacgccaacttctacctgcaggccggcagcgccttcgccgagatgaagatcaagggcctgctggacagaaagggcctgtggagaagcctgaacgagatgaagagaatcttcaacttcagaagaacccccgccgccgagcacgccttcgagcactggcaggaggacgccttcttcgccagccagttcctgaacggcctgaaccccgtgctgatcagaagatgccactacctgcccaagaacttccccgtgaccgacgccatggtggccagcgtgctgggccccggcaccagcctgcaggccgagctggagaagggcagcctgttcctggtggaccacggcatcctgagcggcatccagaccaacgtgatcaacggcaagccccagttcagcgccgcccccatgaccctgctgtaccagagccccggctgcggccccctgctgcccctggccatccagctgagccagacccccggccccaacagccccatcttcctgcccaccgacgacaagtgggactggctgctggccaagacctgggtgagaaacgccgagttcagcttccacgaggccctgacccacctgctgcacagccacctgctgcccgaggtgttcaccctggccaccctgagacagctgccccactgccaccccctgttcaagctgctgatcccccacaccagatacaccctgcacatcaacaccctggccagagagctgctgatcgtgcccggccaggtggtggacagaagcaccggcatcggcatcgagggcttcagcgagctgatccagagaaacatgaagcagctgaactacagcctgctgtgcctgcccgaggacatcagaaccagaggcgtggaggacatccccggctactactacagagacgacggcatgcagatctggggcgccgtggagagattcgtgagcgagatcatcggcatctactaccccagcgacgagagcgtgcaggacgacagagagctgcaggcctgggtgagagagatcttcagcaagggcttcctgaaccaggagagcagcggcatccccagcagcctggagaccagagaggccctggtgcagtacgtgaccatggtgatcttcacctgcagcgccaagcacgccgccgtgagcgccggccagttcgacagctgcgcctggatgcccaacctgccccccagcatgcagctgcccccccccaccagcaagggcctggccacctgcgagggcttcatcgccaccctgccccccgtgaacgccacctgcgacgtgatcctggccctgtggctgctgagcaaggagcccggcgaccagagacccctgggcacctaccccgacgagcacttcaccgaggaggcccccagaagaagcatcgccaccttccagagcagactggcccagatcagcagaggcatccaggagagaaaccagggcctggtgctgccctacacctacctggacccccccctgatcgagaacagcgtgagcatctag

SEQ ID NO: 11139 - DNA, 1665 bp, synthetic construct
  source 1..1665: mol_type = other DNA; note = Synthetic coding sequence
atggccaccagcgccgacagccccagcagccccctgggcgccgaggacctgctgagcgacagcagcgagccccccggcctgaaccaggtgagcagcgaggtgaccagccagctgtacgccagcctgagactgagcagacaggccgaggccaccgccagagcccagctgtacctgcccagcaccagccccccccacgagggcctggacggcttcgcccaggagctgagcagaagcctgagcgtgggcctggagaagaacctgaagaagaaggacggcagcaagcacatcttcgagatggagagcgtgagaggccagctgcagaccatgctgcagaccagcagagacaccgcctacagagaccccctgatccccggcgccggcagcgagagaagagaggaggacagcttcgacagcgacagcaccgccaccctgctgaacaccagacccctgcaggacctgagccccagcagcagcgcccaggccctggaggagctgttccccagatacaccagcctgagacccggcccccccctgaacccccccgacttccagggcctgagagacgccctggacagcgagcacaccagaagaaagcactgcgagagacacatccagagcctgcagaccagagtgctggagctgcagcagcagctggccgtggccgtggccgccgacagaaagaaggacaccatgatcgagcagctggacaagaccctggccagagtggtggagggctggaacagacacgaggccgagagaaccgaggtgctgagaggcctgcaggaggagcaccaggccgccgagctgaccagaagcaagcagcaggagaccgtgaccagactggagcagagcctgagcgaggccatggaggccctgaacagagagcaggagagcgccagactgcagcagagagagagagagaccctggaggaggagagacaggccctgaccctgagactggaggccgagcagcagagatgctgcgtgctgcaggaggagagagacgccgccagagccggccagctgagcgagcacagagagctggagaccctgagagccgccctggaggaggagagacagacctgggcccagcaggagcaccagctgaaggagcactaccaggccctgcaggaggagagccaggcccagctggagagagagaaggagaagagccagagagaggcccaggccgcctgggagacccagcaccagctggccctggtgcagagcgaggtgagaagactggagggcgagctggacaccgccagaagagagagagacgccctgcagctggagatgagcctggtgcaggccagatacgagagccagagaatccagctggagagcgagctggccgtgcagctggagcagagagtgaccgagagactggcccaggcccaggagagcagcctgagacaggccgccagcctgagagagcaccacagaaagcagctgcaggacctgagcggccagcaccagcaggagctggccagccagctggcccagttcaaggtggagatggccgagagagaggagagacagcagcaggtggccgaggactacgagctgagactgctgctgctggacccccccgcccccggcctgagaagccccagaagaagaagaggcggcagcggcctgtgcctgccctggccctggccctag

SEQ ID NO: 11140 - DNA, 2778 bp, synthetic construct
  source 1..2778: mol_type = other DNA; note = Synthetic coding sequence
atggccaccagcgccgacagccccagcagccccctgggcgccgaggacctgctgagcgacagcagcgagccccccggcctgaaccaggtgagcagcgaggtgaccagccagctgtacgccagcctgagactgagcagacaggccgaggccaccgccagagcccagctgtacctgcccagcaccagccccccccacgagggcctggacggcttcgcccaggagctgagcagaagcctgagcgtgggcctggagaagaacctgaagaagaaggacggcagcaagcacatcttcgagatggagagcgtgagaggccagctgcagaccatgctgcagaccagcagagacaccgcctacagagaccccctgatccccggcgccggcagcgagagaagagaggaggacagcttcgacagcgacagcaccgccaccctgctgaacaccagacccctgcaggacctgagccccagcagcagcgcccaggccctggaggagctgttccccagatacaccagcctgagacccggcccccccctgaacccccccgacttccagggcctgagagacgccctggacagcgagcacaccagaagaaagcactgcgagagacacatccagagcctgcagaccagagtgctggagctgcagcagcagctggccgtggccgtggccgccgacagaaagaaggacaccatgatcgagcagctggacaagaccctggccagagtggtggagggctggaacagacacgaggccgagagaaccgaggtgctgagaggcctgcaggaggagcaccaggccgccgagctgaccagaagcaagcagcaggagaccgtgaccagactggagcagagcctgagcgaggccatggaggccctgaacagagagcaggagagcgccagactgcagcagagagagagagagaccctggaggaggagagacaggccctgaccctgagactggaggccgagcagcagagatgctgcgtgctgcaggaggagagagacgccgccagagccggccagctgagcgagcacagagagctggagaccctgagagccgccctggaggaggagagacagacctgggcccagcaggagcaccagctgaaggagcactaccaggccctgcaggaggagagccaggcccagctggagagagagaaggagaagagccagagagaggcccaggccgcctgggagacccagcaccagctggccctggtgcagagcgaggtgagaagactggagggcgagctggacaccgccagaagagagagagacgccctgcagctggagatgagcctggtgcaggccagatacgagagccagagaatccagctggagagcgagctggccgtgcagctggagcagagagtgaccgagagactggcccaggcccaggagagcagcctgagacaggccgccagcctgagagagcaccacagaaagcagctgcaggacctgagcggccagcaccagcaggagctggccagccagctggcccagttcaaggtggagatggccgagagagaggagagacagcagcaggtggccgaggactacgagctgagactggccagagagcaggccagagtgtgcgagctgcagagcggcaaccagcagctggaggagcagagagtggagctggtggagagactgcaggccatgctgcaggcccactgggacgaggccaaccagctgctgagcaccaccctgcccccccccaacccccccgccccccccgccggccccagcagccccggcccccaggagcccgagaaggaggagagaagagtgtggaccatgccccccatggccgtggccctgaagcccgtgctgcagcagagcagagaggccagagacgagctgcccggcgccccccccgtgctgtgcagcagcagcagcgacctgagcctgctgctgggccccagcttccagagccagcacagcttccagcccctggagcccaagcccgacctgaccagcagcaccgccggcgccttcagcgccctgggcgccttccaccccgaccacagagccgagagacccttccccgaggaggaccccggccccgacggcgagggcctgctgaagcagggcctgccccccgcccagctggagggcctgaagaacttcctgcaccagctgctggagaccgtgccccagaacaacgagaaccccagcgtggacctgctgccccccaagagcggccccctgaccgtgcccagctgggaggaggccccccaggtgcccagaatccccccccccgtgcacaagaccaaggtgcccctggccatggccagcagcctgttcagagtgcccgagccccccagcagccacagccagggcagcggccccagcagcggcagccccgagagaggcggcgacggcctgaccttccccagacagctgatggaggtgagccagctgctgagactgtaccaggccagaggctggggcgccctgcccgccgaggacctgctgctgtacctgaagagactggagcacagcggctacaagcccggcagaaaggaggagggcttcagcggctggaagctggactacggcgagtggagcggcaccgacggcagaggcgacaacgtgcccagaagaaacaccgacagcagactgggcgagatccccagaaaggagatccccagccaggccgtgcccagaagactggccaccgcccccaagaccgagaagccccccgccagaaagaagagcggccaccccgcccccagcagcatgagaagcagaggcggcgtgtggagatag

SEQ ID NO: 11141 - DNA, 2961 bp, synthetic construct
  source 1..2961: mol_type = other DNA; note = Synthetic coding sequence
atgtacttctgctggggcgccgacagcagagagctgcagagaagaagaaccgccggcagccccggcgccgagctgctgcaggccgccagcggcgagagacacagcctgctgctgctgaccaaccacagagtgctgagctgcggcgacaacagcagaggccagctgggcagaagaggcgcccagagaggcgagctgcccgagcccatccaggccctggagaccctgatcgtggacctggtgagctgcggcaaggagcacagcctggccgtgtgccacaagggcagagtgttcgcctggggcgccggcagcgagggccagctgggcatcggcgagttcaaggagatcagcttcacccccaagaagatcatgaccctgaacgacatcaagatcatccaggtgagctgcggccactaccacagcctggccctgagcaaggacagccaggtgttcagctggggcaagaacagccacggccagctgggcctgggcaaggagttccccagccaggccagcccccagagagtgagaagcctggagggcatccccctggcccaggtggccgccggcggcgcccacagcttcgccctgagcctgtgcggcaccagcttcggctggggcagcaacagcgccggccagctggccctgagcggcagaaacgtgcccgtgcagagcaacaagcccctgagcgtgggcgccctgaagaacctgggcgtggtgtacatcagctgcggcgacgcccacaccgccgtgctgacccaggacggcaaggtgttcaccttcggcgacaacagaagcggccagctgggctacagccccacccccgagaagagaggcccccagctggtggagagaatcgacggcctggtgagccagatcgactgcggcagctaccacaccctggcctacgtgcacaccaccggccaggtggtgagcttcggccacggccccagcgacaccagcaagcccacccaccccgaggccctgaccgagaacttcgacatcagctgcctgatcagcgccgaggacttcgtggacgtgcaggtgaagcacatcttcgccggcacctacgccaacttcgtgaccacccaccaggacaccagcagcaccagagcccccggcaagaccctgcccgagatcagcagaatcagccagagcatggccgagaagtggatcgccgtgaagagaagaagcaccgagcacgagatggccaagagcgagatcagaatgatcttcagcagccccgcctgcctgaccgccagcttcctgaagaagagaggcaccggcgagaccaccagcatcgacgtggacctggagatggccagagacaccttcaagaagctgaccaagaaggagtggatcagcagcatgatcaccacctgcctggaggacgacctgctgagagccctgccctgccacagcccccaccaggaggccctgagcgtgttcctgctgctgcccgagtgccccgtgatgcacgacagcaagaactggaagaacctggtggtgcccttcgccaaggccgtgtgcgagatgagcaagcagagcctgcaggtgctgaagaagtgctgggccttcctgcaggagagcagcctgaaccccctgatccagatgctgaaggccgccatcatcagccagctgctgcaccagaccaagaccgagcaggaccactgcaacgtgaaggccctgctgggcatgatgaaggagctgcacaaggtgaacaaggccaactgcagactgcccgagaacaccttcaacatcaacgagctgagcaacctgctgaacttctacatcgacagaggcagacagctgttcagagacaaccacctgatgagcgagaagaaggcctacatgctgatgcacgagaccatcctgcagaagaaggacgagttcccccccagccccagattcatcctgagagtgagaagaagcagactggtgaaggacgccctgagacagctgagccaggccgaggccaccgacttctgcaaggtgctggtggtggagttcatcaacgagatctgccccgagagcggcggcgtgagcagcgagttcttccactgcatgttcgaggagatgaccaagcccgagtacggcatgttcatgtaccccgagatgggcagctgcatgtggttccccgccaagcccaagcccgagaagaagagatacttcctgttcggcatgctgtgcggcctgagcctgttcaacctgaacgtggccaacctgcccttccccctggccctgtacaagaagctgctggaccagaagcccagcctggaggacctgaaggagctgagccccagactgggcaagagcctgcaggaggtgctggacgacgccgccgacgacatcggcgacgccctgtgcatcagattcagcatccactgggaccagaacgacgtggacctgatccccaacggcatcagcatccccgtggaccagaccaacaagagagactacgtgagcaagtacatcgactacatcttcaacgtgagcgtgaaggccgtgtacgaggagttccagagaggcttctacagagtgtgcgagaaggagatcctgagacacttctaccccgaggagctgatgaccgccatcatcggcaacaccgactacgactggaagcagttcgagcagaacagcaagtacgagcagggctaccagaagagccaccccaccatccagctgttctggaaggccttccacaagctgaccctggacgagaagaagaagttcctgttcttcctgaccggcagagacagactgcacgccagaggcatccagaagatggagatcgtgttcagatgccccgagaccttcagcgagagagaccaccccaccagcatcacctgccacaacatcctgagcctgcccaagtacagcaccatggagagaatggaggaggccctgcaggtggccatcaacaacaacagaggcttcgtgagccccatgctgacccagagctag

SEQ ID NO: 11142 - DNA, 435 bp, synthetic construct
  source 1..435: mol_type = other DNA; note = Synthetic coding sequence
atgaccaccagacaggccaccaaggaccccctgctgagaggcgtgagccccacccccagcaagatccccgtgagaagccagaagagaacccccttccccaccgtgaccagctgcgccgtggaccaggagaaccaggaccccagaagatgggtgcagaagccccccctgaacatccagagacccctggtggacagcgccggccccagacccaaggccagacaccaggccgagaccagccagagactggtgggcatcagccagcccagaaaccccctggaggagctgagacccagccccagaggccagaacgtgggccccggcccccccgcccagaccgtgctggtgcccgcccccggcaagctgttcgccctgagaagaagccccttcccccccgccaagtgccacctggccagatgccacggcctgtacctgtag

SEQ ID NO: 11143 - DNA, 327 bp, synthetic construct
  source 1..327: mol_type = other DNA; note = Synthetic coding sequence
atggccgaccccagagtgagacagatcaagatcaagaccggcgtggtgaagagactggtgaaggagaaggtgatgtacgagaaggaggccaagcagcaggaggagaagatcgagaagatgagagccgaggacggcgagaactacgacatcaagaagcaggccgagatcctgcaggagagcagaatgatgatccccgactgccagagaagactggaggccgcctacctggacctgcagagaatcctggagaacgagaaggacctggaggaggccgaggagtacaaggaggccagactggtgctggacagcgtgaagctggaggcctag

SEQ ID NO: 11144 - DNA, 1341 bp, synthetic construct
  source 1..1341: mol_type = other DNA; note = Synthetic coding sequence
atgagagagtgcctgagcatccacatcggccaggccggcatccagatcggcgacgcctgctgggagctgtactgcctggagcacggcatccagcccaacggcgtggtgctggacacccagcaggaccagctggagaacgccaagatggagcacaccaacgccagcttcgacaccttcttctgcgagaccagagccggcaagcacgtgcccagagccctgttcgtggacctggagcccaccgtgatcgacggcatcagaaccggccagcacagaagcctgttccaccccgagcagctgctgagcggcaaggaggacgccgccaacaactacgccagaggcagatacagcgtgggcagcgaggtgatcgacctggtgctggagagaaccagaaagctggccgagcagtgcggcggcctgcagggcttcctgatcttcagaagcttcggcggcggcaccggcagcggcttcaccagcctgctgatggagagactgaccggcgagtacagcagaaagaccaagctggagttcagcgtgtaccccgcccccagaatcagcaccgccgtggtggagccctacaacagcgtgctgaccacccacagcaccaccgagcacaccgactgcaccttcatggtggacaacgaggccgtgtacgacatctgccacagaaagctgggcgtggagtgccccagccacgccagcatcaacagactggtggtgcaggtggtgagcagcatcaccgccagcctgagattcgagggccccctgaacgtggacctgatcgagttccagaccaacctggtgccctaccccagaatccacttccccatgaccgccttcgcccccatcgtgagcgccgacaaggcctaccacgagcagttcagcgtgagcgacatcaccaccgcctgcttcgagagcagcaaccagctggtgaagtgcgaccccagactgggcaagtacatggcctgctgcctgctgtacagaggcgacgtggtgcccaaggaggtgaacgccgccatcgccgccaccaagagcagacacagcgtgcagttcgtggactggtgccccaccggcttcaaggtgggcatcaacaacagaccccccaccgtgatgcccggcggcgacctggccaaggtgcacagaagcatctgcatgctgagcaacaccaccgccatcgtggaggcctgggccagactggaccacaagttcgacctgatgtacgccaagagagccttcctgcactggtacctgagagagggcatggaggaggccgagttcctggaggccagagaggacctggccgccctggagagagactacgaggaggtggcccagagcttctag

SEQ ID NO: 11145 - DNA, 873 bp, synthetic construct
  source 1..873: mol_type = other DNA; note = Synthetic coding sequence
atgggcagcagcaagaaggtgaccctgagcgtgctgagcagagagcagagcgagggcgtgggcgccagagtgagaagaagcatcggcagacccgagctgaagaacctggaccccttcctgctgttcgacgagttcaagggcggcagacccggcggcttccccgaccacccccacagaggcttcgagaccgtgagctacctgctggagggcggcagcatggcccacgaggacttctgcggccacaccggcaagatgaaccccggcgacctgcagtggatgaccgccggcagaggcatcctgcacgccgagatgccctgcagcgaggagcccgcccacggcctgcagctgtgggtgaacctgagaagcagcgagaagatggtggagccccagtaccaggagctgaagagcgaggagatccccaagcccagcaaggacggcgtgaccgtggccgtgatcagcggcgaggccctgggcatcaagagcaaggtgtacaccagaacccccaccctgtacctggacttcaagctggaccccggcgccaagcacagccagcccatccccaagggctggaccagcttcatctacaccatcagcggcgacgtgtacatcggccccgacgacgcccagcagaagatcgagccccaccacaccgccgtgctgggcgagggcgacagcgtgcaggtggagaacaaggaccccaagagaagccacttcgtgctgatcgccggcgagcccctgagagagcccgtgatccagcacggccccttcgtgatgaacaccaacgaggagatcagccaggccatcctggacttcagaaacgccaagaacggcttcgagagagccaagacctggaagagcaagatcggcaactag

SEQ ID NO: 11146 - DNA, 873 bp, synthetic construct; identical to SEQ ID NO: 11145
  source 1..873: mol_type = other DNA; note = Synthetic coding sequence

SEQ ID NO: 11147 - DNA, 1200 bp, synthetic construct
  source 1..1200: mol_type = other DNA; note = Synthetic coding sequence
atggacttcttcagcagccacctgctggccgacagcagcagccccgccaccaacagcagccacaccgacgcccacgagatcctggtgagcgacttcctggtgagcgacgagaacctgcagaagatggagaacgtgctggacctgtggagcagcggcctgaagaccaacatcatcagcgagctgagcaagtggagactgaacttcatcgactggcacagaatggagatgagaaaggagaaggagaagcacgccgcccacctgaagcagctgtgcaaccagatcaacgagctgaaggagctgcagaagaccttcgagatcagcatcggcagaaaggacgaggtgatcagcagcctgagccacgccatcggcaagcagaaggagaagatcgagctgatgagaaccttcttccactggagaatcggccacgtgagagccagacaggacgtgtacgagggcaagctggccgaccagtactaccagagaaccctgctgaagaaggtgtggaaggtgtggagaagcgtggtgcagaagcagtggaaggacgtggtggagagagcctgccaggccagagccgaggaggtgtgcatccagatcagcaacgactacgaggccaaggtggccatgctgagcggcgccctggagaacgccaaggccgagatccagagaatgcagcacgagaaggagcacttcgaggacagcatgaagaaggccttcatgagaggcgtgtgcgccctgaacctggaggccatgaccatcttccagaacagaaacgacgccggcatcgacagcaccaacaacaagaaggaggagtacggccccggcgtgcagggcaaggagcacagcgcccacctggaccccagcgccccccccatgcccctgcccgtgaccagccccctgctgcccagcccccccgccgccgtgggcggcgccagcgccaccgccgtgcccagcgccgccagcatgaccagcaccagagccgccagcgccagcagcgtgcacgtgcccgtgagcgccctgggcgccggcagcgccgccaccgccgccagcgaggagatgcagaccatcccccaggccaccgccgccaagtaccccagaaccatccaccccgagagcagcaccagcgccagcagaagcctgggcaccagaagcgcccacacccagagcctgaccagcgtgcacagcatcaaggtggtggactag

SEQ ID NO: 11148 - DNA, 729 bp, synthetic construct
  source 1..729: mol_type = other DNA; note = Synthetic coding sequence
atggccgccgtgaaggccagcaccagcaaggccaccagaccctggtacagccaccccgtgtacgccagatactggcagcactaccaccaggccatggcctggatgcagagccaccacaacgcctacagaaaggccgtggagagctgcttcaacctgccctggtacctgcccagcgccctgctgccccagagcagctacgacaacgaggccgcctacccccagagcttctacgaccaccacgtggcctggcaggactacccctgcagcagcagccacttcagaagaagcggccagcaccccagatacagcagcagaatccaggccagcaccaaggaggaccaggccctgagcaaggaggaggagatggagaccgagagcgacgccgaggtggagtgcgacctgagcaacatggagatcaccgaggagctgagacagtacttcgccgagaccgagagacacagagaggagagaagaagacagcagcagctggacgccgagagactggacagctacgtgaacgccgaccacgacctgtactgcaacaccagaagaagcgtggaggcccccaccgagagacccggcgagagaagacaggccgagatgaagagactgtacggcgacagcgccgccaagatccaggccatggaggccgccgtgcagctgagcttcgacaagcactgcgacagaaagcagcccaagtactggcccgtgatccccctgaagttctag

SEQ ID NO: 11149 - DNA, 1482 bp, synthetic construct
  source 1..1482: mol_type = other DNA; note = Synthetic coding sequence
atggagagaagccccgacgtgagccccggccccagcagaagcttcaaggaggagctgctgtgcgccgtgtgctacgaccccttcagagacgccgtgaccctgagatgcggccacaacttctgcagaggctgcgtgagcagatgctgggaggtgcaggtgagccccacctgccccgtgtgcaaggacagagccagccccgccgacctgagaaccaaccacaccctgaacaacctggtggagaagctgctgagagaggaggccgagggcgccagatggaccagctacagattcagcagagtgtgcagactgcacagaggccagctgagcctgttctgcctggaggacaaggagctgctgtgctgcagctgccaggccgaccccagacaccagggccacagagtgcagcccgtgaaggacaccgcccacgacttcagagtgagaagcctgatcgccgaggagagaagaaacttcctgcccacccaccagtggatcgtgaccaagaccagactgcagaccagcagccccaacctgcagagcagaagacagggccaggtgcaggagcacggcgcctgcaccgccggcgagggccagggcctgctgggccacgccgccctgctggacgccatggccgaggagaccagacagaagcagctgctggccgacgagaagatgaagcagctgaccgaggagaccgaggtgctggcccacgagatcgagagactgcagatggagatgaaggaggacgacgtgagcttcctgatgaagcacaagagcagaaagagaagactgttctgcaccatggagcccgagcccgtgcagcccggcatgctgatcgacgtgtgcaagtacctgggcagcctgcagtacagagtgtggaagaagatgctggccagcgtggagagcgtgcccttcagcttcgaccccaacaccgccgccggctggctgagcgtgagcgacgacctgaccagcgtgaccaaccacggctacagagtgcaggtggagaaccccgagagattcagcagcgccccctgcctgctgggcagcagagtgttcagccagggcagccacgcctgggaggtggccctgggcggcctgcagagctggagagtgggcgtggtgagagtgagacaggacagcggcgccgagggccacagccacagctgctaccacgacaccagaagcggcttctggtacgtgtgcagaacccagggcgtggagggcgaccactgcgtgaccagcgaccccgccaccagccccctggtgctggccatccccagaagactgagagtggagctggagtgcgaggagggcgagctgagcttctacgacgccgagagacactgccacctgtacaccttccacgccagattcggcgaggtgagaccctacttctacctgggcggcgccagaggcgccggcccccccgagcccctgagaatctgccccctgcacatcagcgtgaaggaggagctggacggctag

SEQ ID NO: 11150 - DNA, 1473 bp, synthetic construct
  source 1..1473: mol_type = other DNA; note = Synthetic coding sequence
atgaacctggccgagatctgcgacaacgccaagaagggcagagagtacgccctgctgggcaactacgacagcagcatggtgtactaccagggcgtgatgcagcagatccagagacactgccagagcgtgagagaccccgccatcaagggcaagtggcagcaggtgagacaggagctgctggaggagtacgagcaggtgaagagcatcgtgagcaccctggagagcttcaagatcgacaagccccccgacttccccgtgagctgccaggacgagcccttcagagaccccgccgtgtggcccccccccgtgcccgccgagcacagagcccccccccagatcagaagacccaacagagaggtgagacccctgagaaaggagatggccggcgtgggcgccagaggccccgtgggcagagcccaccccatcagcaagagcgagaagcccagcaccagcagagacaaggactacagagccagaggcagagacgacaagggcagaaagaacatgcaggacggcgccagcgacggcgagatgcccaagttcgacggcgccggctacgacaaggacctggtggaggccctggagagagacatcgtgagcagaaaccccagcatccactgggacgacatcgccgacctggaggaggccaagaagctgctgagagaggccgtggtgctgcccatgtggatgcccgacttcttcaagggcatcagaagaccctggaagggcgtgctgatggtgggcccccccggcaccggcaagaccatgctggccaaggccgtggccaccgagtgcggcaccaccttcttcaacgtgagcagcagcaccctgaccagcaagtacagaggcgagagcgagaagctggtgagactgctgttcgagatggccagattctacgcccccaccaccatcttcatcgacgagatcgacagcatctgcagcagaagaggcaccagcgacgagcacgaggccagcagaagagtgaagagcgagctgctgatccagatggacggcgtgggcggcgccctggagaacgacgaccccagcaagatggtgatggtgctggccgccaccaacttcccctgggacatcgacgaggccctgagaagaagactggagaagagaatctacatccccctgcccaccgccaagggcagagccgagctgctgaagatcaacctgagagaggtggagctggaccccgacatccagctggaggacatcgccgagaagatcgagggctacagcggcgccgacatcaccaacgtgtgcagagacgccagcctgatggccatgagaagaagaatcaacggcctgagccccgaggagatcagagccctgagcaaggaggagctgcagatgcccgtgaccaagggcgacttcgagctggccctgaagaagatcgccaagagcgtgagcgccgccgacctggagaagtacgagaagtggatggtggagttcggcagcgcctag

SEQ ID NO: 11151 - DNA, 1473 bp, synthetic construct; identical to SEQ ID NO: 11150
  source 1..1473: mol_type = other DNA; note = Synthetic coding sequence

SEQ ID NO: 11152 - DNA, 1068 bp, synthetic construct
  source 1..1068: mol_type = other DNA; note = Synthetic coding sequence
atggacttcatcttccacgagaagcaggagggcttcctgtgcgcccagcactgcctgaacaacctgctgcagggcgagtacttcagccccgtggagctggccagcatcgcccaccagctggacgaggaggagagaatgagaatggccgagggcggcgtgaccagcgaggagtacctggccttcctgcagcagcccagcgagaacatggacgacaccggcttcttcagcatccaggtgatcagcaacgccctgaagttctggggcctggagatcatccacttcaacaaccccgagtaccagaagctgggcatcgaccccatcaacgagagaagcttcatctgcaactacaagcagcactggttcaccatcagaaagttcggcaagcactggttcaacctgaacagcctgctggccggccccgagctgatcagcgacacctgcctggccaacttcctggccagactgcagcagcaggcctacagcgtgttcgtggtgaagggcgacctgcccgactgcgaggccgaccagctgctgcagatcatcagcgtggaggagatggacacccccaagctgaacggcaagaagctggtgaagcagaaggagcacagagtgtacaagaccgtgctggagaaggtgagcgaggagagcgacgagagcggcaccagcgaccaggacgaggaggacttccagagagccctggagctgagcagacaggagaccaacagagaggacgagcacctgagaagcaccatcgagctgagcatgcagggcagcagcggcaacaccagccaggacctgcccaagaccagctgcgtgacccccgccagcgagcagcccaagaagatcaaggaggactacttcgagaagcaccagcaggagcagaagcagcagcagcagcagagcgacctgcccggccacagcagctacctgcacgagagacccaccaccagcagcagagccatcgagagcgacctgagcgacgacatcagcgagggcaccgtgcaggccgccgtggacaccatcctggagatcatgagaaagaacctgaagatcaagggcgagaagtag

SEQ ID NO: 11153 - DNA, 5910 bp, synthetic construct
  source 1..5910: mol_type = other DNA; note = Synthetic coding sequence
atggccgccagaagcgcccccagctgccacctgagactggagtgggtgtacggctacagaggccaccagtgcagaaacaacctgtactacaccgccgccaaggagatcgtgtacttcgtggccggcgtgggcgtggtgtacagccccagagagcacagacagaagttctacagaggccacagcgacgacatcatcagcctggccctgcaccccgagagagtgctggtggccaccggccaggtgggcaaggagccctacatctgcatctgggacagctacaccgtgcagaccatcagcgtgctgaaggacgtgcacacccacggcatcgcctgcctggccttcgacctggacggccagagactggtgagcgtgggcctggacagcaagaacgccgtgtgcgtgtgggactggaagagaggcaagatgctgagcatggcccccggccacaccgacagaatcttcgacatcagctgggacctgtaccagcccaacaagctggtgagctgcggcgtgaagcacatcaagttctggagcctgtgcggcaacgccctgacccccaagagaggcgtgttcggcaagaccggcgacctgcagaccatcctgtgcctggcctgcgccagagacgagctgacctacagcggcgccctgaacggcgacatctacgtgtggaagggcatcaacctgatcagaaccatccagggcgcccacgccgccggcatcttcagcatgaacgcctgcgaggagggcttcgccaccggcggcagagacggctgcatcagactgtgggacctgaccttcaagcccatcaccgtgatcgacctgagagagaccgaccagggctacaagggcctgagcgtgagaagcgtgtgctggagaggcgaccacatcctggtgggcacccaggacagcgagatcttcgagatcgtggtgcaggagagaaacaagcccttcctgatcatgcagggccactgcgagggcgagctgtgggccctggccgtgcaccccaccaagcccctggccgtgaccggcagcgacgacagaagcgtgagaatctggagcctggtggaccacgccctgatcgccagatgcaacatggaggagcccatcagatgcgccgccgtgaacgccgacggcatccacctggccctgggcatgaaggacggcagcttcaccgtgctgagagtgagagacatgaccgaggtggtgcacatcaaggacagaaaggaggccatccacgagctgaagtacagccccgacggcacctacctggccgtgggctgcaacgacagcagcgtggacatctacggcgtggcccagagatacaagaaggtgggcgagtgcctgggcagcctgagcttcatcacccacctggactggagcagcgacagcagatacctgcagaccaacgacggcaacggcaagagactgttctacagaatgcccggcggcaaggaggtgaccagcaccgaggagatcaagggcgtgcactgggccagctggacctgcgtgagcggcctggaggtgaacggcatctggcccaagtacagcgacatcaacgacatcaacagcgtggacggcaactacatcggccaggtgctggtgaccgccgacgactacggcatcatcaagctgttcagatacccctgcctgagaaagggcgccaagttcagaaagtacatcggccacagcgcccacgtgaccaacgtgagatggagccacgactaccagtgggtgatcagcatcggcggcgccgaccacagcgtgttccagtggaagttcatccccgagagaaagctgaaggacgccgtgcacatcgccccccaggagagcctggccgacagccacagcgacgagagcgacagcgacctgagcgacgtgcccgagctggacagcgagatcgagcaggagacccagctgacctacagaagacaggtgtacaaggaggacctgccccagctgaaggagcagtgcaaggagaagcagaagagcgccaccagcaagagaagagagagagcccccggcaacagcatcagactgcacttcgtgcacggctacagaggctacgactgcagaagcaacctgttctacacccagatcggcgagatcgtgtaccacgtggccgccgtgggcgtgatctacaacagacagcagaacacccagagattctacctgggccacgacgacgacatcctgtgcctgaccatccaccccctgaaggactacgtggccaccggccaggtgggcagagaccccagcatccacatctgggacaccgagaccatcaagcccctgagcatcctgaagggccaccaccagtacggcgtgagcgccgtggacttcagcgccgacggcaagagactggccagcgtgggcatcgacgacagccacaccgtggtgctgtgggactggaagaagggcgagaagctgagcatcgccagaggcagcaaggacaagatcttcgtggtgaagatgaacccctacgtgcccgacaagctgatcaccgccggcatcaagcacatgaagttctggagaaaggccggcggcggcctgatcggcagaaagggctacatcggcaccctgggcaagaacgacaccatgatgtgcgccgtgtacggctggaccgaggagatggccttcagcggcaccagcaccggcgacgtgtgcatctggagagacatcttcctggtgaagaccgtgaaggcccacgacggccccgtgttcagcatgcacgccctggagaagggcttcgtgaccggcggcaaggacggcatcgtggccctgtgggacgacagcttcgagagatgcctgaagacctacgccatcaagagagccgccctggcccccggcagcaagggcctgctgctggaggacaaccccagcatcagagccatcagcctgggccacggccacatcctggtgggcaccaagaacggcgagatcctggaggtggacaagagcggccccatcaccctgctggtgcagggccacatggagggcgaggtgtggggcctggccacccacccctacctgcccatctgcgccaccgtgagcgacgacaagaccctgagaatctgggacctgagccccagccactgcatgctggccgtgagaaagctgaagaagggcggcagatgctgctgcttcagccccgacggcaaggccctggccgtgggcctgaacgacggcagcttcctgatggccaacgccgacaccctggaggacctggtgagcttccaccacagaaaggacatgatcagcgacatcagattcagccccggcagcggcaagtacctggccgtggccagccacgacagcttcatcgacatctacaacgtgatgagcagcaagagagtgggcatctgcaagggcgccaccagctacatcacccacatcgactgggacatcagaggcaagctgctgcaggtgaacaccggcgccaaggagcagctgttcttcgaggcccccagaggcaagaagcagaccatccccagcgtggaggtggagaagatcgcctgggccagctggaccagcgtgctgggcctgtgctgcgagggcatctggcccgtgatcggcgaggtgaccgacgtgaccgccagctgcctgaccagcgacaagatggtgctggccaccggcgacgacctgggcttcgtgaagctgttcagataccccaccaagggcaagttcggcaagttcaagagatacgtggcccacagcacccacgtgaccaacgtgagatggacctacgacgacagcatgctggtgaccctgggcggcaccgacatgagcctgatggtgtggaccaacgagatggagggctacagagagaagagaccctgcgacagcgaggagagcgacatcgacagcgaggaggacggcggctacgacagcgacgtgaccagagagaacgagatcagctacaccatcagagccctgagcaccaacatcagacccatgctgggcatcaagccccacctgcagcagaaggagcccagcatcgacgagagaccccccgtgagcagagcccccccccagcccgagaagctgcagaccaacaacgtgggcaagaagaagagacccatcgaggacctggtgctggagctgatcttcggctacagaggcagagactgcagaaacaacgtgcactacctgaacgacggcgacgacatcatctaccacaccgccagcgtgggcatcctgcacaacgtggccaccggcagccagagcttctaccaggagcacaacgacgacatcctgtgcctgaccgtgaaccagcaccccaagttcatcaacatcgtggccaccggccaggtgggcgacagcgccgacatgagcgccaccgcccccagcatccacatctgggacgccatgaacaagcagaccctgagcatcctgagatgctaccacagcaagggcgtgtgcagcgtgagcttcagcgccaccggcaagctgctgctgagcgtgggcctggaccccgagcacaccatcaccatctggagatggcaggagggcgccaagatcgccagcagagccggccacaaccagagaatcttcgtggccgagttcagacccgacagcgacacccagttcgtgagcgtgggcgtgaagcacgtgaagttctggaccctggccggcagagccctgctgagcaagaagggcctgctgagcaccctggaggacgccagaatgcagaccatgctggccatcgccttcggcgccaacaacctgaccttcaccggcaccatcagcggcgacgtgtgcgtgtggaaggaccacatcctgtgcagaatcgtggccagagcccacaacggccccgtgttcgccatgtacaccaccctgagagacggcctgatcgtgaccggcggcaaggagagacccagcaaggagggcggcgccgtgaagctgtgggaccaggagctgagaagatgcagagccttcagactggagaccggccaggccaccgactgcgtgagaagcgtgtgcagaggcaagggcaagatcctggtgggcaccagaaacgccgagatcatcgaggtgggcgagaagaacgccgcctgcaacatcctggtgaacggccacgtggacggccccatctggggcctggccacccaccccagcagagacttcttcctgagcgccgccgaggacggcaccgtgagactgtgggacatcgccgacaagaagatgctgaacaaggtgaacctgggccacgccgccagaaccgtgtgctacagccccgagggcgacatggtggccatcggcatgaagaacggcgagttcatcatcctgctggtgagcagcctgaagatctggggcaagaagagagacagaagatgcgccatccacgacatcagattcagccccgacagcagatacctggccgtgggcagcagcgagaacagcgtggacttctacgacctgaccctgggccccaccctgaacagaatcagctactgcaaggacatccccagcttcgtgatccagatggacttcagcgccgacagcagctacctgcaggtgagcagcggctgctacaagagacacgtgtacgaggtgcccagcggcaagcacctgatggaccacgccgccatcgacagaatcacctgggccacctggaccagcatcctgggcgacgaggtgctgggcatctggagcagacacgccgagaaggccgacgtgaactgcgcctgcgtgagccacagcggcatcagcctggtgaccggcgacgacttcggcatggtgaagctgttcgacttcccctgccccgagaagttcgccaagcacaagagattcctgggccacagcccccacgtgaccaacatcagattcaccagcggcgacagacacgtggtgagcgccggcggcgacgactgcagcctgttcgtgtggaagtgcgtgcacaccccccactag

SEQ ID NO: 11154 - DNA, 1146 bp, synthetic construct
  source 1..1146: mol_type = other DNA; note = Synthetic coding sequence
atgcccctgcaggtgagcgactacagctggcagcagaccaagaccgccgtgttcctgagcctgcccctgaagggcgtgtgcgtgagagacaccgacgtgttctgcaccgagaactacctgaaggtgaacttcccccccttcctgttcgaggccttcctgtacgcccccatcgacgacgagagcagcaaggccaagatcggcaacgacaccatcgtgttcaccctgtacaagaaggaggccgccatgtgggagaccctgagcgtgaccggcgtggacaaggagatgatgcagagaatcagagagaagagcatcctgcaggcccaggagagagccaaggaggccaccgaggccaaggccgccgccaagagagaggaccagaagtacgccctgagcgtgatgatgaagatcgaggaggaggagagaaagaagatcgaggacatgaaggagaacgagagaatcaaggccaccaaggccctggaggcctggaaggagtaccagagaaaggccgaggagcagaagaagatccagagagaggagaagctgtgccagaaggagaagcagatcaaggaggagagaaagaagatcaagtacaagagcctgaccagaaacctggccagcagaaacctggcccccaagggcagaaacagcgagaacatcttcaccgagaagctgaaggaggacagcatccccgcccccagaagcgtgggcagcatcaagatcaacttcacccccagagtgttccccaccgccctgagagagagccaggtggccgaggaggaggagtggctgcacaagcaggccgaggccagaagagccatgaacaccgacatcgccgagctgtgcgacctgaaggaggaggagaagaaccccgagtggctgaaggacaagggcaacaagctgttcgccaccgagaactacctggccgccatcaacgcctacaacctggccatcagactgaacaacaagatgcccctgctgtacctgaacagagccgcctgccacctgaagctgaagaacctgcacaaggccatcgaggacagcagcaaggagttctgcagcctggagggcatcgagtgccaggccagcgagcccaagctgagccaccacatccccagcgacctgcacgtgtacatccagatggcctag

SEQ ID NO: 11155 - DNA, 1344 bp, synthetic construct
  source 1..1344: mol_type = other DNA; note = Synthetic coding sequence
atggccggcgccggcggcggcaacgacatccagtggtgcttcagccaggtgaagggcgccgtggacgacgacgtggccgaggccgacatcatcagcaccgtggagttcaaccacagcggcgagctgctggccaccggcgacaagggcggcagagtggtgatcttccagcaggagcaggagaacaagatccagagccacagcagaggcgagtacaacgtgtacagcaccttccagagccacgagcccgagttcgactacctgaagagcctggagatcgaggagaagatcaacaagatcagatggctgccccagaagaacgccgcccagttcctgctgagcaccaacgacaagaccatcaagctgtggaagatcagcgagagagacaagagacccgagggctacaacctgaaggaggaggacggcagatacagagaccccaccaccgtgaccaccctgagagtgcccgtgttcagacccatggacctgatggtggaggccagccccagaagaatcttcgccaacgcccacacctaccacatcaacagcatcagcatcaacagcgactacgagacctacctgagcgccgacgacctgagaatcaacctgtggcacctggagatcaccgacagaagcttcaacatcgtggacatcaagcccgccaacatggaggagctgaccgaggtgatcaccgccgccgagttccaccccaacagctgcaacaccttcgtgtacagcagcagcaagggcaccatcagactgtgcgacatgagagccagcgccctgtgcgacagacacagcaagctgttcgaggagcccgaggaccccagcaacagaagcttcttcagcgagatcatcagcagcatcagcgacgtgaagttcagccacagcggcagatacatgatgaccagagactacctgagcgtgaagatctgggacctgaacatggagaacagacccgtggagacctaccaggtgcacgagtacctgagaagcaagctgtgcagcctgtacgagaacgactgcatcttcgacaagttcgagtgctgctggaacggcagcgacagcgtggtgatgaccggcagctacaacaacttcttcagaatgttcgacagaaacaccaagagagacatcaccctggaggccagcagagagaacaacaagcccagaaccgtgctgaagcccagaaaggtgtgcgccagcggcaagagaaagaaggacgagatcagcgtggacagcctggacttcaacaagaagatcctgcacaccgcctggcaccccaaggagaacatcatcgccgtggccaccaccaacaacctgtacatcttccaggacaaggtgaactag

SEQ ID NO: 11156 - DNA, 1413 bp, synthetic construct
  source 1..1413: mol_type = other DNA; note = Synthetic coding sequence
atggacctgagagaccaggagctggtgaagatcgtgggcatcagatacgaggtgggcccccccaccctgtgctgcctgaagctggccttcatcgaccccgccaccggcaagctgatggacaagagcttcagcatcagataccacgacatgcccgacgtgatcgacttcctggtgctgagacagttctacgacgaggccagacagagaaactggcagagctgcgacagattcagaagcatcatcgacgacgcctggtggttcggcaccgtgctgagccaggagccctaccagccccagtaccccgacagccacttccagtgctacatcgtgagatgggacaacaccgagatcgagaagctgagcccctgggacatggagcccatccccgacaacgtggacccccccgaggagctgggcgccagcatcagcgtgaccaccgacgagctggagaagctgctgtacaagccccaggccggcgagtggggccagaagagcagagacgaggagtgcgacagaatcatcagcggcatcgaccagctgctgaacctggacatcgccgccgccttcgccggccccgtggacctgtgcacctaccccaagtactgcaccgtggtggcctaccccaccgacctgtacaccatcagaatgagactggtgaacagattctacagaagactgagcgccctggtgtgggaggtgagatacatcgagcacaacgccagaaccttcaacgagcccgagagcgtgatcgccagaagcgccaagaagatcaccgaccagctgctgaagttcatcaagaaccagcactgcaccaacatcagcgagctgagcaacaccagcgagaacgacgagcagaacgccgaggacctggacgacagcgacctgcccaagaccagcagcggcagaagaagagactacagagacatcatcgacacccccatggacttcggcaccgtgagagagaccctggacgccggcaactacgacagccccctggagttctgcaaggacatcagactgatcttcagcaacgccaaggcctacacccccaacaagagaagcaagatctacagcatgaccctgagactgagcgccctgttcgaggagaagatgaagaagatcagcagcgacttcaagatcggccagaagttcaacgagaagctgagaagaagccagagattcaagcagagacagaactgcaagggcgacagccagcccaacaagagcatcagaaacctgaagcccaagagactgaagagccagaccaagatcatccccgagctggtgggcagccccacccagagcaccagcagcagaaccgcctacctgggcacccacaagaccagcgccggcatcagcagcggcgtgaccagcggcctgttcagattcagcagaatcatcagaaaggagtag

SEQ ID NO: 11157 - DNA, 516 bp, synthetic construct
  source 1..516: mol_type = other DNA; note = Synthetic coding sequence
atgtgcggcagagcccccccccccgagatcaccggcagagagcccggctaccacctggtggagcagagctgctggctgaagcccctgcccagaaacctgggccacagcctgttctggaccgtgtggaagcccagacccgtgagccagctggtggcccagcaggtgacccagcagttcgtgccccccacccagagcaagaaggagaagaaggacaaggtggagaaggagaagagcgagaaggagaccaccagcaagaagaacagccacaagaagaccagacccagactgaagaacgtggacagaagcagcgcccagcacctggaggtgaccgtgggcgacctgaccgtgatcatcaccgacttcaaggagaagaccaagagcccccccgccagcagcgccgccagcgccgaccagcacagccagagcggcagcagcagcgacaacaccgagagaggcatgagcagaagcagcagccccagaggcgaggccagcagcctgaacggcgagagccactag

SEQ ID NO: 11158 - DNA, 417 bp, synthetic construct
  source 1..417: mol_type = other DNA; note = Synthetic coding sequence
atgggcgacaagaagagccccaccagaaagcccagacccgtgagccagctggtggcccagcaggtgacccagcagttcgtgccccccacccagagcaagaaggagaagaaggacaaggtggagaaggagaagagcgagaaggagaccaccagcaagaagaacagccacaagaagaccagacccagactgaagaacgtggacagaagcagcgcccagcacctggaggtgaccgtgggcgacctgaccgtgatcatcaccgacttcaaggagaagaccaagagcccccccgccagcagcgccgccagcgccgaccagcacagccagagcggcagcagcagcgacaacaccgagagaggcatgagcagaagcagcagccccagaggcgaggccagcagcctgaacggcgagagccactag

SEQ ID NO: 11159 - DNA, 1047 bp, synthetic construct
  source 1..1047: mol_type = other DNA; note = Synthetic coding sequence
atgggccactgctgctgcaagccctacaactgcctgcagtgcctggacaagaccaacgagagcgccctggtgaaggagaaggagctgagcatcgagctggccaacatcagagacgaggtggccttccacaccgccaagtgcgagaagctgcagaaggagaaggaggagctggagagaagattcgaggacgaggtgaagagactgggctggcagcagcaggccgagctgcaggagctggaggagagactgcagctgcagttcgaggccgagatggccagactgcaggaggagcacggcgaccagctgctgagcatcagatgccagcaccaggagcaggtggaggacctgaccgccagccacgacgccgccctgctggagatggagaacaaccacaccgtggccatcaccatcctgcaggacgaccacgaccacaaggtgcaggagctgatgagcacccacgagctggagaagaaggagctggaggagaacttcgagaagctgagactgagcctgcaggaccaggtggacaccctgaccttccagagccagagcctgagagacagagccagaagattcgaggaggccctgagaaagaacaccgaggagcagctggagatcgccctggccccctaccagcacctggaggaggacatgaagagcctgaagcaggtgctggagatgaagaaccagcagatccacgagcaggagaagaagatcctggagctggagaagctggccgagaagaacatcatcctggaggagaagatccaggtgctgcagcagcagaacgaggacctgaaggccagaatcgaccagaacaccgtggtgaccagacagctgagcgaggagaacgccaacctgcaggagtacgtggagaaggagacccaggagaagaagagactgagcagaaccaacgaggagctgctgtggaagctgcagaccggcgaccccaccagccccatcaagctgagccccaccagccccgtgtacagaggcagcagcagcggccccagcagccccgccagagtgagcaccacccccagatag

SEQ ID NO: 11160 - DNA, 2664 bp, synthetic construct
  source 1..2664: mol_type = other DNA; note = Synthetic coding sequence
atgaacagcggcggcggcctgcccccccccagcgccgccgccagccccagcagcagcagcctggccgccgccgtggccgtggtggccccccccggcgtgggcggcgtgcccggcggcgccgccgtgggcgtgaagctgaagtactgcagatactacgccaaggacaagacctgcttctacggcgaggagtgccagttcctgcacgaggaccccgccgccggcgccgcccccggcctgggcctgcacagcaacagcgtgcccctggccctggccggcgcccccgtggccggcttcccccccggcgccgtggccggcggcggcgccggccccccccccggccccaagaagcccgacctgggcgaccccggcaccggcgccgccgccggcggcggcggcagcagcggcggcctggacggccccagactggccatccccggcatggacggcggcgccctgaccgacaccagcctgaccgacagctacttcagcaccagcttcatcggcgtgaacggcttcggcagccccgtggagaccaagtaccccctgatgcagagaatgaccaacagcagcagcagccccagcctgctgaacgacagcgccaagccctacagcgcccacgaccccctgaccagccccgccagcagcctgttcaacgacttcggcgccctgaacatcagccagagaagaaagcccagaaagtacagactgggcatgctggaggagagactggtgcccatgggcagcaaggccagaaaggccaagaaccccatcggctgcctggccgacagatgcaagagcggcgtgcccatcaacatggtgtggtggaacagagtgaccgagaacaacctgcagacccccaaccccaccgccagcgagttcatccccaagggcggcagcaccagcagactgagcaacgtgagccagagcaacatgagcgccttcagccaggtgttcagccaccccagcatgggcagccccgccaccgccggcctggcccccggcatgagcctgagcgccggcagcagccccctgcacagccccaagatcaccccccacaccagccccgcccccagaagaagaagccacacccccaaccccgccagctacatggtgcccagcagcgccagcaccagcgtgaacaaccccgtgagccagacccccagcagcggccaggtgatccagaaggagaccgtgggcggcaccacctacttctacaccgacaccacccccgcccccctgaccggcatggtgttccccaactaccacatctacccccccaccgccccccacgtggcctacatgcagcccaaggccaacgcccccagcttcttcatggccgacgagctgagacaggagctgatcaacagacacctgatcaccatggcccagatcgaccaggccgacatgcccgccgtgcccaccgaggtggacagctaccacagcctgttccccctggagcccctgcccccccccaacagaatccagaagagcagcaacttcggctacatcaccagctgctacaaggccgtgaacagcaaggacgacctgccctactgcctgagaagaatccacggcttcagactggtgaacaccaagtgcatggtgctggtggacatgtggaagaagatccagcacagcaacatcgtgaccctgagagaggtgttcaccaccaaggccttcgccgagcccagcctggtgttcgcctacgacttccacgccggcggcgagaccatgatgagcagacacttcaacgaccccaacgccgacgcctacttcaccaagagaaagtggggccagcacgagggccccctgcccagacagcacgccggcctgctgcccgagagcctgatctgggcctacatcgtgcagctgagcagcgccctgagaaccatccacaccgccggcctggcctgcagagtgatggaccccaccaagatcctgatcaccggcaagaccagactgagagtgaactgcgtgggcgtgttcgacgtgctgaccttcgacaacagccagaacaacaaccccctggccctgatggcccagtaccagcaggccgacctgatcagcctgggcaaggtggtgctggccctggcctgcaacagcctggccggcatccagagagagaacctgcagaaggccatggagctggtgaccatcaactacagcagcgacctgaagaacctgatcctgtacctgctgaccgaccagaacagaatgagaagcgtgaacgacatcatgcccatgatcggcgccagattctacacccagctggacgccgcccagatgagaaacgacgtgatcgaggaggacctggccaaggaggtgcagaacggcagactgttcagactgctggccaagctgggcaccatcaacgagagacccgagttccagaaggaccccacctggagcgagaccggcgacagatacctgctgaagctgttcagagaccacctgttccaccaggtgaccgaggccggcgccccctggatcgacctgagccacatcatcagctgcctgaacaagctggacgccggcgtgcccgagaagatcagcctgatcagcagagacgagaagagcgtgctggtggtgacctacagcgacctgaagagatgcttcgagaacaccttccaggagctgatcgccgccgccaacggccagctgtag

SEQ ID NO: 11161 - DNA, 1710 bp, synthetic construct
  source 1..1710: mol_type = other DNA; note = Synthetic coding sequence
atggccaccctggtggtgaacaagctgggcgccggcgtggacagcggcagacagggcagcagaggcaccgccgtggtgaaggtgctggagtgcggcgtgtgcgaggacgtgttcagcctgcagggcgacaaggtgcccagactgctgctgtgcggccacaccgtgtgccacgactgcctgaccagactgcccctgcacggcagagccatcagatgccccttcgacagacaggtgaccgacctgggcgacagcggcgtgtggggcctgaagaagaacttcgccctgctggagctgctggagagactgcagaacggccccatcggccagtacggcgccgccgaggagagcatcggcatcagcggcgagagcatcatcagatgcgacgaggacgaggcccacctggccagcgtgtactgcaccgtgtgcgccacccacctgtgcagcgagtgcagccaggtgacccacagcaccaagaccctggccaagcacagaagagtgcccctggccgacaagccccacgagaagaccatgtgcagccagcaccaggtgcacgccatcgagttcgtgtgcctggaggagggctgccagaccagccccctgatgtgctgcgtgtgcaaggagtacggcaagcaccagggccacaagcacagcgtgctggagcccgaggccaaccagatcagagccagcatcctggacatggcccactgcatcagaaccttcaccgaggagatcagcgactacagcagaaagctggtgggcatcgtgcagcacatcgagggcggcgagcagatcgtggaggacggcatcggcatggcccacaccgagcacgtgcccggcaccgccgagaacgccagaagctgcatcagagcctacttctacgacctgcacgagaccctgtgcagacaggaggagatggccctgagcgtggtggacgcccacgtgagagagaagctgatctggctgagacagcagcaggaggacatgaccatcctgctgagcgaggtgagcgccgcctgcctgcactgcgagaagaccctgcagcaggacgactgcagagtggtgctggccaagcaggagatcaccagactgctggagaccctgcagaagcagcagcagcagttcaccgaggtggccgaccacatccagctggacgccagcatccccgtgaccttcaccaaggacaacagagtgcacatcggccccaagatggagatcagagtggtgaccctgggcctggacggcgccggcaagaccaccatcctgttcaagctgaagcaggacgagttcatgcagcccatccccaccatcggcttcaacgtggagaccgtggagtacaagaacctgaagttcaccatctgggacgtgggcggcaagcacaagctgagacccctgtggaagcactactacctgaacacccaggccgtggtgttcgtggtggacagcagccacagagacagaatcagcgaggcccacagcgagctggccaagctgctgaccgagaaggagctgagagacgccctgctgctgatcttcgccaacaagcaggacgtggccggcgccctgagcgtggaggagatcaccgagctgctgagcctgcacaagctgtgctgcggcagaagctggtacatccagggctgcgacgccagaagcgtgttccagatcatctgcgaccagtacaccggcaaggaggtggtgaccgagaagggctag

SEQ ID NO: 11162 - DNA, 2061 bp, synthetic construct
  source 1..2061: mol_type = other DNA; note = Synthetic coding sequence
atgggcagaatccaccaggccatggtgaccagcctgaacgaggacaacgagagcgtgaccgtggagtggatcgagaacggcgacaccaagggcaaggagatcgacctggagagcatcttcagcctgaaccccgacctggtgcccgacgaggagatcgagcccagccccgagaccccccccccccccgccagcagcgccaaggtgaacaagatcgtgaagaacagaagaaccgtggccagcatcaagaacgacccccccagcagagacaacagagtggtgggcagcgccagagccagacccagccagttccccgagcagagcagcagcgcccagcagaacggcagcgtgagcgacatcagccccgtgcaggccgccaagaaggagttcggcccccccagcagaagaaagagcaactgcgtgaaggaggtggagaagctgcaggagaagagagagaagagaagactgcagcagcaggagctgagagagaagagagcccaggacgtggacgccaccaaccccaactacgagatcatgtgcatgatcagagacttcagaggcagcctggactacagacccctgaccaccgccgaccccatcgacgagcacagaatctgcgtgtgcgtgagaaagagacccctgaacaagaaggagacccagatgaaggacctggacgtgatcaccatccccagcaaggacgtggtgatggtgcacgagcccaagcagaaggtggacctgaccagatacctggagaaccagaccttcagattcgactacgccttcgacgacagcgcccccaacgagatggtgtacagattcaccgccagacccctggtggagaccatcttcgagagaggcatggccacctgcttcgcctacggccagaccggcagcggcaagacccacaccatgggcggcgacttcagcggcaagaaccaggactgcagcaagggcatctacgccctggccgccagagacgtgttcctgatgctgaagaagcccaactacaagaagctggagctgcaggtgtacgccaccttcttcgagatctacagcggcaaggtgttcgacctgctgaacagaaagaccaagctgagagtgctggaggacggcaagcagcaggtgcaggtggtgggcctgcaggagagagaggtgaagtgcgtggaggacgtgctgaagctgatcgacatcggcaacagctgcagaaccagcggccagaccagcgccaacgcccacagcagcagaagccacgccgtgttccagatcatcctgagaagaaagggcaagctgcacggcaagttcagcctgatcgacctggccggcaacgagagaggcgccgacaccagcagcgccgacagacagaccagactggagggcgccgagatcaacaagagcctgctggccctgaaggagtgcatcagagccctgggcagaaacaagccccacacccccttcagagccagcaagctgacccaggtgctgagagacagcttcatcggcgagaacagcagaacctgcatgatcgccaccatcagccccggcatggccagctgcgagaacaccctgaacaccctgagatacgccaacagagtgaaggagctgaccgtggaccccaccgccgccggcgacgtgagacccatcatgcaccacccccccaaccagatcgacgacctggagacccagtggggcgtgggcagcagcccccagagagacgacctgaagctgctgtgcgagcagaacgaggaggaggtgagcccccagctgttcaccttccacgaggccgtgagccagatggtggagatggaggagcaggtggtggaggaccacagagccgtgttccaggagagcatcagatggctggaggacgagaaggccctgctggagatgaccgaggaggtggactacgacgtggacagctacgccacccagctggaggccatcctggagcagaagatcgacatcctgaccgagctgagagacaaggtgaagagcttcagagccgccctgcaggaggaggagcaggccagcaagcagatcaaccccaagagacccagagccctgtag

SEQ ID NO: 11163 - DNA, 618 bp, synthetic construct
  source 1..618: mol_type = other DNA; note = Synthetic coding sequence
atgagcgtggaccccatgacctacgaggcccagttcttcggcttcaccccccagacctgcatgctgagaatctacatcgccttccaggactacctgttcgaggtgatgcaggccgtggagcaggtgatcctgaagaagctggacggcatccccgactgcgacatcagccccgtgcagatcagaaagtgcaccgagaagttcctgtgcttcatgaagggccacttcgacaacctgttcagcaagatggagcagctgttcctgcagctgatcctgagaatccccagcaacatcctgctgcccgaggacaagtgcaaggagaccccctacagcgaggaggacttccagcacctgcagaaggagatcgagcagctgcaggagaagtacaagaccgagctgtgcaccaagcaggccctgctggccgagctggaggagcagaagatcgtgcaggccaagctgaagcagaccctgaccttcttcgacgagctgcacaacgtgggcagagaccacggcaccagcgacttcagagagagcctggtgagcctggtgcagaacagcagaaagctgcagaacatcagagacaacgtggagaaggagagcaagagactgaagatcagctag

SEQ ID NO: 11164 - DNA, 1866 bp, synthetic construct
  source 1..1866: mol_type = other DNA; note = Synthetic coding sequence
atggtgctgtgccccgtgatcggcaagctgctgcacaagagagtggtgctggccagcgccagccccagaagacaggagatcctgagcaacgccggcctgagattcgaggtggtgcccagcaagttcaaggagaagctggacaaggccagcttcgccaccccctacggctacgccatggagaccgccaagcagaaggccctggaggtggccaacagactgtaccagaaggacctgagagcccccgacgtggtgatcggcgccgacaccatcgtgaccgtgggcggcctgatcctggagaagcccgtggacaagcaggacgcctacagaatgctgagcagactgagcggcagagagcacagcgtgttcaccggcgtggccatcgtgcactgcagcagcaaggaccaccagctggacaccagagtgagcgagttctacgaggagaccaaggtgaagttcagcgagctgagcgaggagctgctgtgggagtacgtgcacagcggcgagcccatggacaaggccggcggctacggcatccaggccctgggcggcatgctggtggagagcgtgcacggcgacttcctgaacgtggtgggcttccccctgaaccacttctgcaagcagctggtgaagctgtactacccccccagacccgaggacctgagaagaagcgtgaagcacgacagcatccccgccgccgacaccttcgaggacctgagcgacgtggagggcggcggcagcgagcccacccagagagacgccggcagcagagacgagaaggccgaggccggcgaggccggccaggccaccgccgaggccgagtgccacagaaccagagagaccctgccccccttccccaccagactgctggagctgatcgagggcttcatgctgagcaagggcctgctgaccgcctgcaagctgaaggtgttcgacctgctgaaggacgaggccccccagaaggccgccgacatcgccagcaaggtggacgccagcgcctgcggcatggagagactgctggacatctgcgccgccatgggcctgctggagaagaccgagcagggctacagcaacaccgagaccgccaacgtgtacctggccagcgacggcgagtacagcctgcacggcttcatcatgcacaacaacgacctgacctggaacctgttcacctacctggagttcgccatcagagagggcaccaaccagcaccacagagccctgggcaagaaggccgaggacctgttccaggacgcctactaccagagccccgagaccagactgagattcatgagagccatgcacggcatgaccaagctgaccgcctgccaggtggccaccgccttcaacctgagcagattcagcagcgcctgcgacgtgggcggctgcaccggcgccctggccagagagctggccagagagtaccccagaatgcaggtgaccgtgttcgacctgcccgacatcatcgagctggccgcccacttccagccccccggcccccaggccgtgcagatccacttcgccgccggcgacttcttcagagaccccctgcccagcgccgagctgtacgtgctgtgcagaatcctgcacgactggcccgacgacaaggtgcacaagctgctgagcagagtggccgagagctgcaagcccggcgccggcctgctgctggtggagaccctgctggacgaggagaagagagtggcccagagagccctgatgcagagcctgaacatgctggtgcagaccgagggcaaggagagaagcctgggcgagtaccagtgcctgctggagctgcacggcttccaccaggtgcaggtggtgcacctgggcggcgtgctggacgccatcctggccaccaaggtggccccctag

SEQ ID NO: 11165 - DNA, 2541 bp, synthetic construct; identical to SEQ ID NO: 9822
  source 1..2541: mol_type = other DNA; note = Synthetic coding sequence

SEQ ID NO: 11166 - DNA, 1818 bp, synthetic construct
  source 1..1818: mol_type = other DNA; note = Synthetic coding sequence
atggtgctgtgccccgtgatcggcaagctgctgcacaagagagtggtgctggccagcgccagccccagaagacaggagatcctgagcaacgccggcctgagattcgaggtggtgcccagcaagttcaaggagaagctggacaaggccagcttcgccaccccctacggctacgccatggagaccgccaagcagaaggccctggaggtggccaacagactgtaccagaccgtgggcggcctgatcctggagaagcccgtggacaagcaggacgcctacagaatgctgagcagactgagcggcagagagcacagcgtgttcaccggcgtggccatcgtgcactgcagcagcaaggaccaccagctggacaccagagtgagcgagttctacgaggagaccaaggtgaagttcagcgagctgagcgaggagctgctgtgggagtacgtgcacagcggcgagcccatggacaaggccggcggctacggcatccaggccctgggcggcatgctggtggagagcgtgcacggcgacttcctgaacgtggtgggcttccccctgaaccacttctgcaagcagctggtgaagctgtactacccccccagacccgaggacctgagaagaagcgtgaagcacgacagcatccccgccgccgacaccttcgaggacctgagcgacgtggagggcggcggcagcgagcccacccagagagacgccggcagcagagacgagaaggccgaggccggcgaggccggccaggccaccgccgaggccgagtgccacagaaccagagagaccctgccccccttccccaccagactgctggagctgatcgagggcttcatgctgagcaagggcctgctgaccgcctgcaagctgaaggtgttcgacctgctgaaggacgaggccccccagaaggccgccgacatcgccagcaaggtggacgccagcgcctgcggcatggagagactgctggacatctgcgccgccatgggcctgctggagaagaccgagcagggctacagcaacaccgagaccgccaacgtgtacctggccagcgacggcgagtacagcctgcacggcttcatcatgcacaacaacgacctgacctggaacctgttcacctacctggagttcgccatcagagagggcaccaaccagcaccacagagccctgggcaagaaggccgaggacctgttccaggacgcctactaccagagccccgagaccagactgagattcatgagagccatgcacggcatgaccaagctgaccgcctgccaggtggccaccgccttcaacctgagcagattcagcagcgcctgcgacgtgggcggctgcaccggcgccctggccagagagctggccagagagtaccccagaatgcaggtgaccgtgttcgacctgcccgacatcatcgagctggccgcccacttccagccccccggcccccaggccgtgcagatccacttcgccgccggcgacttcttcagagaccccctgcccagcgccgagctgtacgtgctgtgcagaatcctgcacgactggcccgacgacaaggtgcacaagctgctgagcagagtggccgagagctgcaagcccggcgccggcctgctgctggtggagaccctgctggacgaggagaagagagtggcccagagagccctgatgcagagcctgaacatgctggtgcagaccgagggcaaggagagaagcctgggcgagtaccagtgcctgctggagctgcacggcttccaccaggtgcaggtggtgcacctgggcggcgtgctggacgccatcctggccaccaaggtggccccctag

SEQ ID NO: 11167 - DNA, 696 bp, synthetic construct
  source 1..696: mol_type = other DNA; note = Synthetic coding sequence
atgaccgtgggcaagagcagcaagatgctgcagcacatcgactacagaatgagatgcatcctgcaggacggcagaatcttcatcggcaccttcaaggccttcgacaagcacatgaacctgatcctgtgcgactgcgacgagttcagaaagatcaagcccaagaacagcaagcaggccgagagagaggagaagagagtgctgggcctggtgctgctgagaggcgagaacctggtgagcatgaccgtggagggccccccccccaaggacaccggcatcgccagagtgcccctggccggcgccgccggcggccccggcatcggcagagccgccggcagaggcatccccgccggcgtgcccatgccccaggcccccgccggcctggccggccccgtgagaggcgtgggcggccccagccagcaggtgatgaccccccagggcagaggcaccgtggccgccgccgccgccgccgccaccgccagcatcgccggcgcccccacccagtacccccccggcagaggcggcccccccccccccatgggcagaggcgcccccccccccggcatgatgggccccccccccggcatgagaccccccatgggcccccccatgggcatcccccccggcagaggcacccccatgggcatgcccccccccggcatgagaccccccccccccggcatgagaggcctgctgtag

SEQ ID NO: 11168 - DNA, 855 bp, synthetic construct
  source 1..855: mol_type = other DNA; note = Synthetic coding sequence
atgtggagaggcctggccctggccagagccatcggctgcgccgccagaggcagaggccagtgggccgtgagagccgccgactgcgcccagagcggcagacaccccggccccgccgtggtgtgcggcagaagactgatcagcgtgctggagcagatcagacacttcgtgatgatgcccgagatcaacaccaaccacctggacaagcagcaggtgcagctgctggccgagatgtgcatcctgatcgacgagaacgacaacaagatcggcgccgagaccaagaagaactgccacctgaacgagaacatcgagaagggcctgctgcacagagccttcagcgtgttcctgttcaacaccgagaacaagctgctgctgcagcagagaagcgacgccaagatcaccttccccggctgcttcaccaacacctgctgcagccaccccctgagcaaccccgccgagctggaggagagcgacgccctgggcgtgagaagagccgcccagagaagactgaaggccgagctgggcatccccctggaggaggtgccccccgaggagatcaactacctgaccagaatccactacaaggcccagagcgacggcatctggggcgagcacgagatcgactacatcctgctggtgagaaagaacgtgaccctgaaccccgaccccaacgagatcaagagctactgctacgtgagcaaggaggagctgaaggagctgctgaagaaggccgccagcggcgagatcaagatcaccccctggttcaagatcatcgccgccaccttcctgttcaagtggtgggacaacctgaaccacctgaaccagttcgtggaccacgagaagatctacagaatgtag

SEQ ID NO: 11169 - DNA, 180 bp, synthetic construct; identical to SEQ ID NO: 9329
  source 1..180: mol_type = other DNA; note = Synthetic coding sequence

SEQ ID NO: 11170 - DNA, 3039 bp, synthetic construct
  source 1..3039: mol_type = other DNA; note = Synthetic coding sequence
atggaggagtacgagaagttctgcgagaagagcctggccagaatccaggaggccagcctgagcaccgagagcttcctgcccgcccagagcgagagcatcagcctgatcagattccacggcgtggccatcctgagccccctgctgaacatcgagaagagaaaggagatgcagcaggagaagcagaaggccctggacgtggaggccagaaagcaggtgaacagaaagaaggccctgctgaccagagtgcaggagatcctggacaacgtgcaggtgagaaaggcccccaacgccagcgacttcgaccagtgggagatggagaccgtgtacagcaacagcgaggtgagaaacctgaacgtgcccgccaccttccccaacagcttccccagccacaccgagcacagcaccgccgccaagctggacaagatcgccggcatcctgcccctggacaacgaggaccagtgcaagaccgacggcatcgacctggccagagacagcgagggcttcaacagccccaagcagtgcgacagcagcaacatcagccacgtggagaacgaggccttccccaagaccagcagcgccaccccccaggagaccctgatcagcgacggccccttcagcgtgaacgagcagcaggacctgcccctgctggccgaggtgatccccgacccctacgtgatgagcctgcagaacctgatgaagaagagcaaggagtacatcgagagagagcagagcagaagaagcctgagaggcagcatcaacagaatcgtgaacgagagccacctggacaaggagcacgacgccgtggaggtggccgactgcgtgaaggagaagggccagctgaccggcaagcactgcgtgagcgtgatccccgacaagcccagcctgaacaagagcaacgtgctgctgcagggcgccagcacccaggccagcagcatgagcatgcccgtgctggccagcttcagcaaggtggacatccccatcagaaccggccaccccaccgtgctggagagcaacagcgacttcaaggtgatccccaccttcgtgaccgagaacaacgtgatcaagagcctgaccggcagctacgccaagctgcccagccccgagcccagcatgagccccaagatgcacagaagaagaagcagaaccagcagcgcctgccacatcctgatcaacaaccccatcaacgcctgcgagctgagccccaagggcaaggagcaggccatggacctgatcatccaggacaccgacgagaacaccaacgtgcccgagatcatgcccaagctgcccaccgacctggccggcgtgtgcagcagcaaggtgtacgtgggcaagaacaccagcgaggtgaaggaggacgtggtgctgggcaagagcaaccaggtgtgccagagcagcggcaaccacctggagaacaaggtgacccacggcctggtgaccgtggagggccagctgaccagcgacgagagaggcgcccacatcatgaacagcacctgcgccgccatgcccaagctgcacgagccctacgccagcagccagtgcatcgccagccccaacttcggcaccgtgagcggcctgaagcccgccagcatgctggagaagaactgcagcctgcagaccgagctgaacaagagctacgacgtgaagaaccccagccccctgctgatgcagaaccagaacaccagacagcagatggacacccccatggtgagctgcggcaacgagcagttcctggacaacagcttcgagaaggtgaagagaagactggacctggacatcgacggcctgcagaaggagaactgcccctacgtgatcaccagcggcatcaccgagcaggagagacagcacctgcccgagaagagataccccaagggcagcggcttcgtgaacaagaacaagatgctgggcaccagcagcaaggagagcgaggagctgctgaagagcaagatgctggccttcgaggagatgagaaagagactggaggagcagcacgcccagcagctgagcctgctgatcgccgagcaggagagagagcaggagagactgcagaaggagatcgaggagcaggagaagatgctgaaggagaagaaggccatgaccgccgaggccagcgagctggacatcaacaacgccgtggagctggagtggagaaagatcagcgacagcagcctgctggagaccatgctgagccaggccgacagcctgcacaccagcaacagcaacagcagcggcttcaccaacagcgccatgcagtacagcttcgtgagcgccaacgaggcccccttctacctgtggggcagcagcaccagcggcctgaccaagctgagcgtgaccagacccttcggcagagccaagaccagatggagccaggtgttcagcctggagatccaggccaagttcaacaagatcaccgccgtggccaagggcttcctgaccagaagactgatgcagaccgacaagctgaagcagctgagacagaccgtgaaggacaccatggagttcatcagaagcttccagagcgaggcccccctgaagagaggcatcgtgagcgcccaggacgccagcctgcaggagagagtgctggcccagctgagagccgccctgtacggcatccacgacatcttcttcgtgatggacgccgccgagagaatgagcatcctgcaccacgacagagaggtgagaaaggagaagatgctgagacagatggacaagatgaagagccccagagtggccctgagcgccgccacccagaagagcctggacagaaagaagtacatgaaggccgccgagatgggcatgcccaacaagaagttcctggtgaagcagaaccccagcgagaccagagtgctgcagcccaaccagggccagaacgcccccgtgcacagactgctgagcagacagggcacccccaagaccagcgtgaagggcgtggtgcagaacagacagaagcccagccagagcagagtgcccaacagagtgcccgtgagcggcgtgtacgccggcaagatccagagaaagagacccaacgtggccaccatctag

SEQ ID NO: 11171 - DNA, 267 bp, synthetic construct
  source 1..267: mol_type = other DNA; note = Synthetic coding sequence
atggccagcgccagcgccagaggcaaccaggacaaggacgcccacttccccccccccagcaagcagagcctgctgttctgccccaagagcaagctgcacatccacagagccgagatcagcaagatcatgagagagtgccaggaggagagcttctggaagagagccctgcccttcagcctggtgagcatgctggtgacccagggcctggtgtaccagggctacctggccgccaacagcagattcggcagcctgcccaaggtggcctag

SEQ ID NO: 11172 - DNA, 738 bp, synthetic construct; identical to SEQ ID NO: 9467
  source 1..738: mol_type = other DNA; note = Synthetic coding sequence

SEQ ID NO: 11173 - DNA, 1551 bp, synthetic construct
  source 1..1551: mol_type = other DNA; note = Synthetic coding sequence
atgagctaccccgccgacgactacgagagcgaggccgcctacgacccctacgcctaccccagcgactacgacatgcacaccggcgaccccaagcaggacctggcctacgagagacagtacgagcagcagacctaccaggtgatccccgaggtgatcaagaacttcatccagtacttccacaagaccgtgagcgacctgatcgaccagaaggtgtacgagctgcaggccagcagagtgagcagcgacgtgatcgaccagaaggtgtacgagatccaggacatctacgagaacagctggaccaagctgaccgagagattcttcaagaacaccccctggcccgaggccgaggccatcgccccccaggtgggcaacgacgccgtgttcctgatcctgtacaaggagctgtactacagacacatctacgccaaggtgagcttccagagcttcagccagtacagatgcaagaccgccaagaagagcgaggaggagatcgacttcctgagaagcaaccccaagatctggaacgtgcacagcgtgctgaacgtgctgcacagcctggtggacaagagcaacatcaacagacagctggaggtgtacaccagcggcggcgaccccgagagcgtggccggcgagtacggcagacacagcctgtacaagatgctgggctacttcagcctggtgggcctgctgagactgcacagcctgctgggcgactactaccaggccatcaaggtgctggagaacatcgagctgaacaagaagagcatgtacagcagagtgcccgagtgccaggtgaccacctactactacgtgggcttcgcctacctgatgatgagaagataccaggacgccatcagagtgttcgccaacatcctgctgtacatccagagaaccaagagcatgttccagagaaccacctacaagtacgagatgatcaacaagcagaacgagcagatgcacgccctgctggccatcgccctgaccatgtaccccatgagaatcgacgagagcatccacctgcagctgagagagaagtacggcgacaagatgctgagaatgcagaagggcgacccccaggtgtacgaggagctgttcagctacagctgccccaagttcctgagccccgtggtgcccaactacgacaacgtgcaccccaactaccacaaggagcccttcctgcagcagctgaaggtgttcagcgacgaggtgcagcagcaggcccagctgagcaccatcagaagcttcctgaagctgtacaccaccatgcccgtggccaagctggccggcttcctggacctgaccgagcaggagttcagaatccagctgctggtgttcaagcacaagatgaagaacctggtgtggaccagcggcatcagcgccctggacggcgagttccagagcgccagcgaggtggacttctacatcgacaaggacatgatccacatcgccgacaccaaggtggccagaagatacggcgacttcttcatcagacagatccacaagttcgaggagctgaacagaaccctgaagaagatgggccagagaccctag
